United States Patent Application Publication US 2018/0305689 A1 - sequence listing, part 129

SEQ ID NO: 1880681 - DNA, 4001 bp, Homo sapiens
ttttggaagcagggttttgtccaggctgaaatgcaatgcataattaattacaactcctgggctcaagggatccttttgtctcagacttcccagtaggcaggaccataggagtcagcctactttttttttttttttttttttttttacagagatgggggtcttgctatggtgcccaggctgctcttgaactcctggacactcaagtgatcctcccaaagcatagggattacaggcaccccacaacaaagaattacctggccccaaatgtctgttgtgttgaggtcaagaaatggacagaaacacaaactggcttatatttagacaacttacattaaatataacttctgccaaagtataggtagtctaagaattgaaaatatcaagacctttacaagtggttggcacctggcaggtatacagaaccactgggtcacataatccccagaggcaacattcacacagcgatagcagtagcactactaaaaggaaatggtgtgaccatcaatttggtgcttaaaaaccattctttttactgcaataaaacccaacaataaatgttagttcatgtcttttattaactcatacagttacttgtcttctggtttgttgaaacagtaagtcagacaacatttgccacaataatgtctgtcaaagtgacttgccataaacaccccagcaccacattcatcagaagggcactctcgacgaaggcgactaattttgccattctcatccacctgaaaagcacaaacctgctgttaagataattttacaacacattctgaagtctaatttaagtgactcaaaatatttaagcttttaactgtgtaatactggtggttttggtgcttacaaaccaaagcaccctaaattctcaccagttatcattgctacaatgaaaacattcagaagtcttgggacttttgaacactaaaggccagctttgcaagtggtagacaaaggtaaagacctgaacccaaacccgactttaaactcagaaccctattacataactgatttcaaataccaaacaggaaaaaccccagaaagtctgaatttctcatttccagaatacctcatttaaaccaaagtgggataatattgggtgtttaagtccaagaaaatattgacaagtactataaagattaagttttccaaataagccaagactttgctgacattctgccctttaactggctcaccttataatatttcaggacagccagcttaaccttctttctcttgtgcttattcttcttgggagtggtgtaagacttcttcttccttttcttagcaccaccacgaagtctcaacacaagatgaagagtagactcctgttaatggaagaatgaagcaagctttcatgattccactaagaatgggcacacccaacattatgcattttctaattaaaagcagtagcagcacacaataacatttgagggaatcttgcagcccccaaacccaataaagtatcagattcttaactgacagtttatagggacattaaagaatgcattacattacaccatgggatacaacttgcaaaattcataatgggagaactatagcagtgcttctcaagtatcagtataggagttacctaaaaatctactgctattcgaatgccattttccctttttgtgtgtcaaaatgtccagaatacaccacatggagtggctcacgtctgtaatcccagcgctgggaggccacggtgggaagatcacttatgcccaggagtttgagaccagcctgggcatggtggcgggtgcctatagttccaactacaggaggctgaggtgggaggaccacctgagtctgagaggtggaggttgcagtgactgcgccactcactccaccctaggtgacagagtcagagcctgtctcaaaaaaagtaaaataaaaaatttccaaaataacattttttttttaaaagaggctgctcttcccctagacagaccttttgaatattgtagtcagacaaagtacgtccatcttccagctgcttgccagcaaagatcagtctctgctgatcaggaggaattcctaatgacaaaaaacaaaaattaagtcacagcacaccaagcctgtgatgtgctccagacttataaggtaacaccccttaatcaaatacatgatactaaaggctgacaataagcccttactagaggttaggcatggttctaaatctttacatgtcacattttaccgcatttaatattagggacaatacttggttgtctgcagtggctgacacctgtaataccaatactttgggaggtcgaggtgggcagatcacttgatgtgaaaagttcaaaaccagcctggccaacaaggtaaaacccagtctctactaaaaatacaataaattagccaggcatggtggtgcacgcctgtaatccccactaatagggaggctgaagcacaaaaatcacttgaacccgggaggcggaggctgcagtaagccgggacaagcgaatgcactccagcctgggcgacagaggagactccatctcacacaaaataaataaataagtgtccaaattcacgcaagtgaaatacacctcaaggattccaatctaggtactgtgctccccgatcaccaatgtctattgtgttattccacaagtatttcgctttgtcaatctgaccccttcccccatcaccaagagcaggtatgtctagcacctacaggtaggccgaagtctccgcaggttaagttttcttaactacaaaatactacttgccttccttatcctggatcttggcctttacattttctatcgtatccgagggttcaacctatgagtgttaaagtgaaagcatgttggttacacattaaggaactacagcagaactcatttagtttgacaattaccactgaaccgaaccagcgacagggctgagacctactcgagagacctattacccacccagtgggcaacctcccaagtcggctaccggaaagcaccttcatctccccagcccagagcgggcggcggccgcagggccacacgtgctcgcacccggcgggcagagcgtctccttccccaccgcagctcctccgttttaactaactagctggaacccctcgagaggagacaggtccagcctttggccaccgaaaatcacctctaggtcgttgctcagcaaaaggtactcatttcaaagcttaagttttagaacccaaattcggaatcatggtctaagacatggaaagcagcgccggtcctaaaatccacctcaggaccttattcggaccttggcttcctcatgaccacccggcccgtacctcgagggtgatggtcttccccgtaagggttttcacgaaaatctgcattttggtggcggctccacctgaggttgaggaaaaggaagagacaggttaggtcagggatcacaagagaaggcaccatagggtgctaacccgagagcagccgaagtgcagacacccaccgcagatggcggatcgaaaaggaagaacgccgcgcaggcccacggggtttcccggagctcccgccgaaggacccaccccttaggcgaccacaccaaatgcctgactgccgtcccagcgacaatccaacccggtgccagactaggacgtgaacttcgtttctcctctccctagcctgggcttatttctcactttagccttcggaatgctttcgaaactgtaggtttaagcaacgtaaaagatgttttaaaaaggcttttcccgtacaatcaacgtggctaagagaatttttaaaaggaggtcgaggggggcctcttggggaagaggtaggaaatggaagtgcattctgggaactgtagttctccactgctttcttctaccttggactacttgtcccaagatgcagttccacctcccagattccctagttactatctctaagcactgaagtcggtgtttggagaaaaggactcaggtgaggactggaggtaggatgaagcggaataatggtttccggagcgtgggaacgggccggaagtgactagag

SEQ ID NO: 1880682 - DNA, 4001 bp, Homo sapiens
tttctttctttccttcctccctccctccctcccttcctccctccccctctctctcactttcccttccttctttccttcctttcttccttccttccttcccgtcttccttccttccttcccttctttacttccttccttcctccctcccttcctccctccctccatcccttccttccttcctccctccgtccctccctttttccctccctctctttcttttccttccttccttccccctcccctcccctcgtgtcccctcccctcccctcgtgtcccctcccctcctctcccctcccttcccctcctctcctctcttctcctcctttctcccttctcctcccttctcttctcttctcttctcttctcttctcttctcttctcttctcttctcttatgatagggtctcactttgtcatccaggctggagtgcagtggtgcgatcacagctcactgcaccctctgcctcctgggctcaagcgatcctcccacctgaaccttctaagtagctgggacttcaggtgtgcaccaccacagccagttaatttttattttttgtagagatgtggtctcattatgttgcccaggctggtttcccactcctgggctcaagcaatcctcccatctcggcctcccacagtgctgggattacaggtgtgaaccattgtgcccagccaatagctggtgttttcttgaagatttcctgggcctctccagggggtttttgttgttggggcatgttccatggtattcacagcagagttgtttgaaggggcacgtgctcgcttatgtggcttaggtccacgctacctgtagtccttcggaggcaagccaggctgccagctgactgtcttccaccacaaagcctgtgttcttctcctgaccctttgttctttgcacagcgtactgtggctccagtccaagtacacaaacttccatgtagtttaaaaagaatcagtttaactgttggtggttagacagattggtatgtacctgtgtggagagcactgtgacccagcaaaacacttcagggctaagaagacacgaaacggtggcatttgccatctgacccggcaggcgctggggcagatgaagctccagttggaagggctactgctgaattttttttttttttttttttttggttgttgttgtagctctgggagcagatactagctctgaaacttttcccctggctggcttggctgcctctccctgccgggcaggggccaggaagcctgggtgtcaggcagacccgagccaggctctgcacagcagggcattacgcgccccacgcatcctcttccatccccaggcacagatcaaaggcgcagcccaggaggcgggagcccctgcacactttccacctctgctgggcttagcctcttggctggttggtctgtggagtgcctgaagtgaccagctttttgtaaggtacggtttatttgactttgcaagcgagcacctgctttgggggttggagaggtttgtgttgacttacgaagacagctgtggcctgtgttcagcagaataatggcaaagcattggcccttctaataaggtgcaggggagcagtaaaccgagacaagtccacttaatgaacgggtgtccttatttttattgtttgaaatgatatccaaagggattgcagataattagtttgtgttcttatgaatgataggctaaggagattcaaaacactgcttgggccctgcctggttggttccagagagaaggttttcagtggtttctgcttccctggctttattctgaaggtccttctcttccattcagttcttactgcaatcggaggggacatagctgatggctctgtagttccatttgagagcacttaaagatattctccaaagaaacactctctgacattctgtgcacagatgtagagcagctcggggctgagctgtggctgtgggccaggcagtctgagttggagagacaaacaaattagacaccagtcgcctctcagcccagcttttctcccttcagtaacacctgtggagtttatgagttcctctagggaaaatcggagaaatctacatgagaatgatgtcttgtttcctgctgggaggaccgtcaaagagtttataggagaccatcctgcagtctcaatgcgtttattgccgtgtcatatattgggggctgactattgccacattactggagcaccccattcccatccttcctcagctgttgaaagtgagacaggttgaggacgcagtccggagagtgttgcttttttcaagtcttgttttctcaaactttggactcaccagaagtaagtcaccatgcttctgtgttggctggggaattcttccagttagaatttagttgtagggaagttagaagaggagggagcatgggtcagtgatgtctggaatttggggtgttctagtgagatttggggtggggtcatgtccctgtggctggccagggtagtggccctgaagggccaggttggcagggcttctaggagaaggccatctcccagaaggagatggaaccccaggtgggagggtatgtggtgtgttttggatgtgattcagaatggaggcagtgaggcagaaagggaagggaaagggaggccgggcaggaagccagggttggggttttgctcttatagacttgactccagaccatggcccttccttctctgccatggatccttctggaggagagggtatcacaccgcttgaggctctgtgcacaggcgggttctgtgggcatccgcgagtgagtggatggcaagtgagaggggggccatggggatcggaacacttggcatcgtgacctctcagctctctcttcagacccccatgcactactcttctctatgacagtgagaccaccactgcctccgactctttccaaagcccgaggtcagctaggctcctcgtgctactcaccctgcacagaggcagtctttagtcctctttgagtcttggtctattgcagtatcctcctagaagccttccttaggaagccgcaggaatctcaaacacagcctcatcagccctgcctaactcctttggtggcttgacgtggttaatttcaaacaccttagcagggcttaggctgaacgggcccctcgttgccctcctaccccctgtccctgcatacacctcatgctggaaggacctgtgttgcccaggcacacaataggtgtctcgcccttgggtcaagccgatgccttgtatacgttctgcctggaaagccccttcttttcagacagcaaacctgtactcaactttgatgactgagccttccatgaggcccgccaagactgacctgatagaattttccattcccttctctgtttccctccaggccttcttgcccccatctcttctattttgcattacactgctgacctgcacttcctgtgtctcggtgaggttcttcagggcaggaactgtgtctagttcagtttcacccttagcaacaagtggtaatgaaatatttctgccaaggatccaattcagattatgtaagcatttacctttgtttaaggcaaaatcctgattctggaagaggaaagttctttgcttctcacagggcaggcatagaacaggccagaagctgtccatgtgtggcttgggagagacctggctatctgtacttgagccctgagaccccgaaggcccccggctgcatctgctcttggagcttggggtggcctgggtggtggtcgagtaggatctgcagcgtgggatcatcggcagagtcaatgccattcccttgcagatccactctcccgtaagaaactgttctgggctctgagaggaacgaggggaagaggggagatgggtgagcttccttgctgcatttagcaactcagtccctgggggaggtgtagacactgacacactccctgtggccccagggagaacaaacccagagcccagtgagggtgcagtatgagcaaagtgctggggcggggggagggcagaagagggagcagttgattttggcttaagagtaaactg

SEQ ID NO: 1880683 - DNA, 4001 bp, Homo sapiens
tagacagatacctaaggagccccagttgttcctatccccagcttcttgagtcttcccggcccaggtgccagagctttcaagatgaccccagcctcatccaccacgtgactacagcctcatgagagacctcaacccagctcagccaacctgcttcctaatttccgatgccttgaaaccataaaagacaacaactgcttgttctcgtttcaagcctttacaatttagggtgatttgctatgcaacattaaataacaagaccacagcctgagtaaatgaagctgctgaagggagcccaagagaaactcggaattacctccaaatttctctgaagaaaggattcgaggtaaggaaaagatctgcagctgcttgtaaggcagatcatctgtcttcaccatgctgaaagagcaaggtggactcctgcttgaagagcactgtaacttactcatgcagtaatgtggaatcaggaaaggaaagtgatagtaacaatttgcttacaattgccagggcaagggcagagacttggagaacacagtgggaaatgaatggtaaatatgtcattctctactggaggcaggagtgggaagtaattagctggggaggagtgggagctggctaaggtcagaaacagtgaccttacagcattattatctttcaaattcaaatacacttctatacctcgctttgggttgctgggacagaaactgcaaacgacatttctatttttccagccagatacctttcaggctctttagggggtggtagagggagcctgcaaggctggaggaagaagagagaatttgctgcctcctgtctacttcttattcctgtgatgtcacctgagcaaagcttcttcaaatgggcagaggcacggccttctcacagcagcagctgaatctgcttttcaattttgtcccatttataaaacacgctcctttgtacccactcagagacattaaccccagccagccagtaccaactcctcagaaaatttgagtctccaagactcctactctacgtttccaagtttaataattccaatctcttccctcttttccctcagttgaaagggtggtagctgatgactgcagttgccacttacctctgtgatactttagagatcttttttcccttctcagttacctagctaatggctttttacctagttgcaattcttcatattaaaattttccttttcctttacctggtgtggcttctgtctgctgaatggatcctgactaataaaaggtatttcttccaaagaaaaatctatgatggtaactgaggttgggggtaactgaaggttcaaatagcagggagatcaagttcaaataccaaatgcaaagaccacagacagaatttgaaagagtgaccacaaagttaggaggttgaaggtgggcagagacataagcaaaataagagtaggactggaacaagatagaaggcttagggtgattgctatggaggtggaaattatcaacccatccacctacccgctaccctcccccagtcagtaggatgggtaaagctgatttaaaaacctcaggcaaggccaggcgcggtggctcacgcctgtaatcccagcactttgggaggccaaggtgggcagatcgtgaggtcaggaggttgagaccatcctggctaacatggtaaaactctgtctctactaaaaatacaaaaaattagccaggcatggtggcatgcgcctgtagtcccagctactcgggaggctgaggcaggagaatcacttgaacctgggaggtggaggttgcagtgagccgagatcgtgccaccgcactcaagcctgggcgacaaagcgagattctgcctcaaaaaaaaaaaaaaaaaaaaatctcaggcaaaagtggacattacttgtctagatttggggttgatgagggttttttattggaggtgggagtcgttttgtttttttgagacaaggtctccctttgtcaccaggttggagtgcagtggtacgatctccgctcactccagcctcaccctcctgggcttaggtgatccttccacctcagcctcccgggtaactgggatgacagtcacatgccaccatgcttggctaatttttaaaatgtttcgtacagatggggtcttgctatgttgccgagacttgccttgaacttgtgagctgaagcgatcaagttctaagagcagcttataatatgatttttaacgcatgttgtctatgatcatagagggagatagacatggaaagaaagagggccttttctgccttgtgcctttttccatgtctattctaaggaccaggattgccttgagaccaacactgtgagagccctgactcagtatccatagatattctatctgcacattgcagagcactaagccagtccgccttctcagcttcagactagtcagtttcatggactttcagcatctctgtgtagatgtttccaggcacctcaaacccaccatgctcaaggatggatctaatctcttttttcattcagatttcccccccgccgccaccatggaaagcaggtaggaaacactggatttcttcaatgtagccccccaaaacagaaacctggttgccttttcttttttctttttttttgagatggagtctcactctgtcgctcaggctggagtgcagtggtgtgatctcggctcactgcaacctctgcctcctaggttcaagcgattctcctgcctcagcctcctgagtagctgggattgcaggcgcccaccaccacacccggctaatttttgtatttttagtagagacagggtttcaccatgttggccaggctggtcttgaactcctgacctcaagtgatccgcccgcctcggcctcccaaagtgctgggattacaggcatgagccaccacgcccggccctggtgacctcttagcatcttccctttttgcttcttctggcttcaaactatttgaaatactctgtgtgacacatcagtgaacaaaatgaagtcttgttgcctagttgggaaaaatggaaaatcagcaaaaggtaaatctgggaaagactttttatttaaattatttctctttgaagggactcatgaaaaattgagaaaatagggagcggtactggtcatgaggaatgtggggagggaatcctgaaatctccagctctgatttgcagagaaggtttgagaataaagagctccaagagctgtttgactcatgttggccgatcctgaaatccagaagtcccctggcaggaaaccctctggagacgacagactaaaccatcctgccattgtcagcctcacaaggggctcagcaactcagcaaaaggaagttgtttttttgtattgcactttttttttgtcttaaagagatatccttcttaatagttacattaatatcttgaataaagatggagagtgtatgtcaacttggaagagacagcaaccatactggaagtcagaatcagaatctcaaaacatcttaacataaggctaaagaaagggaccaacaacagaagagaaattaataggagcaaaggtaaaattttgtactgaggttcaaaaagccacttgtagaagtgcagaatggggagatgtggctgaacaggaccccaaacttttcaagcttgttcttgatgttctctcagtcagggtatgctaactgctataatgacagtgcccaagtcccagtgatttcaagatatcctgtggagaaaaaagtatggaaggggccaggcacagtgacttattcctgaaatctcgggactttgggaggccaagatggacagatcgcttgagcccaggagttcaagactagcctggggaacatagcgagaacttgcctgtactaaaaataaaaataaaaataaatcagccggtcatggtggcgtgtacctgtaggcctagctgctcgggaggctgaggtgggaggatcaccagaacgcaggaggtcaaggctgcagtgcgctattgtcgtgacactgcactccagcctgggtgtcaaagtgagattctgtctcaaaaaaagtgt

SEQ ID NO: 1880684 - DNA, 4001 bp, Homo sapiens
tggatgggagatactgtacaatcatctctggagaataaaatctgtcaaaatgaaagtgcttctgagaaacatgtgcccttttgctttctttcttggaatgtacctatataataactgaagatctactattcccaaaatcattgagagggcttaaaggaatattttctgatactcaagattttcagggaaatgtaaatcagccatactgttttcaaaatgttgctatacaaatataaagatatattgtacactcaggaaattgttgctgaaacaattataactttatagatattttcaaaaaatctaagtgtgtttatgtgaaaataattgcataggcaagtcaaacacgatactaaggaaactgatgttatgttgcttcaatttcaatgcaaagtaaaagcctaatagagtaaacaggtatccataccatatcatcaaatggaataaaagagttagtataactcttttattttattcatcaaatgaataaaagagtgagtatccatgttggtttaatggacctgactgttttggatgtatcttggtgcagaagacaatacctgcaatgtcctgagaaatttaagtctctctcgttctctgtctctgtctctttctctctcaggcatgcacacacatacacacaatctgttatgtccagtttaacagaaaaaaataattctaaataacaggaataccacatgtagctgacaaagtggaaattcagtatattaaagattaccctgggtatttttctctctcttccatagaaatacagggctatttttattaatgcatggtaatatactagactgtggttgtataagtccacatactcaaggctattccaagataccaattatagcagcactgggttagcttggaaggctggaatgaacagattgtctggtctggggaagactgattttacctgtataagacaaaaactaagtcaaaatggagagcaacacagtatcatacaaaataatcatttcaagaacataacatgtaagaatggactagactcctaaacaatttttaaaacatcacaaaatataaactaatgtttgaagagataacaataatttagacactaattttggtatttcaaatgtagaaaaaaatcagtcttttatccatccagcactcattcttttgcaaattccacctcaccactgtttggagaaatcaccaaccctactcactcccagaatatagtttaaatttaaggttccatcttatagccttacctctactgccacagaattgatctgctgtggagctttaatacaattgattttactcaggtattttataaaataattctcagaaactgataattgcaataaacagttaccaagtactatattatgtaccaagtacttttgcctatgttagcttatctaattttttcagtagccctaagaagagatattattagtcacactttacagatgagaaaatggaggcacagagaacttacatacctgattggggttacacaggcagtaagtacagtatttaaaccaagattaaaactcaggcagtctaacagcagagcatgtgtcctcagctattatgtcattttatctttagggcatcaaatttggaaagagtaaacatggctacaggaaaactccagggaaaatgttaataatgattacttttaatttgtctaaaggggttaagcttattacaaagtttcaaaaacaatgcttattgtgattaaatccttcttataattacagatatactcataaactgtaaagttcaaagtttcaaatacttaaagaatataaattacactctttttgaagctattatgatatacatacctgtcttagtccattttgtgctgctatataggaatacttgaaactgggtaattcataaagaaaaaaggtttaatgggttaatgactctgacaactagaaagttcaatattgggcattgggtgagaaatgcccagtcataaaccttctagttttcagagtcgcaaaccaattaaacattgagcttcttccactcatggcagaaggcaaacggaagctagagtgtgcagagacatggcaagggaggaagccagagagagaggatgtaccaggctctttttaacaaccagctctcagggagctaatagaatgagaactaatttacccctgaggaaaggcactcatctatgcatgaggaatatgccccccatgacccaaacacccaccatcaggctccacttgcaaccttgagatcaaatttcaacatgaggtttggaggggacaaacaccgaagccctagcaataccacatgagcttttttattgggaacttatccatgaaaaagcacctattcattttactggaattaaggtagaaattagtttctcagctgattagaaaaactgtgtctcactgctataaaagtagcatagaactcttcactgttcattaatggcggatctgtgtctgattccagccctcactaggctctaagatttggagaacagacatactcacttgtcctcaaggttagccagaatagaaacaaactctggtttctaaaggtgtcgctttgagagtggccagaagcctacacttgttttgtcaataaatcaaaagctttggtctcctgggctgtttgccctatccctttcttgctactttattcttcctaaacaataaatcaataggccaatcctagccaatcctaaaatgtttcagcaggacaaagaccagcgcattttttggagctaaactttgtgtttcttgcacgctctctggatacaaataatacagctctcactttaatgtgtggggttaagagagaatactttgtaagtatatatgacacatcagagtctataaactaaagttgcttctttccttgaaattgatcctaaaactcaagttgtgaagtcatagtgtaaaatagtctctaggtcgtgaataacccaactttggtgcctcctgtgatctttttattctggaacgctgcttatattatgtgtctcacctcccacttccaccagggtcaaactttttattctcaggtgagctccaaaatccagactcagtaaagcaatgagaggattgatttatttcccctgtgattactctctaaagggaggaagccaggaactgctcttcattgttatacttgaaaggaattaaaagtgattctcttagaatagctctaagagacattttccaggctagcttttttttttttttttttttttttttttttttttttttttgacagagtcttgctctgtcgccaaggctggagtgaagtggcatgatctccgctcactacaacctccacctccggggttcaagcaattctccttcctcagcctcccgagtagctgggactagcttcctttctaaatgtccaattcctttctgattgtaacatgtagaattaaatactcaaaccaccataggacataccactatacttctagagttgtagcatccaaacatcagcttctttcatcagtatcttagctttcaatttactaacataactacagttctgtgctaacatttatttttcctgcgctctttatatcactctctcaagcatcattgtaaaatttctaccttctgttgacactcctttactagttccaactttcagttcattttgtaattatttgcatggagtagttgatttcttattgtttatattttttgttttctgtatattgtgatgttttgacatctcaaaagtttttccagctagggaaatacaacttctcccaaggacagctaagagatagtgaagaataaagccagagcatgcttttgttatacaaactaaccaatccagagccattcccttctctgcctggccctactctctaagcagcactgtttctcaccttaatcatcccagtaccaggtagcaggcaaataggcaccattgtaacatcttcagccctgctgaaattattcaaaccagccaattctaaactatttactctgccctgccttgccttttctgtg

SEQ ID NO: 1880685 - DNA, 4001 bp, Homo sapiens
agaagagcagcctcctctttcgtgggcatcttgccccctaactctgattttgcagttctagcacaaaaaaaatcatagttacccatccttctgccagagaaaagggctcatgaactgaactggacagtttccccctccctctgattggcccaaggattggcatgagactgaacagggaaactaggattttccccaacaggaaaaaaaaaaaaaaaaaaaagcattttatgctctgatcacatgaaccaataaacacccagccctcctttcttcttaagctggtcccagtgataattctaccacgtacaaccagtggatttgtgactaataaaggaaatacgtggaattctcaccagttgtcttctggtttgtatcagactcctaccctgtggctaggtcctagaggacaccctctggctcatagctagaggacaccctcatagctcaagggtgatgaaacaggaaagttgcagagtggagggggcaggttcctgctagtggtgacagtgacattgtctaaggcgtcgtggcattaggcactgcgctaatgtgccacccagcaaagctggtgttctgctcaggggcactctgtgaacagagctgatgagaacagactctctctatgagcccctccaactaaaagctgcccctaccactcccagccacctgctttccagcagagctggcaggagaagctacaacccaccacccttacacacctccggcaagcaatgaaaagggagtccaaggtatctgtccgtcgagaacatgagaaacctgcattttaatcccactttttaccaaagatgggaacttggttaagtaacaaaatcatttggacctctctttactcatctttacaatggggatagtgaaagaacctggctcctcagactgttttaagaattaagtgtgataatgtatcaaaagcattcagcaccataccaggcacggttgggattgtcatcattattactgtggccagtagtattaggaagtgctctgaaaattgtactctgtgaaataagtcaggatctgacattgtaaaatcaaaaagggcattctccctgggaaatagctagcagctcctagtggcaaattccagacttgggtctattttttgcctttatatactttctcatttatgttttgatttatgaaaacgcatccatcattttctaaggaaagcctccaggcacatgaacaaaaatgataaaaatgcacaacagaaacaaataaaaccattcggcatggctaacaagtcaggcatttggccccagaggggtagataaatctagagctgggctcagcactgggacccaaaggtcaacaggctgggactttgctgaagaaataaaagaaaggggattctggagcttcagctaacagcctacctcagatcttctgagagcctaggagtgaatcttccagaggcagcccccgaaagggtctccaagaggccagtccagaaacctgtgcagagctgccctctctgctccttcactagtcagtgggagaaccagcagacttctccagccacgccaggcaccccgtttacccccgtgagggagaggccatcttggggaaagacactcagttaagagaactggggctccctaggaaacctgtcagtcatccttctgtctttatccccttactccagaggcattgctatgaggggaccccctacccaaagaatttgcttcaaaactcagcatttctagcttccaatacagatacctcatttttgctcgaggctgggaacatgtgagaggaaaagtgagcaggaatcccagcagaatcagggagggatccatagggggtgagatgggttagggccctcactagcagagcacaggtgtctttgtagaaccatgctagcccacaatggttaacagggtccatgatggttaacaaggcatcttgcagagtctttccaaggtgacattctaggggatgacactctagaggtgtcgcattggaacggctctgcaagatgcctttctgcccagagtctgaggggattctcagttatagactgttctggccataatccaccaaacaagggggtaattcataggctgcaaacaggccaaaaaggtggcccagtgtgaacattagggccccacatgcccagtagggctgcccaaaactagataacacctggcagagccaatcagatcttctattgggacatctgactgagacatggggagctgtcgtcaaagagtaatggtacatgtgacagaacagaaaagagtagccagcactccaactccccaacacgagagtggacaaaaatggacttacatttgtggggcaaagcccctgttaataacaagtattcataataacagtgtccatggagccacagttgacaacaatactcattgagcataactttttgcctggcactgttaggtccttgtgcacaggatctcaccgaaacttgacaaggaaccccacatggtcagtgctattattgtcaccactgtatagatggtaggaaactgaggctagagaggtgacacagtggtaaagggcagagttgcaatgtgaacccagcagtttgattatggaacatggggttttatttactagattacacaaactcctgtcaaatcctatatggccatggacgatactccagttctcggtgaagcccagctgtgactgctgagaagatttactgttcttccccacctcccagggtgtccttccaataatcctccatcacctaaagcaatgggattacgccatagtccccttaaactgcaagcatctaactaatacagggacacaagtgttccagagaagtggctagtaacagcaaagaatgacagaccctccaaatgaggtttggtggctcccttttacccttctgaatcttaaaggaagaaacacaagctgagacattctggacaggtggctggtgctggtgaagttgacctcttcatttccatcttcaggtcattacaagggccttccctgaagccaactaaatccttggacagagaggacctgaggctggtattgccctgtgctgcacagtagacagctcttctcctgaggaagggctgctggcaaggaggggccagtgacccagacccagttagtcagaccctccctagtacagtctgctgatgtcattgaagaaggccatgtcctctcatctcagctgctggcctatgagcctggggctgcctgcctcatggaaagtgataggggagagggagatagaacaatctgggccaggcgcggtgactcacgcctgtaatcccagcactttgagaagctgaggcagatggatcacttgaggtcatgagttcgagaccagcctgaccaacatggtgaaaccccgtctctactacaaataccaaaatttgccgggcatggtggcgcatgcctgtaatccagctactagggaggctgaggcaggagaatcacttgaacctgggagtcagaagttgcaatgagctgagatcgtgccactacactccagcctgggccacagaatgagactccatctcaaaaagaaaagaaaagaagaggaaaggagaagagaggagaggagagaagagagaagagaggaaaggaaaggaaaggaaaggaaaggaaaggaaaggaaaggaaaggaaaggaaaggaaaggaaaggaaaggaaaggaaaggaaaggaaaggaaaggaaaggaaaggaaaggaaaggaaaggaaaggaaaggaaaggaaaggaaaggaaaggaaaggaaacgaaacgaaaggaaaggaaaggggagagctgtggtggccctcgtgcaggacaggagatgaggcagttgtgtggccaacctgtaaaaggaaaacacttcccacctactgcaaggtgactcaaggtggaggtgccaaaattaggggaaaaggcttccagccaagcacagaggaagggtatgaaagaactttctaatagcctcaaagcaagatcacatgaagattctgcaagactgcacgacatttttctttttt

SEQ ID NO: 1880686 - DNA, 4001 bp, Homo sapiens
aaataaaatcaaaaccatgagtggtggtgcttggagccataagagctggtaatgactatacaggggtaggccttcttgaggaagtgacatttacctatgacctagatgagtttactagggaaagttcattaggtaaagatgagagggggaaaaataccaggcagaggaagcactatgtcctctgtggcagaaaggatcatggcaggcatattagtcaggacccagccaggaaagcaaaacccactctaggtgatttgatagagggaatttcatacggggagtcagaggagttgaaagagctcccaggggaaccctgagagtagcaactccaggaagctgggactactgtatttgtttgctagggctgcagtaacaaagtgccacagactgggtggcttcacacagaaagttattgtctcagagttctgaaggctggaagtccaaaatcaaggtgtcagaaggggtagttccttttgaggcctatgagggaaggatctgttccacgcctctttccttgacttgtagatgaccattttcacctatgtctcttcacatcgtcttccctctgtgtgtgtctatctctgtccaaacttcccctttttataaggacaacattcatattggattagggtccaccctaatgacctcactttaattcggctactctataaagaccacaaccctaaataaggtcacactctaaagtactgggggttagaacttcaacacatgaacttgcaggggagacacaattcaacccatagcaccaccctggaagctggagaacaaggaaagaaacagtttctggagcctaagacaagataagctggaacaaagagggcctgccaagatgggtagcagggatcacacagagatggctgtgtagtgggaactgcagccacagaagagactcctgagaaagagaagcaggagaagtactctggcttctccttccttcacctccaatatcttttgccctccctcactccccattggctgaactttactggaaggcagttggctctggagcctggaacagcccccagtgacacagagcagatcgggggaccacgggatgggaagggtggacatggctctgacagcaacaatgtaacacccatgcaacgagtctgcgaggccgaatggaagccagctggctgcaggggagagagcaagagagtctggcagaaggtgcacctggagaaggaagtagaggccaggccaggtaggagtttggtctgcatgctaagagccatagaaatatccaaaggtttttaatagagctgggggagaggcggtgatgtgatcagagatgtgttttgaaaagacctatctggctatgaagtggagagtgggttgaggatagtggggcagatcagttagaaggctacgcctaagagaaagcctgttttacaaaaagagggagctcctgctgcccctctctttccctggagttttcataccctccacgtgtactagacatgtgtatctgccagtcaaagccacccctcccctggtgcagaggcccgctccaagctctcattgcccagtgtcctttttctagatcctctcctggttcacttcctttctctctgggcagtccttcccatgctgcaacactgattcttcttttgtcacccacctgctgcaaggggggcccttgtcacccatctcacccatcactctggcttaatggtgctgactgagtccacggctttggtggccacccatatgttgctgctgcttctcagatctgtatttccagacatgatttctctcgtgagaaaaatcagcctgccagatatctccactggaatgtccaaaggaattggaatcatgagctcagcatgtctaaaactgaacacattatcttcccctcgcacgtggacccctgtaacctgcccttcatcctgtgttccctatcctccttatgtcccacccccactcctgtttgaatatttcaccagaaacaggagtggggggtgggacgtaaggaggatgggggaaagaacatcatcctaaactattccctcttactcccccacatcccattgctgtccaagtcctgttggctctgtcctagatatctgtcaaaatccacttttcctgctacttccctagcccaggtcctcatttttatgtgggttcatgcagtggtctcctagctggcttcctgcctcaagccttgccctggccggtccacttttcctacaatcaaagtgacatctaccagtgtaaatagatcatgtcctttctctgcttaaaatcccttcagtgatttcttatcgtcctcaagtcaagtctgattactatctctgcacagtgcccagcccacaataaatgattggtgattaaatgaataaatgacaaaccaatatagaaaaattgctaagtgtggaaatgaagaaaagatgccattttttttcccctggaagtctttccgactgtccaagactcaatctggatctatccttgggtgtgtttgtattgtacttctcacactatactaaacccatctacttacctgtctgtttcctactggaatgttccttggttgctactatatctcttagcacagctcctggaagaaagtaaatgctcaaaaaatatttgatgaatgaatgaatgataaggagagctctgggctggggctgactatgaaatgcttattaggagcagagtgtgtctgtcctggttccaaagcactgggggaaccaggatgggtagagaggctgaaggcaagccctttaggggaaggatagcagtgacgaaggctgaaagatcaacagcaatacatttttctcaggagacttctttggggcagtgttttctaagctgggttccagggaccactggtcttgcgagatgctctatctagggttctatatcaaatcagcatgtagaaacatgcagcccataccccttgtgtacatcagcatctcaaagagtctgagaagtcctgcagttgaaaaaccaacactttaacccttttaactcagtatttcctgaacttattccataagtttgaatatacaaaaataaagttttttgcttaatactcagcaacacccccttccacaagatatactggaataaatagtgtttggtggtcatgagtattttaggaaaagggcaggagaagcttgaatttcccccagtgtgccttgggtgagcactgtggttatagccacttgatgagaacagtcagaggaaggctgctctgggccatcaagtgcagactgtataggacaggagaagggtgggaacagagacacccctgaaggggttgtagattcagggggaaaggtgatggatggcctggacaaagattgtggtggaaacaaaatcaatgggcacacgattttcccttcttggaagaacctctgaaaggagaagccctattcaccccgactgcctggcttaggccacacccctagaaatgcagctacaaccagggcaaaccatcaacagcatcttctcagcacccatgcgatcccaagtaggcatccgaggacatgcaaaagagaagcatgtgtccttttgtggtcaaagtctgttttctctcttggagcaggtatgcttctgatggtgctgcaagcagcagggggtaaggctgcaagctgggctaaaaacagccccaccccctctagccacaatcagctgtgggataaaagcccctaaagaccaagactgtactcatgtctgactcatctctgcttccagctctcagctaaacctgcccagaggagagcatggcagacaggagggcgcttgctcagaagcctctaggttagaggtaaacaggactaaggttaataaagaaattcataatgagggtatagcaactgtacccccaccccatcaccagatgatgacctggtctgagagaggaaacatgcaggtgggtcacataactcaatgtaaagcaggtagcgcaccatgcctgcatttaagggctcagcaggtgttacttattactattatttactcctatgcaagta

SEQ ID NO: 1880687 - DNA, 4001 bp, Homo sapiens
tgtgacccacctgcatgtttcctctctcagaccaggtcatcatctggtgatggggtgggggtacagttgctataccctcattatgaatttctttattaaccttagtcctgtttacctctaacctagaggcttctgagcaagcgccctcctgtctgccatgctctcctctgggcaggtttagctgagagctggaagcagagatgagtcagacatgagtacagtcttggtctttaggggcttttatcccacagctgattgtggctagagggggtggggctgtttttagcccagcttgcagccttaccccctgctgcttgcagcaccatcagaagcatacctgctccaagagagaaaacagactttgaccacaaaaggacacatgcttctcttttgcatgtcctcggatgcctacttgggatcgcatgggtgctgagaagatgctgttgatggtttgccctggttgtagctgcatttctaggggtgtggcctaagccaggcagtcggggtgaatagggcttctcctttcagaggttcttccaagaagggaaaatcgtgtgcccattgattttgtttccaccacaatctttgtccaggccatccatcacctttccccctgaatctacaaccccttcaggggtgtctctgttcccacccttctcctgtcctatacagtctgcacttgatggcccagagcagccttcctctgactgttctcatcaagtggctataaccacagtgctcacccaaggcacactgggggaaattcaagcttctcctgcccttttcctaaaatactcatgaccaccaaacactatttattccagtatatcttgtggaagggggtgttgctgagtattaagcaaaaaactttatttttgtatattcaaacttatggaataagttcaggaaatactgagttaaaagggttaaagtgttggtttttcaactgcaggacttctcagactctttgagatgctgatgtacacaaggggtatgggctgcatgtttctacatgctgatttgatatagaaccctagatagagcatctcgcaagaccagtggtccctggaacccagcttagaaaacactgccccaaagaagtctcctgagaaaaatgtattgctgttgatctttcagccttcgtcactgctatccttcccctaaagggcttgccttcagcctctctacccatcctggttcccccagtgctttggaaccaggacagacacactctgctcctaataagcatttcatagtcagccccagcccagagctctccttatcattcattcattcatcaaatattttttgagcatttactttcttccaggagctgtgctaagagatatagtagcaaccaaggaacattccagtaggaaacagacaggtaagtagatgggtttagtatagtgtgagaagtacaatacaaacacacccaaggatagatccagattgagtcttggacagtcggaaagacttccaggggaaaaaaaatggcatcttttcttcatttccacacttagcaatttttctatattggtttgtcatttattcatttaatcaccaatcatttattgtgggctgggcactgtgcagagatagtaatcagacttgacttgaggacgataagaaatcactgaagggattttaagcagagaaaggacatgatctatttacactggtagatgtcactttgattgtaggaaaagtggaccggccagggcaaggcttgaggcaggaagccagctaggagaccactgcatgaacccacataaaaatgaggacctgggctagggaagtagcaggaaaagtggattttgacagatatctaggacagagccaacaggacttggacagcaatgggatgtgggggagtaagagggaatagtttaggatgatgttctttcccccatcctccttacgtcccaccccccactcctgtttctggtgaaatattcaaacaggagtgggggtgggacataaggaggatagggaacacaggatgaagggcaggttacaggggtccacgtgcgaggggaagataatgtgttcagttttagacatgctgagctcatgattccaattcctttggacattccagtggagatatctggcaggctgatttttctcacgagagaaatcatgtctggaaatacagatctgagaagcagcagcaacatatgggtggccaccaaagccgtggactcagtcagcaccattaagccagagtgatgggtgagatgggtgacaagggccccccttgcagcaggtgggtgacaaaagaagaatcagtgttgcagcatgggaaggactgcccagagagaaaggaagtgaaccaggagaggatctagaaaaaggacactgggcaatgagagcttggagcgggcctctgcaccaggggaggggtggctttgactggcagatacacatgtctagtacacgtggagggtatgaaaactccagggaaagagaggggcagcaggagctccctctttttgtaaaacaggctttctcttaggcgtagccttctaactgatctgccccactatcctcaacccactctccacttcatagccagataggtcttttcaaaacacatctctgatcacatcaccgcctctcccccagctctattaaaaacctttggatatttctatggctcttagcatgcagaccaaactcctacctggcctggcctctacttccttctccaggtgcaccttctgccagactctcttgctctctcccctgcagccagctggcttccattcggcctcgcagactcgttgcatgggtgttacattgttgctgtcagagccatgtccacccttcccatcccgtggtcccccgatctgctctgtgtcactgggggctgttccaggctccagagccaactgccttccagtaaagttcagccaatggggagtgagggagggcaaaagatattggaggtgaaggaaggagaagccagagtacttctcctgcttctctttctcaggagtctcttctgtggctgcagttcccactacacagccatctctgtgtgatccctgctacccatcttggcaggccctctttgttccagcttatcttgtcttaggctccagaaactgtttctttccttgttctccagcttccagggtggtgctatgggttgaattgtgtctcccctgcaagttcatgtgttgaagttctaacccccagtactttagagtgtgaccttatttagggttgtggtctttatagagtagccgaattaaagtgaggtcattagggtggaccctaatccaatatgaatgttgtccttataaaaaggggaagtttggacagagatagacacacacagagggaagacgatgtgaagagacataggtgaaaatggtcatctacaagtcaaggaaagaggcgtggaacagatccttccctcataggcctcaaaaggaactaccccttctgacaccttgattttggacttccagccttcagaactctgagacaataactttctgtgtgaagccacccagtctgtggcactttgttactgcagccctagcaaacaaatacagtagtcccagcttcctggagttgctactctcagggttcccctgggagctctttcaactcctctgactccccgtatgaaattccctctatcaaatcacctagagtgggttttgctttcctggctgggtcctgactaatatgcctgccatgatcctttctgccacagaggacatagtgcttcctctgcctggtatttttccccctctcatctttacctaatgaactttccctagtaaactcatctaggtcataggtaaatgtcacttcctcaagaaggcctacccctgtatagtcattaccagctcttatggctccaagcaccaccactcatggttttgattttatttctgtgtgtgattattagttaatgttttcttcccagtccatcaggaaaggtagtcttttttttcttaccactttccccagagcctaggatg

SEQ ID NO: 1880688 - DNA, 4001 bp, Homo sapiens
ccgcctcccgggttcaagcgattcccctgcctcagtctcccgaatagctgggattataggcatgtgccaccacacccggctaattttgtattttcagtagagacggggtttctccatgttggtcaggctggttttgaactcccgacctcaggtgatctgcccaccccggtctcccaaagtgctgggattacaggtgtgagccaccatgcccggcctttaaacttttaatttcattgtgaagaacttcatgcaaaccttagggagaaaaaagccataatgaatgagccagtaaccatcacccaggtgtgttaaatcttaatctcttaacaagtcaacttcggattttttttaaggatataaagatatgtttgtaaacccatgggcccctcctagatccttcatccctctcaagttctccaaaggtcacttttagtctgacttggtgtttatcattcccatgcatgttgttatacttttgctacatattgcacaaatcacagacaatacatagtatagttttgcatgagactatataaatggtctagcaaacggatctgtcacttaacagctgtttgacctaaggcaagttacttagtatctgtgtgcctcagtttcctctctgaaaaatgagggatactactacttactgccttacaggttgttgtgtggattgagttagtacactgtatataaagcatttagaaaactatcttgctcataggaagcaatatatatgagcaacatatatactgctcatgtgttagcaattatcatataaagctgcaaaagaacttgtgactatatctgatatatgcacaaactgagaaaatgattagcaaaatgagatatgtaaaatccatacaatgccagattttcaaaatagtgtaaaaactaaaaatacttataaagttccggctagaaaggttcactattctacttaaaaaggaattgaaagtgctaagaatagagggaaaaacctttattttttaatctacaaagtgtaggtaacattaaattagaatataaacattttatttaaataatttatgatgattaaaaaatatctaaatacttagcggcctccttttatgagatttgggggaagggttgggagagaaggggcaatcccttaatgagaagctattcaaagactttgcctgctgaggaaagcactttagatttcacacaaaataaaacattatttggtactcaaatgtcactacatttctgaactagtttttcactaaatgtaagcagaacaaatgaaaatgtaaaatgatgttttatgatatgattcacccacactatacaattttcataacgaaaactggattcggcaagatgtatcaaggctattaaggacatattatccttgttgtgatacgggattattttttaacagtctctaggtcaaaagatcagcaaacattaaaacttaaatgccctacatattatgtgaattgtagtggatttttttccagaggtttttgaagatttaaaaatatatgtgtactttgaagatcaactgatatatctaatttaatccacggaggaacaactagagctaatgaatatctgctaggtgccatttactgggctagatgttttacacaagatctgtcttttaatccatgtgaaatatctttatgaacaaaatttaggagactaccacagatactttgtttaaacaaatatacctctgcgaagtgttaaaaatgactactaaaaaagccaacatttaaactggtaaagcatataaaatgtacgtgactgtgttaattatattaacataataatgttgaaacatttgttgtccctagagtttagcatatattttaatgtctaagaggttaactgaaagcaacaattaagtgtagcatcaaagataaactctgtgtctcccctccaccaaataaaatcctcggaataggaggtggaaggaagacttacactgtaggaaaagttgaaaaccaaagttctactttacttctcctaaagtgagaactttgaaacggaaccattacttttgtttcatccccccgcccagtaaaaaatttacatgtatgagtcagttcttccctcggccccaacagaaaagattcagtataaccaagctataacttgcacaaagcaacaaggaaaaaaaaaccttgctatccccattactttcctaatagagcaaggaccctaccacccctcactccatactctgcctctgccccaagcaagacgcagcacctgccaaaccaggcacttaaggaatatggtccaacttttcaaacgcaaactggagaggagacgcagataatttcttgaagagtgcaagaagacagcagaaaaggtactctgaggaagggatgcgtgagctttggggctgtcccctctgcctgttggaggattccaaattcgcttgcttcagagacccttggaagcagcacactcaggtcgcggccagcctcgggcctcggtgaaggaggcagtgtttacacctgtcacgagggagggggaaggagagcgaagaagcccaagcaaagccccaaacttctgaacagctccctggagaacgcagccagcgcggagctttgggaggtggaagcaaaggggcagggagagccggcggtggccggggagggaaggactcccacttacccggccggtgcccgggatggcgaggagggggccgtgcgcttcgggcgccaccagcggcgttcccgcactcgccgcagaagagagcagagccgggagcccgcaggcccgcagagccagctccgtcctcacagctcccggctccgcggcgggcagatgctcccggcccgggtgagggtctggctgctgggccgggcctggtccccgcaccctctttccccggcgcagctaggggagcggagcggcggcgcttacctggctccttcggggcggctgcgatgggcatggctcaggggcccggggaggaactgactccccggggaaggaccgtctattccgacgcggaactggtgagagcggaaggccggctgctcacagccctgtcagcgcagcagcaccatggacgcccacccggagtttcaccgctgccgcgggacccccatcccactaccctccgccctcttccgccgccgccgccgcctcctccacctcctccgcggagaccccccgcccactccacacactctcccatcatgcagcgggggaaccgctgccgccgacacgtcacttccgggcgcaggtggctaggtcgggaccgggcgctggtgggtgctgtggggtgggggaggacactccaggggaattggtgtcacagaacgcttatccctgcgcaggcgctgtcgtgcagagcgccgaccgccattttgggtgcgggcaagctgccctttccttttacttccttgcgagtcatagagctgtagggggatagacgtcttcccgcactcaggcgccggttgaggctgcgctcctggcgaaggacaggtgctcctttcagccggttaacgttcagctcaagaccggattaagtctcttgctctccaaataaaattgtaaaggtttggaaatatagaaccacatttttaccaaaaacctactagagagcattcgtcagcttgcccttttcgccccgaaaaacgactttttcattcacagcctgtctcttcctctttttaaatttatgccgacagaggaagaagctgatatttaacaaataacaagaggttgcgataaatagaatttaaggtgggaaagcagccgccaaactgacaaatcgtcttcgagaccgacaagaaaatagtagtccggaatttggctaatggatggagaaggtggtcgtttttcatagacccttacggagaatatctagtgaagctaaagagatcaccataaacttatgcattcaaacgcatttctggaacagaggtcgtaaccgattttgtttccatcatcagtcctgaacagttgattatttatataatcaactgttatttatataaaggtaataaaaatattac

SEQ ID NO: 1880689 - DNA, 4001 bp, Homo sapiens
ttctggagaggagtcatttgctaatatctgtatctgctgcctctctcttttggcagagcctctgtctgtgtatgcatgacagagtttttcctctcttaccagtaaattagcagaatatagtttcctttgctgttgtcattcctctaaatgggtgagtattttatgtctgagggaccttccccgcctgggagacaactgattctccaaagcacactagtggccagcagctctgagtgtgccacaaatgcacgtgcctgttccatttgtacaaggaggatttgcaatcactgcatctgctggcctgcccaggacagagccctgtggaacctgggtgctcaccctcaccctgctcacagggatcccccggatgccctggtggctcaggcaagagccctctagtccagaatcctgtcattcatcctggtgaggaatgaagctctggggcagtcggggcctataaaggcagtggctcctcctcccaccatgttcttagtgacctacaatgagaggaaaatccataaatgcccctaacccagttattttaagtatacaatgcagtggcattaagtacattcacaatgttgtacaaccagcaccactatttccaaaacgtttttcatcacctcaaactgaaactccgtacctgttaaccaataactccccattctcccctctccccagcccctggcaacctcgattctagtttctgtctcaatcagtttgactaatctaggtaccttatatacgtgtttttatacaatattcgtccttttgtacctggcttatttcacttagcatgttttcaaggttcatccacgttgtagcatatataagaacttgattcctttttatggctgaatagtattccattgtgtgtacataccacattttgtttatctgccaacagaaacttgggttgtttacactttttttaagctattgtgaataatgctgcaataaatattggtatactagtctctattggagtccttgctttcaattctttggggtacaaacataaaaatggaattgctgggtcatatgctaattctctattcaactttttaaggaaacattaaactgttttccaaaacagctgtatcattttccattctcaacggcaatgtctgaagtttccaacttttccacatcctcatccacactgattaccttcttttttgtttgtttgtttgtattgtcgccatcctaatgggagtcaagtagagtctcattgtggttttgatttgcctgtccctaatgaccaatgatgctgagcatcttttcatgtgtttattagccagctgtttatctctaactgctcctgatactcctgcgtgtgtattcaaagataagctgtgcctgaatgtcctttctcacactcaacttctaattgcaacaaagctcaaactcctgctgctcgcagccctgctttgagatgcacctgggatgacttaaccctttggctgctttcaaagtgggtgaaaggtatcctagtagagcagggttatggaaagtcctgagaacaggcactaacattcagttagtttcttggcagagacttccttttttgcactatcacaaataacgagggtgcttgtggcagaaggaacttcagactcatgcctggtgccacgcagcacctgcatggagaagggtctcctgtgggcagaggaaagccccagacagggcacaggtgctggccagtggctcaagagggtgcagctgcctcggccttttccagaccagccttgacccctgcccgcccagagaaacaactgttcccattttgaccaacttgcttggagacacctgaccagcagcctaccaccaaaatcacacaataaccatggcatcgtgtttctcgcggacagatgctgagacgcagccagccaccctttggtttttagtgctcttccctgatagcatctgttggcctgctgagtcacactgcaggtgaagtgcactcatccctctgtgtgagctctggccatttgctgcctgtggttcccccatgagtcagtggcattgggccttactctgaggagatgtaatggagggacatggaggtcacagggcatgtgctgagaggagagtttgcaattcttgaagagtttattttgaataagctgagtcatgattacttcaaggactaggctcagctgtagacaccaactgcaaagccaaagcctggggcattttgtctggtgaaactctgaaagtttccataagatattattttgagtagaactagataacttttttcctgatgaaacatgcaattttctataaaacctttaaaaatcaaaacgtaaaagaattaatgccttactcattccaaagtaacaaagagtgtctcatatatttaaacattcaaatcaacttccaaattcagtctgctataaattcagtacagaaatggggaggatgtagaagaatgaggaagacccagggagagggaattcacaattcactcaaaatgcaatcaaggtggctattcttttaaacatttacaacagctttgacacttcttctttggtttttggatagagcgtcttcttgaaatctctgagtcaaagttgatatcttttaagacgctcttctgttccccaaagtgtctttgctttttcagggataggctggtggttcctcttgggtgtcctcagccatgccaagtcctcctgggacccgggaggctgggttgtcctgtcctggtgggagtgaaggaccgtggttgggtgaagtcttggtggaggcagctgcctagctctcctgtgctctcctctggtggagtggggagacttgctgctctgtagatatgagctcggggaggaatgagggctgagctccctccacagccacccagtgtctcagcaggagggccccacttggagatgccaagaccctcccagtgggttctctcctagcacagcaagggagagctgcaccagcaggtggagaagttggggaacagataagcagcagcctctcagccaggtggacacctcagcgtgggagcctcaagcagccttgagggcagtggcggagaggaaggacctcctcccctcactgtccacagcatggccctccaccctctgtctcccttggtctgttgatatctctcttttctcctccctgcaagctcttatgactatgttacatgtgtggttggtttgttggaaggacaagagaaggagcaggagttagaatcatctgtggcacccaccagtctcacctccacccaggtctatcttcccagcaaaacactacatggtcccctgtatggaaaacttccccaatactctctcacctccctgcactctgccaatctgtcatcttaactttgaacagccctagacggccatcgtcatgaaactcagctcccaagccttgccacttgaacagctttccacatctccccacagagtcctctaagataaaaaccaatagccctgggaggtatcattttttattttacagggccccatgcaatggcatgaagccagacagcagaataaaagcggaattcctcctcacagccttggccttgcctcctttaccttctgccttgccctctgtcctcccagctttccatgtctttcttcctccatttccctttcctcctttccttccttcctacctgtccattctcccttcccattttttttctttcctccatgcaccagttttccagccttgttccaccctaggaccctgggcctgaagaggctggagctgcagtcctgacgcttcttcctcccagagccccagggatgtgttcctacctttggtggacccctcaccacctatgccaagcattaaaatctccctccttcagccagtctaggccggagagcgcgcctgaatcttcctgcctcccctcttcacgtgtgtccctaaggataggcttgtgccctgtctatgaggcggacatagttgacaatgaactgacagtggtagtccccagcctccacttgtaatacctggggacatctccccaactc

SEQ ID NO: 1880690 - DNA, 4001 bp, Homo sapiens
cttctggagaggagtcatttgctaatatctgtatctgctgcctctctcttttggcagagcctctgtctgtgtatgcatgacagagtttttcctctcttaccagtaaattagcagaatatagtttcgtttgctgttgtcattcctctaaatgggtgagtattttatgtctgagggaccttccctgcctgggagacaactgattctccaaagcacactagtggccagcagctctgagtgtgccacaaatgcacgtgcctgttccatttgtacaaggaggatttgcaatcactgcatctgctggcctgcccaggacagagccctgtggaacctgggtgctcaccctcaccctgctcacagggatcccccggatgccctggtggctcaggcaagagccctctagtccagaatcctgtcattcatcctggtgaggaatgaagctctggggcagtcggggcctataaaggcagtggctcctcctcccaccatgttcttagtgacctacaatgagaggaaaatccataaatgcccctaacccagttattttaagtatacaatgcagtggcattaagtacattcacaatgttgtacaaccagcaccactgtttccaaaacatttttcatcacctcaaactgaaactccgtacctgttaaccaataactccccattctcccctctccccagcccctggcaacctcgattctagtttctgtctcaatcagtttgactaatctaggtaccttatatacgtgtttttatacaatattcgtccttttgtacctggcttatttcacttagcatgttttcaaggttcatccacgttgtagcatatataagaacttgattcctttttatggctgaatagtattccattgtgtgtacataccacattttgtttatctgccaacagaaacttgggttgtttacactttttttaagctattgtgaataatgctgcaataaatattggtatactagtctctattggagtccttgctttcaattctttggggtacaaacataaaaatggaattgctgggtcatatgctaattctctattcaactttttaaggaaacattaaactgttttccaaaacagctgtatcattttccattctcaacggcaatgtctgaagtttccaacttttccacatcctcatccacactgattaccttcttttttgtttgtttgtttgtgttgtcgccatcctaatgggagtcaagtagagtctcattgtggttttgatttgcctgtccctaatgaccaatgatgctgagcatcttttcatgtgtttattagccagctgtttatctctaactgctcctgatactcctgcatgtgtattcaaagataagctgtgcctgaatgtcctttctcacactcaacttctaattgcaacaaagctcaaactcctgctgctcgcagccctgctttgagatgcacctgggatgacttaaccctttggctgctttcaaagagggtgaaaggaatcctagtagagcagggttatggaaagtcctgagaacaggcactaacattcagttagtttcttggcagagacttccttttttgcacaatcacaaataacgagggtgcttgtggcagaaggaacttcagactcatgcctggtgccacgcagcacctgcatggagaagggtctcctgtgggcagaggaaagccccagacagggcacaggtgctggccagtggctcaagagggtgcagctgcctcggccttttccagaccagccttgacccctgcccgcccagagaaacaactgttcccattttgaccaacttgcttggagacacctgaccagcagcctaccaccaaaatcacaaaataaccatggcatcgtgtttctcgcggacagatgctgagacgcagccagccaccctttggtttttagtgctcttccctgatagcatctgttggcctgctgagtcacactgcaggtgaagtgcactcatccctctgtgtgagctctggccatttgctgcctgtggttcccccatgagtcagtggcattgggccttactctgaggagatgtaatggagggacatggaggtcacagggcatgcgctgagaggagagtttgcaattcttgaagagtttattttgaataagctgagtcatgattacttcaaggactaggctcagctgtagacaccagctgcaaagccaaagcctggggcattttgtctggtgaaactctgaaagtttccataagatgttattttgagtagaactagataacttttttcctgatgaaacatgcaattttctataaaacctttaaaaatcaaaacgtaaaagaattaatgccttactcattccaaagtaacaaagagtgtctcatatatttaaacattcaaatcaacttccaaattcagtctgctataaattcagtacagaaatggggaggatgtagaagaatgaggaagacccagggagagggaattcacaattcactcaaaatgcaatcaaggtggctattcttttaaacatttacaacagctttgacacttcttctttggttttcggatagagcgtcttcttgaaatctctgagtcaaagttgatatcttttaagacgttcttctgttccccaaagtgtctttgctttttcagggataggctggtggttcctcttgggtgtcctcagccatgccaagtcctcctgggacccgggaggctgggttgtcctgtcctggtgggagtgaaggaccgtggttgggtgaagtcttggtggaggcagctgcctagctctcctgtgctctcctctggtggagtggggagacttgctgctctgtagatatgagctcggggaggaatgagggctgagctccctccacagccacccagtgtctcagcaggagggccccacttggagatgccaagaccctcccagtgggttctctcctagcacagcaagggagagctgcaccagcaggtggagaagttggggaacagataagcagcagcctctcagccaggtggacacctcagcgtgggagcctcaagcagccttgagggcagtggcggagaggaaggacctcctcccctcactgtccacagcatggccctccaccctctgtctcccttggtctgttgatatctctcttttctcctccctgcaagctcttatgactatgttacatgtgtggttggtttgttggaaggacaagagaaggagcaggagttagaatcatctgtggcacccaccagtctcacctccacccaggtctatcttcccagcaaaacactacatggtcccctgtatggaaaacttccccaatactctctcacctccctgcactctgccaatctgtcatcttaactttgaacagccctagacggccatcgtcatgaaactcagctcccaaggcttgccacttgaacagctttccacatctccccacagagtcctctaagataaaaaccaatagccctgggaggtatcattttttattttacagggccccatgcaatggcatgaagccagacagcagaataaaagcggaattcctcctcacagccttggccttgcctcctttaccttctgccttgccctctgtcctcccagctttccatgtctttcttcctccgtttccctttcctcctttccttccttcctacctgtccattctcccttcccattttttttctttcctccatgcaccagttttccagccttgttccgccctaggaccctgggcctgaagaggctggagctgcagtcctgacgcttcttcctcccagagccccagggatgtgttcctacctttggtggacccctcaccacctatgccaagcattaaaatctccctccttcagccagtctaggccggagagcgcgcctgaatcttcctgcctcccctcttcacgtgtgtccctaaggataggcttgtgccctgtctatgaggcggacatagttgacaatgaactgacagtggtagtccccagcctccacttgtaatacctggggacatctccccaact

SEQ ID NO: 1880691 - DNA, 4001 bp, Homo sapiens
ggaccacacagcagccccacgaggctggcaggccctcagcctggcttctgagcctcgctgtaatcgcactctccaagctttgtggcattagggtgtgacagggcctgagatccggagagtgtggaccccacccacagttatctcaacacaaaaaaacaatcctgagcaggccaaacagaacctggtgggggatgccttcaccagggctgcatctggtcccagagctgctggtttgcagcccaactatttcgttttatttttttaattttctcaatatttatcttcttttatctataaacgagtaaggttctggggaggttttcttccttggaatcttgttctctcattttaagctgacttaatcttcccacgctacacgtcacatgcagagcgccaactttgaagttcactcggtgaccgactctcccgcccaatccctcggcgagggtgacgtgcaagcggaacatctcaaggctccagatgcaggctcagccctcagctgccctggccttaataaacactagatttttcatttcagaaactatgttcaacctgttgcctcaagacaacctaaaaatcgtcaacattagccaaaggttggaagccaaatgtgttagctcctgcctcagagacagatcccttagcagagggggtctctcagcagaagcccagaggagctgggacccaagctgggagctggtcacttacataaggggggcatcctaagtcgattttaacccgagatccaccagccaagccttcctacggggggccggccagccaccgtgctgtgctgaggagcagattgaacattctcttagctgctccaattttagaattgggtgctgactcattattaactcaggaagcccacacactcaaatgactgtactgaaaaagctccctgtcataccctgcctactgatgtgttgctttttaagcaaatttgaaaaatgtttatcataaggtatttatgacattttaaccgtttcatttacagtaactagaacaacattaaaaaaaaaatgtttcctgtattttacttgacagtaaagctaagcttcatcggaatactaacagcctgagaaatacctatcaagatcaagtcaggcctcaaagactgagtggccccctcctcagtcctccccagtcccccacccccagcgctggcccccagcatttttacgttcttcctgattttactacagtttgtgactttcaacgttaaggaaaaggaaaggacgtaaaatacgctcctgcaatcattcatatgcttttagagaaggcagccaaagttctgcctctctggtatttctcacactgaaattgggcagctctgaccacgaggccagaaatggctcaggagctgcctctcctccacctctgagaagcggaagctcacccaacctcagcaaccctgggttagcacaagtatacccacttccatctctgagcttcactttggcttctcagaggagtcccgagcagcttattttccagccaagcactgcagtctcttccaagacaacagaaggtgcaaccggcatctacattcttacaacgaaggactgagaaacacctcctgacagtcacactacaggacagtaaccatggggctggtgacagaggcagccacttttctaaaacgacagatcttcaaagtctgaaagaaacgcagtgtcctcaccaggacgcagcagcctttcccacagcccagactccaaggcaaactgcagaagcaaccctaaaaatgacagaaacatactcaccagggagaggctggtggctccaccttcccaggaactgtgctgtgaagatctgaagacaggcacgggctcaggcaccgcttgtctggaatgtcaatttgaaacttaaaaagcagcgaccatccagtcatttatttccctccattcccaatgatgtacacacgactaagaaggaaaaaaaaaaaaggcgcacacctcagccttcattctcattggaacgagatgactcatgctgactcatagccaccacttcctctcccgacattctcttcatacttgtgagctggactggtccggttcccagggtccctgcagcccttcctggaagagcagccttcctgatcctctcagagagacccaaacactgaccccacatgggacccaggggtcgcccacacaggggaaatgctttatttaggagtcttgagaacaactggaaaataaaatgcatgaactttgtgtgcatttgaatttcaaatacatactcagattttgtaatgtgctacaggctcatgtatgaaattcttgctcttttcaaggcagttcagagtagagagaagcataagatactttcttattcttttaggtgttcagatttactttgctctggtaataactatttcggtgcctgttttcttctgcatgtattcctctgacataacaattcacaagatctaaaatcatcatctcttcaaagctgtctgttagcggggttcgtgccctgtttataagtttacatgacttacctcttttctatccatctttcagacttcaagaatattctagattcaaatagtaaagcaccaaggaattaaatgaaggtagagcaatccaactcttaatagttgttggagaatgtttatctgcaagaatcaagaattgtcgctgcctcctggttttcttttgaataatgcagagggccgggcagcctcccacagcttcaagcatttttaaattatgagaagcactgggtgtgagcagaatccatgtgatccttagcagctgctcaagaagccaccaaaggctactgtgatttcatttgcccaactcaaggtttctggggggtgacacagtcaaagtcatggatgaacaatggtgcccttggagccttttttggcttagtacctgatgctatgtaggctatattctgatatagacttagagtaaataaggaaataatattttgtccgaggcatgagacccagttttcacctacagctagatttatcttagggaaaaaatatttattcctttgccacatctcaaatcttttatcgggaaattcagggcatttttttccatcaggcaataccaagtgcggtgagttccctatgaaagttgtagcatattggccatttggccaaatagtctcattccttgcagttttgtgttttatggtttttttcccccaggagagttcaaagcctgctggttttccagaatttaggaatgtctgtattgtgcaattcattgcagtgcatttcctttagagaagagtggagaacaggaaggaggcacagccccagagactgctttgagcccagcccctgtcatccacaaggggcttgcttgcctgaggccccaggggcgtggcagccccactagaagaatgcattgaccaggagctctgcagaggatgtgggttgttatgtttgttctctatgtggaaagccagcctttaccttctttatgaagacttttacttttattaagttaactcattaattcctaggagaactgaaaataaaaattaatttcaaaaaataacaccagggatgaaagaaagaaacgtgaaatagttagaaaacatgggctccaagcagggccacaccttcctgccatattagaagtggtttcttccacagtggcactgttataggagccttctggatcattctgaggctttagacacagccagggtcccgaaagagcaatttggactgccaccatggagagtgagtgaaactgtgtcccccccagtgtcgcattcgaagataatcccacaaatgctaaatcttaattcctgattgacttcagcccttctcatttggaaatgggctggaaagtggggaaaaggtgctagtgtgagaagagggaggccattcccaatatactaataaataaatcattcattgaggcatatgagcaccagcccccacataattgctaatatggaactttctggagtagattatctttaagctggctctgaatattccaccagaaaggaaacaa

SEQ ID NO: 1880692 - DNA, 4001 bp, Homo sapiens
gtttcttctggagaggagtcatttgctaatatctgtatctgctgcctctctcttttggcagagcctctgtctgtgtatgcatgacagagtttttcctctcttaccagtaaattagcagaatatagtttcctttgctgttgtcattcctctaaatgggtgagtattttatgtctgagggaccttccccgcctgggagacaactgattctccaaagcacactagtggccagcagctctgagtgtgccacaaatgcacgtgcctgttccatttgtacaaggaggatttgcaatcactgcatctgctggcctgcccaggacagagccctgtggaacctgggtgctcaccctcaccctgctcacagggatcccccggatgccctggtggctcaggcaagagccctctagtccagaatcctgtcattcatcctggtgaggaatgaagctctggggcagtcggggcctataaaggcagtggctcctcctcccaccatgttcttagtgacctacaatgagaggaaaatccataaatgcccctaacccagttattttaagtatacaatgcagtggcattaagtacattcacaatgttgtacaaccagcaccactatttccaaaacgtttttcatcacctcaaactgaaactccgtacctgttaaccaataactccccattctcccctctccccagcccctggcaacctcgattctagtttctgtctcaatcagtttgactaatctaggtaccttatatacgtgtttttatacaatattcgtccttttgtacctggcttatttcacttagcatgttttcaaggttcatccacgttgtagcatatataagaacttgattcctttttatggctgaatagtattccattgtgtgtacataccacattttgtttatctgccaacagaaacttgggttgtttacactttttttaagctattgtgaataatgctgcaataaatattggtatactagtctctattggagtccttgctttcaattctttggggtacaaacataaaaatggaattgctgggtcatatgctaattctctattcaactttttaaggaaacattaaactgttttccaaaacagctgtatcattttccattctcaacggcaatgtctgaagtttccaacttttccacatcctcatccacactgattaccttcttttttgtttgtttgtttgtattgtcgccatcctaatgggagtcaagtagagtctcattgtggttttgatttgcctgtccctaatgaccaatgatgctgagcatcttttcatgtgtttattagccagctgtttatctctaactgctcctgatactcctgcgtgtgtattcaaagataagctgtgcctgaatgtcctttctcacactcaacttctaattgcaacaaagctcaaactcctgctgctcgcagccctgctttgagatgcacctgggatgacttaaccctttggctgctttcaaagtgggtgaaaggtatcctagtagagcagggttatggaaagtcctgagaacaggcactaacattcagttagtttcttggcagagacttccttttttgcactatcacaaataacgagggtgcttgtggcagaaggaacttcagactcatgcctggtgccacgcagcacctgcatggagaagggtctcctgtgggcagaggaaagccccagacagggcacaggtgctggccagtggctcaagagggtgcagctgcctcggccttttccagaccagccttgacccctgcccgcccagagaaacaactgttcccattttgaccaacttgcttggagacacctgaccagcagcctaccaccaaaatcacacaataaccatggcatcgtgtttctcgcggacagatgctgagacgcagccagccaccctttggtttttagtgctcttccctgatagcatctgttggcctgctgagtcacactgcaggtgaagtgcactcatccctctgtgtgagctctggccatttgctgcctgtggttcccccatgagtcagtggcattgggccttactctgaggagatgtaatggagggacatggaggtcacagggcatgtgctgagaggagagtttgcaattcttgaagagtttattttgaataagctgagtcatgattacttcaaggactaggctcagctgtagacaccaactgcaaagccaaagcctggggcattttgtctggtgaaactctgaaagtttccataagatattattttgagtagaactagataacttttttcctgatgaaacatgcaattttctataaaacctttaaaaatcaaaacgtaaaagaattaatgccttactcattccaaagtaacaaagagtgtctcatatatttaaacattcaaatcaacttccaaattcagtctgctataaattcagtacagaaatggggaggatgtagaagaatgaggaagacccagggagagggaattcacaattcactcaaaatgcaatcaaggtggctattcttttaaacatttacaacagctttgacacttcttctttggtttttggatagagcgtcttcttgaaatctctgagtcaaagttgatatcttttaagacgctcttctgttccccaaagtgtctttgctttttcagggataggctggtggttcctcttgggtgtcctcagccatgccaagtcctcctgggacccgggaggctgggttgtcctgtcctggtgggagtgaaggaccgtggttgggtgaagtcttggtggaggcagctgcctagctctcctgtgctctcctctggtggagtggggagacttgctgctctgtagatatgagctcggggaggaatgagggctgagctccctccacagccacccagtgtctcagcaggagggccccacttggagatgccaagaccctcccagtgggttctctcctagcacagcaagggagagctgcaccagcaggtggagaagttggggaacagataagcagcagcctctcagccaggtggacacctcagcgtgggagcctcaagcagccttgagggcagtggcggagaggaaggacctcctcccctcactgtccacagcatggccctccaccctctgtctcccttggtctgttgatatctctcttttctcctccctgcaagctcttatgactatgttacatgtgtggttggtttgttggaaggacaagagaaggagcaggagttagaatcatctgtggcacccaccagtctcacctccacccaggtctatcttcccagcaaaacactacatggtcccctgtatggaaaacttccccaatactctctcacctccctgcactctgccaatctgtcatcttaactttgaacagccctagacggccatcgtcatgaaactcagctcccaagccttgccacttgaacagctttccacatctccccacagagtcctctaagataaaaaccaatagccctgggaggtatcattttttattttacagggccccatgcaatggcatgaagccagacagcagaataaaagcggaattcctcctcacagccttggccttgcctcctttaccttctgccttgccctctgtcctcccagctttccatgtctttcttcctccatttccctttcctcctttccttccttcctacctgtccattctcccttcccattttttttctttcctccatgcaccagttttccagccttgttccaccctaggaccctgggcctgaagaggctggagctgcagtcctgacgcttcttcctcccagagccccagggatgtgttcctacctttggtggacccctcaccacctatgccaagcattaaaatctccctccttcagccagtctaggccggagagcgcgcctgaatcttcctgcctcccctcttcacgtgtgtccctaaggataggcttgtgccctgtctatgaggcggacatagttgacaatgaactgacagtggtagtccccagcctccacttgtaatacctggggacatctcccc

SEQ ID NO: 1880693 - DNA, 4001 bp, Homo sapiens
tgtttcttctggagaggagtcatttgctaatatctgtatctgctgcctctctcttttggcagagcctctgtctgtgtatgcatgacagagtttttcctctcttaccagtaaattagcagaatatagtttcgtttgctgttgtcattcctctaaatgggtgagtattttatgtctgagggaccttccctgcctgggagacaactgattctccaaagcacactagtggccagcagctctgagtgtgccacaaatgcacgtgcctgttccatttgtacaaggaggatttgcaatcactgcatctgctggcctgcccaggacagagccctgtggaacctgggtgctcaccctcaccctgctcacagggatcccccggatgccctggtggctcaggcaagagccctctagtccagaatcctgtcattcatcctggtgaggaatgaagctctggggcagtcggggcctataaaggcagtggctcctcctcccaccatgttcttagtgacctacaatgagaggaaaatccataaatgcccctaacccagttattttaagtatacaatgcagtggcattaagtacattcacaatgttgtacaaccagcaccactgtttccaaaacatttttcatcacctcaaactgaaactccgtacctgttaaccaataactccccattctcccctctccccagcccctggcaacctcgattctagtttctgtctcaatcagtttgactaatctaggtaccttatatacgtgtttttatacaatattcgtccttttgtacctggcttatttcacttagcatgttttcaaggttcatccacgttgtagcatatataagaacttgattcctttttatggctgaatagtattccattgtgtgtacataccacattttgtttatctgccaacagaaacttgggttgtttacactttttttaagctattgtgaataatgctgcaataaatattggtatactagtctctattggagtccttgctttcaattctttggggtacaaacataaaaatggaattgctgggtcatatgctaattctctattcaactttttaaggaaacattaaactgttttccaaaacagctgtatcattttccattctcaacggcaatgtctgaagtttccaacttttccacatcctcatccacactgattaccttcttttttgtttgtttgtttgtgttgtcgccatcctaatgggagtcaagtagagtctcattgtggttttgatttgcctgtccctaatgaccaatgatgctgagcatcttttcatgtgtttattagccagctgtttatctctaactgctcctgatactcctgcatgtgtattcaaagataagctgtgcctgaatgtcctttctcacactcaacttctaattgcaacaaagctcaaactcctgctgctcgcagccctgctttgagatgcacctgggatgacttaaccctttggctgctttcaaagagggtgaaaggaatcctagtagagcagggttatggaaagtcctgagaacaggcactaacattcagttagtttcttggcagagacttccttttttgcacaatcacaaataacgagggtgcttgtggcagaaggaacttcagactcatgcctggtgccacgcagcacctgcatggagaagggtctcctgtgggcagaggaaagccccagacagggcacaggtgctggccagtggctcaagagggtgcagctgcctcggccttttccagaccagccttgacccctgcccgcccagagaaacaactgttcccattttgaccaacttgcttggagacacctgaccagcagcctaccaccaaaatcacaaaataaccatggcatcgtgtttctcgcggacagatgctgagacgcagccagccaccctttggtttttagtgctcttccctgatagcatctgttggcctgctgagtcacactgcaggtgaagtgcactcatccctctgtgtgagctctggccatttgctgcctgtggttcccccatgagtcagtggcattgggccttactctgaggagatgtaatggagggacatggaggtcacagggcatgcgctgagaggagagtttgcaattcttgaagagtttattttgaataagctgagtcatgattacttcaaggactaggctcagctgtagacaccagctgcaaagccaaagcctggggcattttgtctggtgaaactctgaaagtttccataagatgttattttgagtagaactagataacttttttcctgatgaaacatgcaattttctataaaacctttaaaaatcaaaacgtaaaagaattaatgccttactcattccaaagtaacaaagagtgtctcatatatttaaacattcaaatcaacttccaaattcagtctgctataaattcagtacagaaatggggaggatgtagaagaatgaggaagacccagggagagggaattcacaattcactcaaaatgcaatcaaggtggctattcttttaaacatttacaacagctttgacacttcttctttggttttcggatagagcgtcttcttgaaatctctgagtcaaagttgatatcttttaagacgttcttctgttccccaaagtgtctttgctttttcagggataggctggtggttcctcttgggtgtcctcagccatgccaagtcctcctgggacccgggaggctgggttgtcctgtcctggtgggagtgaaggaccgtggttgggtgaagtcttggtggaggcagctgcctagctctcctgtgctctcctctggtggagtggggagacttgctgctctgtagatatgagctcggggaggaatgagggctgagctccctccacagccacccagtgtctcagcaggagggccccacttggagatgccaagaccctcccagtgggttctctcctagcacagcaagggagagctgcaccagcaggtggagaagttggggaacagataagcagcagcctctcagccaggtggacacctcagcgtgggagcctcaagcagccttgagggcagtggcggagaggaaggacctcctcccctcactgtccacagcatggccctccaccctctgtctcccttggtctgttgatatctctcttttctcctccctgcaagctcttatgactatgttacatgtgtggttggtttgttggaaggacaagagaaggagcaggagttagaatcatctgtggcacccaccagtctcacctccacccaggtctatcttcccagcaaaacactacatggtcccctgtatggaaaacttccccaatactctctcacctccctgcactctgccaatctgtcatcttaactttgaacagccctagacggccatcgtcatgaaactcagctcccaaggcttgccacttgaacagctttccacatctccccacagagtcctctaagataaaaaccaatagccctgggaggtatcattttttattttacagggccccatgcaatggcatgaagccagacagcagaataaaagcggaattcctcctcacagccttggccttgcctcctttaccttctgccttgccctctgtcctcccagctttccatgtctttcttcctccgtttccctttcctcctttccttccttcctacctgtccattctcccttcccattttttttctttcctccatgcaccagttttccagccttgttccgccctaggaccctgggcctgaagaggctggagctgcagtcctgacgcttcttcctcccagagccccagggatgtgttcctacctttggtggacccctcaccacctatgccaagcattaaaatctccctccttcagccagtctaggccggagagcgcgcctgaatcttcctgcctcccctcttcacgtgtgtccctaaggataggcttgtgccctgtctatgaggcggacatagttgacaatgaactgacagtggtagtccccagcctccacttgtaatacctggggacatctccc

SEQ ID NO: 1880694 - DNA, 4001 bp, Homo sapiens
catgtcatgatcatgtctgaggcccaggacctgagaaactactgcattaatacggcagccttagtgagtgagctggctgtggacagcaagtcttggctggaggatgtttagtgcaggaggcctaactctgcttgtgctgtatggaccctgagccttcaagtggaaggagccatgggggcagggagagggatgcttgtccctgtaaacatgtgtacccacattcaggggtcttcttttaccttctatcattcccaccccagttttcctctctcttagacacccccacattgtctgcagaattttttccaaaacacaaattggaacaggtgtctctcttctactgaaaatccttcaatggctcctactgcctttggaatggggcccacatccttcagcatgactgaactattccagtgtcctttgtgtcaatcacagaaccctacaggggtaatgtactggttgtgggaccacggcgaggtggtccagccacagggtggagagagcagggcccccaggcttcaggtcccctggggcctcctgagtctgccacttaccagccagctctcctctccttcccttgtgggatggcgccctcacatggcagagagctcatagtgacacattcctcctttgaagtccattttcacgctgccaatactgtgcatgcagacatacccaagactgtgcaatttacaaaagaaagaggtttattggactcacagttccacatggctggggaggcctcacaatcatggcagaaggcaaggaggagcaagtcacatcttacatgcatggcagcaggcaaaaagagagcttatgcagagacactctcgtttttaaaactatcagatctcatgagacccattcactatcacaagaacagcacgggaaagacccactcccatgattcaatcatctgccactgggtccctcccacaacacatgggaattatgggagctacaggatgagatttgggtggggacacagagccaaaccatagcagagtggcctaaccttcctgaatcctaccttgaaaacttccaacgccaaggctacatctcttcccatccctggatcagtcactgtggccagaaagccccatgtcagcctggcagctcttgcaggctcatgtggccatggcagaaggaaggggtacatggtggggtgctgtcttcagagtaagtatggggttccagggagcactgtgaccctgtggggtggccacaaaatatctcagctgccttccagcctgtctgcctcccttcccccctcatcaggtgagtttaactacctaaacttgcaagtccagaagtgacccctggggccctccatgagccagcctgtccccagcaaggccccctgctgttcacccatggtcagctgccccagctacaccaccctcctcactgcccatgggcacacagacatgcactcgcatgggaccttggcaggggtaactgcctggtgactcctgcctccttctgtcatcttgacagggccttccctgatggcccctcccctgagaccttggcattccgcttttcgcttccctgcttcattttctcccaggcatttaactccatttaacccacgaatgtgctacttattatcttgctgccatctgcttcttatctctcaaatgtaagctccatgagggcaggaatttttgaatattttcttcactgttatacccacagttgttcttgaaggaaagcaggtgcttaaaagatatttgttgactgactgaatgaatgaggagcatgtgagtggacagtggggcagagtggggctgggatggttggcaggacccgaaaggtgttgaaggtgacggcccctaccctgagaaaagagcagagccatcacacagcttcaacatggggcaacacagtcgtgttctccccatgagtgagaagtgtcctcacttatccacttctgcctgtcctgcccaaatcgtggagcagattcgaggggcagggcaggcataagtggaaaagtgaggccatgaggagtcctggcctgggatgccggtggctgaaacaagggagaaattcatgtcccatgagctaggcagggaaatcagtagcctttggggtggctttgcacatggctggcaagggaggcaggaggagtcaggggccacaggcatcaggctcagagagcagggcaagaagaggaacctggggcccactgggcttgtgaggcttgtgaagaaacatcagaggctcagtgtgagccaggaagagctggaggagttctgaacattcacaaagagctgaggagctgctcagagcagagttctgggccagtgagtggagctgtaggggcagtcagagcatgggttttctggaggtgggcagaggagagtgggccttgggcaggaggtcagcgtgggacatggacccagggccggggtggaggcaagcctgcttcacagccaggtgcagatgagacggagactgcagtcagggcaggacaccaggatagccccagggacaccctgatggagagtttccaggagagggagtcgtcggccaggggttgctcccctcaggccaggcaggaggctaggaggcagggtcatgcatgggctcctgggcagcggggctgagggtccctgggggtgggcaggagctggcactgctgtctctaacagtcactctccacctccttctagttcttcgccttcgtcaccatgctgctctacattctccatgccttcagcatctattaccactgatgcacaggcaccaggccaagggggaaatactctttgaaagccctgattatttctccccgaaagcagcttccaatgcttgccatctggatgataaacagaagatccactaaaacatccacaggattaacagagcttccttgcagactaagcgatgacaccacactttggacatttaaattcactctactgaataggaggaagcctttattttccttttcctgggaaagtaactgtctcttggaattatctgaccgtgaacttcctcttctagcaaactcacatgaaagccctcactgttgagaatcccagctccactgtcaagcctgtttggggattttgcctcagctgtgggcttccctagagtaggttcaggggaatactcagcctgattatcttaaaattgaagaagtgccaccaaggccttcagatctaatgcagatccacagaccttgctcctggtacttgttcagcctgtgctggggagccatggtcctgagttcccggggaggctggcagggtcaagccaccctgcccaccaccctcccacttcccctcccctttcctctccagcattgggatccaaggaaaatctgcatgaagccaattttgagggtagatttgtgtggaaaataaatcattatacagtaagacctggggcttgaggggtggggaatggggagggaagggcatagcctgctcctccatgagtctgacatctcagaaactgtgcagctgccggacgcctgggtcaggactccaagaccccacctcttaaggacaagaaaatgcctggttcctcagaaaagaccctcagggaagaaggtgaaaacattacatccaaggattctcctgccacaactggattggaagaaaaggctgccgcatcatctcagcgaggagtgaaggaaccatgtcccggggaccgcgctcctccacctgcactcaccccctcacattctcttaagcaccctgtggcccttcgaggcctggcagaatggtggtgcccaccgggttgggccagggctcaacgggcaaagttgtgcacactaaaatatcaaatcaaggtgcttggttttaaagtaaatgtttttctaaagaaagctgtgctcttctgctgacccagatgagtagggcacagccctgtaactgcacttgccttctgtcatttggaatgaaataaattatgagaaaggggcttcttaactgattcgagtgcttacagtttagtatcaacctttttctcctcctggggtttgcaggggc

SEQ ID NO: 1880695 - DNA, 4001 bp, Homo sapiens
gtggcaggagaatccacggatgtaatgttttcacctttttccctgagggtgctttctgaggaaccagtccttaagaggtggggtcttggattcctgacccaggcgtccggcagctgctcagtttccgagatgtcagactcatggaggagcaggctatgcccttccctccccattccccacccctcaagccccaggtcttactgtataatgatttattttccccacacgtctaccctcaaaattggcttcatgcaaatttcccttgaatcctaatgctggagaggaaaggggaggggaagtgggagggtggtgggcagggtggcttgaccctgtcagcctcccagggaactcgggaccacggctccccagcacaggctgaacaagtaccaggaacaaggtctatgcatctgcgttagatctgaaggccttggcagcacctcttcaattttaagagaatcaggccgggcgcggtggctcacgcctgtaatcccagcactttgggaggccgaggcgggcggatcacgaggtcaggagatcgagaccatcctggctaatacggtgaaaccccatctctactaaaaatacaactaaattagccgggcacggtggtgggcgcctgtagtcccggctactcgggaggctgaggcaggagaatggcgggaacccgggaggcggagcctgcagtgagtggagatcgcgtcactgcactccagccttggaggaagagcgagactccgtctcaaaaaaaacaaaataaaacaaacaaaaaaaagatcagactgagtattcccctagacctactctagggaagcccatagctgaggcaaaatccccaaacagacttggcattagtggggctaggattctccattagtggagtgagggctttgatgtgagttgtctagaagagcaagttcatggtcagataattccaagagacagttgttttcccaggaaaaagaaaagcttcctcctattcagcagagtgaatttaaatgtccaaacaaagtgtggtgtcatcgctcagtctgcaaggacgttctgttaatcccgtggacgttttagtggatcttccgtttgtcatccagatggcaaacgttggaagctgcttttggggaccaataattggagctttcaaagagcatttcccccttggcctggcgcctgtgcatcagtggtaatagatgctgaaggcatggagaatgtagagcagcgtggcgatgaaggcgaagaactggaaggaggtggagagtgactgttagagacagcagcgccagctcctgcccacccctcaggtaccctcagccccactgcccaggaggccacgcatgaccctgcctcctcgcctcctgcgtggcctgagggcagcaacccctggccaacaactccctcttctggaaactctccatcagggcctccctggggccgtcctggtgtcctgccccgactgcagtctccacctcatctgcacctggctgtgaagcaggctcacctccaccacagctctgggcccatatcccacgctgacctcctgcccgaggcccgctctcctctgcccacctccagcaaatctgtgttctgaacactcctacagctcccctcgctggcccagaactctgccctgagcggctgcttatcagctcctcgtgaatgttcagacatcctccagctcttcctggctcacactgagcccctgacgtttcctcacaagcctgacaagcccagtgggccccagggtcctcctctcgccccactccctgagcctgacccctgtggcccctggctcctcctgcctcccttgccagccatatgcaaagccaccccaaaggctactgatttccctgcctagctcttgggacattcatttttcccttgtctcagccaccggcatccctcggcaggactcctcatggcctcacttgtccacttcttcctgccctgcccctcgaatctgctccaccatttgggcagggcaggcagaagtggacaagtgaggacacttctcactcatggggagaacacaatcccgttgccccacgttgaagctgtatgatggctctgctcttttctcagggtagggccgtcaccttcaatacctttcaggccctgccaaacatcccagccccactctgccccactgtccactcacacgctcctcattcagtcagtcagtcaacaaatatcttttaaggacctgctttccttcaagagcaactgtgggtataacagtgaagaaaatattcaaaaattcctgccctcatggagcttacatttgagagataagaagcagatagcagcaagatagatgagtagcacatacatgggttagatggaggtaaatgccacccactgtggagtgcactgtgaccctctggggtggccacaagatatttcagctgccttctggcctgtctgcctcccttccctcctcatcaggtgagtttaacttcctaaacttgcaagaccagcaacggcccctgcaatcctccatggccagctgtcccagctacaccaccctcctggctgcccttgagcacacagagggtccttggcaggggtaactgcctggtgggaccttagcaggggtaactgcctggtggcccctgcctccttctgtcctcttgacagggccttccctgatgcctcctcccctgagacctcgacattccactttccccttccctgcttcatctctcaatagttcagccatgccgagggatgcgggccccattccaaaggcagtgggtgccattgaaggattttcagtaggagagagacatctgttccaatttgtgttttggaaaaagaaaattctgcagacagcgtggggggtgtctaagagagaggaaagctggagtgggaacaatagaaggtaaaagaggacccctgaacgtgggtgcacatgtttacagggacacacatccctatcccctgcccccatggctccttccacttgagggctcagggtctatacagcacaagcaaagttaggcctcctgcacgaaacatcctccaggcaagactgctgtccttggccagcccactcaccgaggctgccgaattaatgtagtaaattcttgggtccagcagtttctcagaaacaatcgtggcatgtacttgtaggacggcagcgctcatgtacaggatgccagtggtcccgtggtacaggctgtcctggaaatgcagagcagagccacgcatggccacatcaatcaggtgaacattttcctctctggctacatagcagtaaagaatgagcaaatgaggcaggccagccccctagagtcctgccttttttttttttttttgcagtgtgatttggtttggctctgtgtccctgcccaaatctcatctcgaattgtaatccccacatgttgggggagggacctggtgggagatgactggattatgggggcagtttccccatgctgttctcgtgatagtgagggagttctcataagatctgatggtttaaaagtgtgacacttccctctctcactcctgctgccatgtaaggtgtgccttgcttccccttcgccttccaccatgattgtaagattcctgagacctccctagccatgcagaactgtgagccaattaaacctcttttccttataaattacccagcctcaggtagttctttacagcagtgtgagaacagactaatacagaaaattggtaccaggagtcaggcactgctataaagatacctgaaaatgtggaagcaactttggaactggataatgggcaaaggttggaacagtttggggtacccagaagaagacaggaagatgtaggaaagtttggaactttctagagacttgttgaatgattctgaccaaaatgctgatggtgatatggacaatgaaatccaggctgaggtggtctcagatggagatgaggaacttattgggaactggaataaaggtcactcttgctatgctttagcaaagagactggtggcattttacccctgtcctagagatctgtggcactctgaa

SEQ ID NO: 1880696 - DNA, 4001 bp, Homo sapiens
tgtggcaggagaatccacggatgtaatgttttcacctttttccctgagggtgctttctgaggaaccagtccttaagaggtggggtcttggattcctgacccaggcgtccggcagctgctcagtttccgagatgtcagactcatggaggagcaggctatgcccttccctccccattccccacccctcaagccccaggtcttactgtataatgatttattttccccacacgtctaccctcaaaattggcttcatgcaaatttcccttgaatcctaatgctggagaggaaaggggaggggaagtgggagggtggtgggcagggtggcttgaccctgtcagcctcccagggaactcgggaccacggctccccagcacaggctgaacaagtaccaggaacaaggtctatgcatctgcgttagatctgaaggccttggcagcacctcttcaattttaagagaatcaggccgggcgcggtggctcacgcctgtaatcccagcactttgggaggccgaggcgggcggatcacgaggtcaggagatcgagaccatcctggctaatacggtgaaaccccatctctactaaaaatacaactaaattagccgggcacggtggtgggcgcctgtagtcccggctactcgggaggctgaggcaggagaatggcgggaacccgggaggcggagcctgcagtgagtggagatcgcgtcactgcactccagccttggaggaagagcgagactccgtctcaaaaaaaacaaaataaaacaaacaaaaaaaagatcagactgagtattcccctagacctactctagggaagcccatagctgaggcaaaatccccaaacagacttggcattagtggggctaggattctccattagtggagtgagggctttgatgtgagttgtctagaagagcaagttcatggtcagataattccaagagacagttgttttcccaggaaaaagaaaagcttcctcctattcagcagagtgaatttaaatgtccaaacaaagtgtggtgtcatcgctcagtctgcaaggacgttctgttaatcccgtggacgttttagtggatcttccgtttgtcatccagatggcaaacgttggaagctgcttttggggaccaataattggagctttcaaagagcatttcccccttggcctggcgcctgtgcatcagtggtaatagatgctgaaggcatggagaatgtagagcagcgtggcgatgaaggcgaagaactggaaggaggtggagagtgactgttagagacagcagcgccagctcctgcccacccctcaggtaccctcagccccactgcccaggaggccacgcatgaccctgcctcctcgcctcctgcgtggcctgagggcagcaacccctggccaacaactccctcttctggaaactctccatcagggcctccctggggccgtcctggtgtcctgccccgactgcagtctccacctcatctgcacctggctgtgaagcaggctcacctccaccacagctctgggcccatatcccacgctgacctcctgcccgaggcccgctctcctctgcccacctccagcaaatctgtgttctgaacactcctacagctcccctcgctggcccagaactctgccctgagcggctgcttatcagctcctcgtgaatgttcagacatcctccagctcttcctggctcacactgagcccctgacgtttcctcacaagcctgacaagcccagtgggccccagggtcctcctctcgccccactccctgagcctgacccctgtggcccctggctcctcctgcctcccttgccagccatatgcaaagccaccccaaaggctactgatttccctgcctagctcttgggacattcatttttcccttgtctcagccaccggcatccctcggcaggactcctcatggcctcacttgtccacttcttcctgccctgcccctcgaatctgctccaccatttgggcagggcaggcagaagtggacaagtgaggacacttctcactcatggggagaacacaatcccgttgccccacgttgaagctgtatgatggctctgctcttttctcagggtagggccgtcaccttcaatacctttcaggccctgccaaacatcccagccccactctgccccactgtccactcacacgctcctcattcagtcagtcagtcaacaaatatcttttaaggacctgctttccttcaagagcaactgtgggtataacagtgaagaaaatattcaaaaattcctgccctcatggagcttacatttgagagataagaagcagatagcagcaagatagatgagtagcacatacatgggttagatggaggtaaatgccacccactgtggagtgcactgtgaccctctggggtggccacaagatatttcagctgccttctggcctgtctgcctcccttccctcctcatcaggtgagtttaacttcctaaacttgcaagaccagcaacggcccctgcaatcctccatggccagctgtcccagctacaccaccctcctggctgcccttgagcacacagagggtccttggcaggggtaactgcctggtgggaccttagcaggggtaactgcctggtggcccctgcctccttctgtcctcttgacagggccttccctgatgcctcctcccctgagacctcgacattccactttccccttccctgcttcatctctcaatagttcagccatgccgagggatgcgggccccattccaaaggcagtgggtgccattgaaggattttcagtaggagagagacatctgttccaatttgtgttttggaaaaagaaaattctgcagacagcgtggggggtgtctaagagagaggaaagctggagtgggaacaatagaaggtaaaagaggacccctgaacgtgggtgcacatgtttacagggacacacatccctatcccctgcccccatggctccttccacttgagggctcagggtctatacagcacaagcaaagttaggcctcctgcacgaaacatcctccaggcaagactgctgtccttggccagcccactcaccgaggctgccgaattaatgtagtaaattcttgggtccagcagtttctcagaaacaatcgtggcatgtacttgtaggacggcagcgctcatgtacaggatgccagtggtcccgtggtacaggctgtcctggaaatgcagagcagagccacgcatggccacatcaatcaggtgaacattttcctctctggctacatagcagtaaagaatgagcaaatgaggcaggccagccccctagagtcctgccttttttttttttttttgcagtgtgatttggtttggctctgtgtccctgcccaaatctcatctcgaattgtaatccccacatgttgggggagggacctggtgggagatgactggattatgggggcagtttccccatgctgttctcgtgatagtgagggagttctcataagatctgatggtttaaaagtgtgacacttccctctctcactcctgctgccatgtaaggtgtgccttgcttccccttcgccttccaccatgattgtaagattcctgagacctccctagccatgcagaactgtgagccaattaaacctcttttccttataaattacccagcctcaggtagttctttacagcagtgtgagaacagactaatacagaaaattggtaccaggagtcaggcactgctataaagatacctgaaaatgtggaagcaactttggaactggataatgggcaaaggttggaacagtttggggtacccagaagaagacaggaagatgtaggaaagtttggaactttctagagacttgttgaatgattctgaccaaaatgctgatggtgatatggacaatgaaatccaggctgaggtggtctcagatggagatgaggaacttattgggaactggaataaaggtcactcttgctatgctttagcaaagagactggtggcattttacccctgtcctagagatctgtggcactctga

SEQ ID NO: 1880697 - DNA, 4001 bp, Homo sapiens; identical to SEQ ID NO: 1880695

SEQ ID NO: 1880698 - DNA, 4001 bp, Homo sapiens; identical to SEQ ID NO: 1880696

SEQ ID NO: 1880699 - DNA, 4001 bp, Homo sapiens
ttaaataaaatagataagcattgtatagtaaaagtgatttatatatttgtgtatttacatattttaaatatatactaatatacatttagatatttaatgattttattaaaataataaaagtaatatatcaatattatattgatatatttatttaaatttatatttaaaaactgggttatctgacttattgcctaattaaattaagatttcagcaaaaatcagagataattttttgaatatcttggcgatatatgtggggggatgtactacttttatttttaaaactctgtgaaagtacctcctgctgaccaggcagaattctaaataatttacaaatattaattcagataatcatactgacaactctattcagggtctactagtgggatgcccagtttgcaaatgaggaagttaagtagcttatattcaaggtcagaccacaaagtggcagaataggattcaaaatgacgccagagtctatgttactgtttgaaaagaatattcagccatatctgagcaggttttatttattaattagaggtcaaagccatggaaaagattagccccgccccaagtcttggtagcttagtggcaggtcatctagggccctggagtctccctttcagctgtccctctgtgtgatattttggagctggggtcatgccttacctgcctcctcctggggccctatctgctgaatactatgacagcgggcaataaagggaagttagcatcaaaaggcagcccttctctttatgtaacatagaaatgaccctttctttatttttgactgaccacagctaccttagtattaggttagccttggttacagactgggttttggttttggtgataagtatgacttttgtaattctttgaaacctctgcaatgcctctcaattgccctatgaacaatgtaaatttgggagtataactaaatgcagatcttcacagattggagtttgaacttgcctcttcagcaagggactgggacggctctttattactacgggatgtttttctcatcttctagagcttaagtaaaaaaaatctagtttctctttgggtagtgaggatgaactgtagatacttcttcacaagctcaaggaaaacacattagactttcctagtcataaatgaagtctcattatgctacaggagaaaacagagttttaaaagtaactatactatctaactcttttttagttttatcactgaatcttgaataatagaacataagcagttgttcggatttaaattattcttccctcttgaattactgttcaacaccctaagatcaccatacgtattatttcagaaaatgaagagccttaaaaattgtctcagaaattttatttccttatattataattgaaatttggtaacttccctcaagattaatagaaaagttgttctaaaatcaacaaaacatgttcacttaatttttttcccccacactgtgggtaggagctaatatttactgagggtccagcacatgccaggcattttactttacttaagcccatgctcagtatatgtggtgaatattgcttctttttattttattggcaaagaaatgaaatctcagaggcattagacaaattacccaagcctacccaggccctaagaggagtccaaactggggttattctggcctaaaaataatgtgctttgcccatcacaataccacaaactttttaaaatcttgatcatttccacatttcaattaatcatcagcatcaatgacgcactttaaaagaggaggagtattttttaaagagagacctatttactcttttggtcggaggcgtagaaattatgctaaatactatgcataacttactttggcaagtgcaatggttaaaactaagtactagtgtgcttaaatacttccttattcaacaattataatgcagattaaagcccaagtgtgaaatgtgaacctttgtaccctgagcccacaagggtcatcccctccttgtggacccaatgcacaaagtacagttgcctgcacctccgagtcctcttatgaatggctgggagggattacacaggaatcagcaggtgagaggcatcaaaggttacagctcacagtgcccttgaccctcagtcgaaggcggagactcagagtagctgtcaacagaatagaaaccattgtatgagagaattgcttaaaatacttcagttgctctctgtgcatagcagaggcactgtttgtggtttgggaagctatagtgacagttagaggctgttgtagcaatccatgagtgtatgtactcatgtatatctgtaatgtggtgtgctttcttatcttcaagagcatagttaaaacagttggattatgttgataaaatagaccctataaggaaagtgcaagttttgacatttcctcattttgtagtttgtgttcagttggcaatgtgagtattaatagtgaacaatgttaatgcctgcatgtgaggtgaacctgccagttaaaagatgataaattatggatttattattctttttctcaatctcttgacagctgtgagcaaggctgttccaaattaccaccaaatggtagaaagtttattacttccctggccaaataaaatacaaatacaatttcaccctgcaaaaatattattaagctaatgttgcaaaagccttattaatcttattatagttaacagtgcatagtactaaaaagacaacttgggaaattcaagacaacttgatttttagaacctaacagtatctagaaaatcacatattaaatgtctaataaatatttgtgaactaaatatacatgaagacactattaacatctttccaagggaaaagtacctggctaataacttttaataagttaagtgctcctaattaggagttggcatttatagtagggagatgctttgtgatttcacatatgtggagactgagagacagatattttattgtaaaataaaggatgtattgtgaaacaaaggagatggtcagagtagggtgggtaaagaagataaattaggaggagaaaataaagtttattactttaaattcttttgtaatgtctttaatagagacacattttaagaagaattttgttcacggctacgaaagacattcataaatgagtcagagaagaaaaaatagaaaaggtagtgaattatgaaaatgggcaaagtgagaggaataaaaattatataagaaaggtaaaagaaaaatgtctagaagaagaaaagtatttgtaaaatagttgtaaatcttctgccctttcttcaatcttgaggatcctttggtttcatattctctgcttttttagacaggatgtacatttatagactgtttacttagtaactgaaacctttgcttttttcctctttgaacaaatcatgaaatgtaaagttagaagggagaagtttgttttagctacttaaaaatgtaaacctcatctgggggcagagtagagattcaaaatattctttaataacctaaactgaaaaaactttaaaacatttaggcttttcttattggctattaagatttcttagaacttactctgtaaaatattttgtgatattaatgacatttgagtgaaagccacttctagtaccattaatggcatttttatgtataatttagaattctttctatatagaaaagtctaaggaaatcatgaatatgttcccggaattggaaaatcgtctgtctgcttgaaaactgtctctggcagcactgtagcagaggggtaaagtggtctgggctggagtcccagctctgccccttactgtccaggtaaacttgggcaaagtcatttctcctctgagaaggtactctctttgaagatactatctcatttggttgaactatagaataaatttacagatgcaaagaactcagaagaatgacataaaagaggtatttaataaatgttattctgacacattatccaatatagaaacaagtaaacatcacttcaaaacataaaaacagaaagccatttaaaaaacaaataaata

SEQ ID NO: 1880700 - DNA, 4001 bp, Homo sapiens
actatttttgaattcttttttttttctttttttgagacagagtcttgctttgtcacccaggatggagtgccatggcacaatcttggatcactgcagcctccgcctcctgggttcaagtgattctcctccctcagcctcatgagtatctgggactataggcatgtgccaccacacctagctattttttgtatttttagtagagacagggtttcaccatgttggccaggatggtttcgatctcctgacttcatgatccacccacctcggcctcccaaagcgcagggattgcaggtgtgagccactgcgcccagccactatttgaattcgttatagcttatagatgtttccctacatttcctgcattactatcttttatatttagttgtctattttattttctttagtgatttgcttaaatttctttctcatttccttgtatatagctattttcttggtggttaccatagggattatattttagatcctgcatatataacattctaatttaaatttgtaccaccataactgcaataatatataaaaactcggctccttcaaaagctccattcccccaccctctcaatttttgatgtcacaaaattatatctttatgtattatacaaaaatataaacatgtaagtattttaaattcattagtctcttaaattatgtacaaaacaaaattggagttacaaagcataatatgaacttttatacaaatttaaatatatatatattaacctcttaaagcatgtagaacacgaaaagtgcagttaaaaagtattgttacaataatataagcttttataattttctatgtattttcctttattaagatctttatttctttacacaacttcaagttactgtctagtgtcttctcatttcactctgcaggaggatttcttgcaagtcaggtccaatggtaacaagctctcccaactgttgttttcctggggatgtcttaatttcgccctcactttaaggacagtttggctggatataagattcttgtttgataatgttttctgtttttgtttttctttagcacttcgaatgtcagcccactgccttctggcctgcaacgtttctggtgagaaatatactgataatcttactgattattccttataagtaatatattgatgtttttctgctgcttttaagattctatctttgtctccaccttttaaagctttgattataatgtatttcagtttatgtctttttgagttcatcttccttgaattctgttggatttcttgaatgtttatattaatgtcttttatcagatttggaaaggttctatccgttgtttcttcaagttttctcttctctttctcctctcctcctgtgactccttgattgtgtcacacaggtcccttagactctgtttacttttttcaattctttttccttctgttccttgatttccattgtcctatcttcaagtttactgactgtttcctttgcttgctcaaatcttcctttgaatcgctctagtaaattttttatttaagttgttgtacttttcagctcccaattttttttaacttcttgtgaggtttcctatccattgaatttttttcattttgttcatatatcattttcttgactttctctatatcttcctgtagttctttgatcatttaacacaattattttaaagtccctctgtagcagatccaccatcaagtcattttagggatttcatattttcctttggacaagacatagtttcttaattttttgtatgaattgtgattttggatctaataacatagtaactctaaaaattagattctccctcttactgagagtttgcggttacttcagtcaatgattttgctttttatattgtcataagaggattctgttgtaggctatctctgtgccaagaatcagtctgaagtgtaaacttaaagactgtcttttctaagcctgtgccaaaggaaaggcaaggcacaggcttagaaaagacagtccttaagtttacacttagtaacttagtcattttctgattgtcaccatatgtgcagttactttgaatgccctactttttaatgtctagctgtcaaagggggaaaaacagaaaaataaagtaggagaagggcactggcccttttaatcttctggaagtcacttcagccagcagggaggggcttgcaataatggatagaggtgcaacaataaccactcacctctttgcgtccatctttgtgaccagaaacagcaatcagcaatcagagcaaagattgccgatatttggatgacaggtcctttttttgcccactctggttcctgcatgctctgtgcagactgctccagtaacatgtgcacagctgcctgctacaggggtgactgtgggaaatgggtagctactactgtggttaagtgctgaaattgactgaaattaatcataattcgccatgcaagctttcccctagaagttgcaagcctttagtagatgtcaaaaatccaaaatagttatatatcagacagattctgccagtacaattgttctctaggtgggaagacagattcctggtgcttcctactccaccatatttctataactatttctccataatgttttaactactgtaattttgtaatatcctttgaagtcaggaagtgcaggacctccagcttgttctttagattgtttgggctctttttggttctctgcggttgcatatgaattttagaattgctttttctatttcagaaaaaaaaaacagctatgggtattttgatatggatggtatttaacctgtggatagctttaagtagtatggacaacaatattaagtcatctaattcatgaatatatatgtctatttattaccatctttattttctttagaaatgtttgtagttttcagagaacaagtctttagtctcctgttaagtttatatttctatgtatttttgatgctattttaacccaatttttaaaaatttccgtttcagatttatgttagtatatgaaatcacaactgatatttgcatattgattttgtgtcctgcaactttgctgaatacatttattaattctagtaagcttttttatgtggaatatttaggattttttacattccatttctttattccctctttgctctataaagacaacaccataagggtttcatatgctaaacattcaaaaacacttctttaaaaaagctatctactatcaactgcctcaaagccatcattgagatattagctgaatataacagttattacatcatttaatttcagtgtcaaagctttactttcttcatataaaaaaaaactatttgagtgtctttttaaataaatacacatgcatacccacacatatcctaggccgttaaattttaattggcctggtatacattagccatttagggggttcccgctcccagagatcccatattaacatgtttggaaaagtctggtatttgcatctttgtaatgcagtggctatagacaagcaaaagttaaagtctacagctacaaatccaaacctatggtacaccaaagatgtataagcaaaggccttgctcaattagtctaaagatttatctgggcatagatttttattttctgtcacctaggctggagtgcagtggtgtgatctcagctcactgcatgcaacctctgcctcctaggttcaagcaattctcctgcctcagccttccgaatagctgggactacaggaggatgccaccacacctggctaatttttatttatttatttatttttttgagacggggttttaccacgttggccaggctggtcttgaactcctgacctcaggtgatccacctgcctcggcctcccaaagtgctaggattacatgcatgagccatcgtgcctggcccatagacttttttcttttttttaacacctattggattgctaaaattacttatgtttaaatattttaactcctctgtggaaggacactactttgatttgttatgttcactctgactgatatctgaggctggcc

SEQ ID NO: 1880701 - DNA, 4001 bp, Homo sapiens
tcactgggtaactacctacatttcctttgaattggcagttgggagcactggtatcacttcctctaccaaactgtacagaactactgttatgtaccaaagaccataaatcacagagttgctgggattgtgaaaaaaatattgagactggctgtctcatcttacaaataaggaaaccaaagtccaagtggggcaagtactacctgtaatgacatatccaaaatgagagcacaggtccactgaatcgtccttagtactctatccaatgctccactatctgcccataatatcccacaggttactatgtgtcgacacaaagatagactaggattgacctgaacaaacagccacagttatgttaaacaagcaccgtttccacctctcataagctgtgtctgatttgccataaatctcaagccaaatacgtccagtgagttgtacatttatcatgttaagatgaaggctctactggtgatagatttactaaaaatattccaatcttgtaatctaaaggacttcagcctcaggtgatatggggccagcagccaacattggaaagaccacatcatgaagtgaggctataccgccctctagggagagatgcttgaaaaaccagggtcgacgcctaagtaagggggtcacagattaggtttaagtggttaaaattttatgtcttcacaaaaagtttccaactacagaagagtatttaatttttcgctaagatgtaatattctacctaccaagaaaatcaatcactgaatcaaaatattaaaaaataggtgatattaagttctataacagtaaaaccttaagaagggaagctctctgaacattaaaatactcagccgaatttctaaattagtaagacttcaaaaaagaagaccataatatccactatgtccacttattagcttcaatcaaataagagattacttttgcaattattcttcatgcaaaaagatctgttaatctccctgagtgtctccctacaaatctcatttcacctgggtggctcttggcaaggttagcagaatgtcgtctgcagagaagaaatgcagaaatgcagttgaagggaacaatgacaaaggcaagccctaaggcaaaaaaaaaaaaagaaagaaaaaagaaaacaacaacaaaaacatgaaaactgtattcagagtttgcttacaaagagaaaactctccaaagcaatgaactgaaactggccactggaaagacttgtttatagatgttcattttgactcaatagtacgctggagtcctactctttatttaatgatatggtcaagtcatgcaggctgatgtggatgtgatcagagagactaacaagagtctttgtgttgccctcctgcatagttgagggattagatttctttaagagttgtactggttaaccgttaactgagtaacaaactgccccaaacactcaggggcatagaaaaaaatgcagccattttttcatgtggctaaggagcctaaaggttgtctgggcagttcttctggcattggctggggctttactcatgcatctgcagtcagctgcaggtccactaggcagttctgagggtgtgtggggccttggctagaataaccaggtagattcagctcttttccttaaatctcatctgccagcaaccaagccaggcattttcctatggcaatggcagaggatcaagagaggaagaagaggcagtcaagaaccttttaagccttgctgtgtttagtttattagtgtctcatgggccaaagcaaattttaacaagaagcctaaactcagtgtgggagggcacccccaaagggcctggatagagagaagtatgaagaactggggaggtgaatgcaattaatttgccaggccaggggacagaatcttatattgtcccctagacaacctagaggaaaatataaaattctgtctcctggcctggtaaactgataccttagaggcatttgctttgtgtgtatcttagataaaatgcctccaaggtatcagtcactggtaccctagctgacatcagtttcttttagaagagcagactttgagaaagggaagggacactgggaaagggaacgtaagatcagttcaggcacttcatcttttgattcaaataagacagttcatacaattttgggggttaacattattacagaatgaattagagttgggaatatagattaaaagttgaaaaagaaatacagaaaagcaaatcaaaattttttttcaaagacagacatcaactaatgcagaatgagaaacaagataaatcctgcaaaacttttccaaggaagcattcagcctctatcaaatgggtcagctaagaagctaaacggcacagcaaggacatactgatcccatcatcttcatggttctaaatcaaaccaaacgtaggtaaaaggcctgatatcttctcagctgatgagtcaaatacttcgaagggaaaatatagtaaaatatttcaaggtttggaagacagcttggctgtgacacattctgactcacaacaagtcatgagttttctgacaaagcaaaagtagtgatggaaaatattgatatgatatctatcatagcatatgtatatagtcaaagttctttcacagcaagcaagtgttgccaaatgatcagttcaaagaagatttcacgccaatgaagatgattacaaaaaggaaaaagaggcaatgtcgcagtagttgccagaaaggacttacggcttttcaggtaggtagataagtcacaggtacaaagaaaaaatgagatagaagcacatatttgccacacaaataaacctgctagaagtattcatgctggaagtttcagcttcctaaagtgactctttccatagccagagagaaaagaggttgcaagatcaagttactttaaagaagaaatgaaattcaaattaaattaactcttagagtgttgaatattgacatcaatgccaccagccaatgtgaaggtaaagagaggcctgcagttatgacttcaggacatacatggctttcttataaaatgtttatgttggcagttttactgcaaataataccttcgaaactgaaatgcatctatttaatcctgatttttaaacagtaaagactctgaactttagcaaagaaaatcaaccaagtcaagtccagagttgggtgcagttgaatgaaaggaagacgttggggcttgcagggacatctggcttccagcagggaggccacgtcaatatgcaaattgccacaggcattataaaatggcacccaaaatgttaggctctgcaagaacggtctagctgcccttagctacagcgtaagccgaagtacccagagtcaaaacgacctgagctgctctgtgggacatgccccaacgagaacatcatcagggcaagctcaatgcacatacgcaactgaattaaaaacgagctcacatgtactgtcgggaagaagaaaaataagccttctaaattcattcagcagagagtaggacttgaaaatggctttgcccaatattattattatcaataataattcagtattatgcatatcatgtctccagatttctcagaatgaggccccactcattcagaatttgaaatccataagcagggtgaaaatatttcctctggctatgctaagggaaacttgaggcccagacacttagacttgccatcagttccactgagttggtagcttaacggctctttgctcagaggttttaacctctgctctggaccagactgaaatgaacagtaatcgcatatgctcctttcacacgaaccaaaagctgaacgtaccctgaattacctctttgttaaataaggaggtttaaaaagcatttgcaggcatgcatgtcaattagggacaatacatcaatcatccagagcatgcttccaagttcattttatttcagtaataattttgtactaaattccatccgcctctactttactttcaaaataggatgaagacaattcccaaattctttaatatacttgtatagtgcttgctttttcagtttt

SEQ ID NO: 1880702 - DNA, 4001 bp, Homo sapiens
cagaaacgcgtctcatggcatcgtaagaagactgggggctggggtgtcgagacacatggccaggccgggtttcgtttaataaattcgctgaagagtttcggctttggatttcctctttgatctgtttgagaggaggaattatggcttcaatgctttgatttttaatcagcaaatcatctgctttaggggacgagggcagccagccccacccagaggctgcaggccacctgcccttcggcccccgcagaggggctatggccatgctcttgtggccgtggcccagcgggctctggttatctgacatgctccaaacatgtatgtgtacacatgtgcacaggctgcatgtgctcctgaagcgttctcccacgtccaggtctgagcgtttggctttgatcaagagccacagtcccgccactgcacccacatcactcaccccaggagggaatgcctggtggatgagggtaatcaccaccctcagccaggccaggccggtgctgattagagagcccggaaccacgcgccgctaattagtggccccgatcatgggctggcgaggccgtaacttcccaaagcctcggttcatcccatctgatggaaacagtgacaggggcttcgaggcagctgtgcggactgaggaggaagctgaggatgtggtggccgcggtgctccgggccgggtgctgtggggcgttgggcacagtggaagctctttgccctctgtctggtcactttgctggccactaggctgcacggcctggtggactgtgggaggccccaggggagcacagccaccgagggctgcctcaggtctcctgggtgagccacaccctccccacgcaaggacctgagagacgggcccctccttggccgcctgtgccgacaggagtggggagggccatacactgtggacgctggggccttgagggcatcaccagggctaggaccaaggccacaggatgcttgggcctcgggaggctctccaggatcctcggggactccagggtgggggaggcggccaggcctttgtgtgcgccaggttttcatctccttgtgagttgctgaggcacagcaggagcactgctgggcagtccctcctcccatcctgacagcatggcccctaacgctgatcctgagaggacacacacatcctgggctccctcatccaactctgaactcaactgtgcccccagcaacttccctttacagttccaaggagcaccgcctgccagagaagcggcatggggcacatctcagctcttggtgggaccaggacctgcccctggaggtggcctgcaggtccctaggcacccgcatcccagagagggagcctcgtgtgccctaggcccttcctgggcaaagagtgcccgaggtgcctgggtctgagctcccgctgcctgctctgggctctctggggcctcccaaatggactggttcccagtacggtcagaaccttggtcattagtaaaaaggtgcccttccttatctcgttattaaaaaggggacctgacacgcggaacacagcggatcatggacatgagcagaaccggctcctcagtcatatgcagaaccacttacatctggcggagaggttgtagcccccaagaggggtggggtggccctccacggcatcgaagcctgatgacaccagcaccacatccggggcaaactcgctggcgatcggcatgaccaccgttctgcaaaggacaggagaaggcgttactgggtcagctgaaagagggacgggacggtcacaaaaccccaaggttccctctggcattgataatgcctgccccgcaccccctcggccactggcgggctgagggctccacacagcaggctggaatctggcgaccacgcttaattagaagggaatcaacccacgtgtgatccaggctcatttcacatcttcacagtgcaagccagcaagccccacgacacttgcttggtgagagggagtcacggtgcaagccagcaagccccactgcacttgcttggtgagagggagtcacggtgcaagccagcaagccccactgcacttgcttggtgagagggagtcacggtgcaagccagcaagccccactgcacttgcttggtgagagggagtcacggtgcaagccagcaagccccactgcacttgcttggtgagagggagtcacggtgcaagccagcaagccccactgcacttgcttggtgagagggagtcacggtgcaagccagcaagccccactgcacttgcttggtgagagggagtcacggtgcaagccagcaagccccactgcacttgcttggtgagagggagtcacggtgcaagccagcaagccccactgcacttgcttggtgagagggagtcacggtgcaagccagcaagccccactgcacttgcttggtgagagggagtcacggtgcaagccagcaagccccactgcacttgctgggtgagagggagtcacggtgcaagccagcaagccccacgacacttgcttagtgagagtgagtcacggtgcaagccagcaagccccacgacacttgcttagtgagagtgagtcacggtgcaagccagcaagccccacgacacttgcttggtgagagggagtcacggtgcaagccagcaagccccactgcacttgcttggtgagagtgagtcacagtgcaagccagcaagccccactgcacttgcttggtgagagtgagtcacagtgcaagccagcaagccccactgcacttgcttggtgagagtgagtcacggtgcaagccagcaagccccactgcacttgcttggtgagagtgagtcacggtgcaagccagcaagccccactgcacttgcttggtgagagggagtcacagtgcaagccagcaagccccactgcacttgcttggtgagagggagtcacggtgcaagccagcaagccccactgcacttgcttagtgagagtgagagcattgctgtttcttggtatgctgttttctgtataatttctgtaacccccatgggacaagctgcattaacctgggggagtgaagccagctccctgtcccactaacacccctccttggccccgtgcccacccaccctggccctgtcccgtcctctctgtcctggtcctccctgcccatcctctcttctgagactgggtcagctccactcgccccatcaggctgctcttgctgcgacaatgcactttccacagctcccactgaagacacgtgcagtcacccactgcccctagtgctgggactgagtgtggccgagagggcggagagcccttgccagccctgctgggggagcccacgtgttccttactcaccctggaacaccaacacacacaggtgtaagggaattacaacacaagacacttaagaatctttaaagggaaaactgatgacaaatgtaagagaattcactggaaaagacagaaccactgagaaattctttaaattatattagggaaataaggaaagtattctatttggaaaggggaaaaagcactccttaacacaaaagaacttatcagtctttagtctaatgatcttatcagtgtgtgctatgaatccatgcgtatgctatgaatccatatgtgtgctctccgtgagtagggaagttcagcagtttcatgtctcctttaggctgccgccttcgatcctgagttaatcaccaccactgactttcaaagtctccttcactccctctgtgggtgaggggagcagaatcagggcctccctttcctggcggacagcaaggacctcatgagacaggtggtctggtgtcttcctgcaatgacggcccaggtgcaaggggcctgtgcaggtgaggacggtggaacagaagtggagcctttaaaaaggggcttcaaaaagttcgtggaaaaattgaattaaaagataaaaaatataaactttatttctcaagctccatcaagtccaagacacttttgcaatggtgaccgcagccatttagtccctcccgaaaggactgagtgtcctgggaatctaaccatgtcaatg

SEQ ID NO: 1880703 - DNA, 4001 bp, Homo sapiens
gcacatttttagacacgccaggaccccattcgccagggtcggctgacggaagctgtacaatgacttgtagcaggtttggggctttacttctccgcatctttgagaccgtttccagaaacctaagcttcccacatccaagagcccagctcctctgtccacacgctgctgtccgctcggggacggcaaaggagcaacctgagctgcgctggccaaggcggctctgcttacccagtccacgatgaggatcttgctcacgctcaacctctgctgcagaagcttggctgccacggccacggagttgaagtagcaaaagcccctgcgggagagaactgacgctggagacgaagcgcaggtgggcggtggccagtttctccacggcccgccagagagccactcggggtccacgcagacctaagaggtctctgtgagtgcagagctcctgaatacgtcgcagggaaccctcagtgatgccggagaatcggttaacagacagacacgtacacaccccacatgcagacacactcacacgcgtgcgcgcgcacacacacacacacacacacacagctcccaaacaagccactggggaatcttagccaatgccatagggtcggctaaccgacacggacatgcacacaccccacacagacacacacaccacagacagagacacacacacaccccccacagacacacacaccacagacagagacacacgtacaccccacacagacacacacaccacagagacacaccctcccacacagacacacacaccatgcaacacgccctacacacatacatgccccacagatacgcccatacaccacagacacacaccccacacacactccacacagacacacaccccacacacaccccacaccccacagatagagacacacacaccatgcaaacgccctacacacatatatgccccacagatacgcccatacccaccccccccacgtagacacacatgcacagatacacatgaacaccccatacagaaacactcacacacacacaaaccacagacacatacaagcacacacacacatatacacataagcatatacctatcacacacatccacagttccatactgagacagacagacacacacacacacacacacacacacacacactctcctgcttggaggtcccccacgctcctctggtagggaaccctatttcacatgttaccaacatttccctcatcttcacctggaacccttcctctcaggagctgccgccacgccccaggagacatggcagccgttcatctcagttgcttcctgctgaccttcctatattccaatacataaattacctttaattttagagagtcttactcaagagaccaagaaaacaagctatgaaagtgattcaaataacaacgaaaaccttcttgatctcaaattccctttgtccgaatgaccacagaaacggagaaacactagttgttttgttttcagaatccgggctggcatggggaagcccacacgccccaggacatcctagacgctgagctcctgcagcggctcacggggagcacagcgaagagctgcaacaaaacacaattcgtttgtctcctctgaggtttattatttggaatatccaacaactcaggttcaaattagaaaagaaacttcagagaaatgaaacaaacaggaagcctggtgcccaagtgactgttctgggatgtggagcaaacacgtggttttcaggtaaagctacaaagattccaacaagcatccctccctggcggttacaatctcctccctgtacacgaaggacactctgctctaacacgcggatctgactatctctcacgtacaatctcctccctgtacatgaaggagactctgctctaacacgcggatctgactatctctcacgtacaatctcctccctgtacacgaaggagactctgctctaacatgcggatctgactatctctcacgtacagtctcctccctgtacacgaaggagactctgctctaacacgcggatctgactatctcgcacgtacagtctcttccctgtacacgaaggagactctgctctaacacgcggatctgactatctctcacgtacagtctcctccctgcacatgaaggagactctgctctaacacgcggatctgactatctcgcacgtagtctcttccctgtacacgaaggagactctgctctaacacgcggatctgactatctcgcacgtacagtctcttccctgtacacgaaggagactctgctctaacacgcggatctgactatctctcacgtacagtctcctccctgcacatgaaggagactctgctctaacacgcggatctgactatctcgcacgtagtctcttccctgtacacgaaggagactctgctctaacacgcggatctgactatctcgcacgtacagtctcctccctgtacatgaaggagaatctgctctaacacgcggatctgactatctctcacgtacagtctcctccccgtacatgaaggagaatctgctctaacacgcggatctgactgtctctcacgtacaatctcttccctgcacacgaaggagactctgctctaacatgtggatctgactatctctcacgtacagtctcctccctgtacgtgaaggagattctgctctaacacgcggatctgactatctctcacgtcctgccggcccctccgtggacgcctgacttcccaggggtgacagggaggccctttcccgggcccctgcggttctgtcttgttctgactgcttcctggccacagcctgatagtgaacttgtatctgcacttgttcttgcgttgccatctgacaaactgctgctccaactctccaaggcagagccctatgccacctcctcctcaccgaagctggcaagatcaggcacgccttctccatctccagagcatggggagacgctctttctagcaccacccctcctcactagagcggctaccgtcccaggagacagcatgctctttgacgggatagatcattcattcaccacccaggctgcaaggcactccacagacagctgcgggtctgtcctgccactggctctggacacacagggatggatccgggaggacccacaccccacactcgccaccctgcccagatcctcagctgtatggaccgtcggcagtctctgaaagacccgaaacagcatcaggatagctgcctgcatggacgtggctctgtggcttgctgcgtcagtaccaggcattcggcaggcagctaaaaggccatgcgcaaaatgacctgagtcctctagacaagcaagtgctgcagtgactcacttgagggtgagtggtgtttcctctcccaagtgttgacaactactcaacaaccagaggcttctctggactaacctccacagaccctttcccatcctttcctctgatctgtctccgtcataaccgagcagtgatgctcgcagactttggcatctgcactccacacccaggagctggagccaagccggcatgcggcacatcctgggtggccagcaaacagcagcccagctccccgcagtcactcacacacccacccagccctaagggagggaaggaagacctgggttcccctgctgtgcggggctgcggcgtgtactcacatgggcgtgctctcctccgcatggtgtccaggggggcggaccacagcaaagccattctgcaggtgacaccagacagccaggagagagcaacaaaagacacactttgtagccacgggaaaatggttgcacactcaacttttagcagagttgggctacacaggaggacagtttcttgctgcaccctggccacagtgatggggacaggatgcagggccagctgggagcctttccgggaagcctgggcccttctcctaaagaggtctgggggctactaatggttcccccgaaacgcagtcactaggataacaggtgggtgcctgcccactctcagaactgtcggtgaggcgtggtgcccttggctcaggggtc

SEQ ID NO: 1880704 - DNA, 4001 bp, Homo sapiens
gcctcccgggttcacgccattttcctgcctcagcctcccgagtagctgggactacgggcgcccgccaccgcgcccagctaactttttgtatttttagtagagacggggtttcaccgtgttagccagaatggtctcgatctcctgacctcgtgatccgcccgcctcggcctcccaaagtgctagaattacaggcgtgagccacagcgcccggcccatacatttaaactcaaaactgtgatgaagaacaatctaaaagttctgaatgtcaaacttacagaaactcactgctttcaagcaaattaatttaaaacaggcattcctaagccaaaccagcatttcccaaaaaaactgaggaaaaaaaaaagccgatcaaatagctttctataacccatgtttgttatatgctgcaaaaatctgcaatttacaactcaattttaagagtcacaactaactggcaagttggacttacattaggaatggtatgtattgtctgactataagaacggagtacagcaaaacaaaaattgagatttttaagaattaagatgtcttgaaattgttttatactttagtcaagactttttaacacattgcatgaactgtcatttaatgcatgcattaaggtttccttcacccgaagttcttaaataaggggctcacatttacattctaatgtcttcctgtgtctcctagaggtagagatgttaaaccgtttaatgtgaagagattgtcacatgctagaaaaaaacgttaatagcctaaagcattaattcatgtaatctcatcttttcaagtcttggataaatgtattcgattgacaataacgaaatcgacaaaaatatttaggatccacattaaatgtactgcaaaaacgtgaaaatttcaactctggttgcagtcctctaaataaaattccaggaaactacaaccagagccgactcaaagaatgggaaaacatgaagataaaaaacatttctaaattcttccttaacatactatactcaaattcttctccacccaccctcctcagcggccggagccgggaaggagctggctgggttgtttttcacatctacactcaaattctcaaaaattaagtccttcgcccacatggcggtttaagaagtgtaatgtaagtactttagcaaaaatatatcaggaagtattttaaagcagcaaagtttttaacaatctcgtatttccaacaggatgctgcgaaaaaaagaaaaggccaattatcgacttctcgcggagaggacccgtaaaaggcctagaaaagcgtcggcagaacttcagcgaaagcactacctccccatgcttcgaggccatttgcggctttttctgccgggccgcctccgccctcttccctccaatcccaggctcgctttcccggcggcagagcgaggcggcggccattgcgggccaatgcgccatttcgtaacgcggcggcggatcaatgtcaatgtggccgccgcccgcttgctcgctcgcccggatgtgcctgctcgtcccctcccctcccccaccacctcctcccaaccgctcccgccggggcccgccatgccgccctcggcctcgcttcggaggccgcgcagccggcaggccggcttccctcccgaggcctccccgaccaagccgcgcctccaaggggccgcctgtgcagccgaaggtgaaggcgaggcgggcgaggggccccaaggaggtctccaactctcgctcccctccccctcccacagcctgtctcaacgcaagagcgcgggacggccgacccggtccacccggcctccccgctcccaccgaaccaggcccccaacgccggccattccccaccaaccccccgctctccccctaatacctcctccccccggcggcgacggcgacggccggagtcgggctgggggcgaccgggcggcggttttacctccattttgagaccggactcgcctcttccaactcgagttcaatatgggaccgagaggaagaggcggggccagtcgtcacgtgacgcgttttccgcgcgccgccagtctgttgggggaggagcgaattgggaagggggcggagccaagcgggcgcgaagagggactggaccagcgggttggcgggcggagggcggaggcgcggcgtgccgcgggagcgcgcgcgcctcgccagctttcaggggaagagggcctttgccgccgttcgcgtcagggcgagttccgggacgtcagtgcggtctccgccaatggtgagcgtccacgtagagggaacgccttgtgatcgcgcgtcaccagagagaaaggcctttccctttcttctcgcgcttgtccctcattccccacgcaggcctctagttctccatttcagaattcattctattcctgtgcccgaaataaaacccacgtttttcttgcttgtaatttaaaggttgcaagaaaaactcctcggcccctcggaccatctttcctgtttccaaatgccggggaccagtgtctgtgactgcgccgcctgcctgagggcatgtactgaaaagccctgcgactccaacatgtgggactcacaagcaccttggacaggcctcaaaacgcggctgacatacagaatttttaccattaacgacctgaggcaggactggtggaggtcagttcattagttactgatctcaagaaacaagtcaggactattttctaatgtgcttctttcaagttagtgtggaaagagctgatgcatctgttgtagctgacggaatttaaggaactgaataattgacaagatttccagaaaagcagggtcgccagataatgctacctgtttgcgaatgattgttaccgtaatgctctagagagctaatcctttctcggcctagtcagatgattttaaatcatttgattttacagagctttagtttcagttttttaaatgaaaatggggatgggattaggtcatcttctaacacccacgacagccataaattgataatctatggatccatatttaaagttactgataaaaataaccacaattgaccagcctcccttccctgttaggaaatgctttatattttaatttagcaacccatgtgaccaacccttttagaattgaactggctctccctaggaaaggttagaaatctaatcagttatagtaagtttctgttaacaaatggggagtggtcgacttggagtttggaaaaggggagcgtaaagtctaaaagtttgttaatttatctagccgttgctccaggaggacctgtgttatagtttggaaacatttacaaagggtatttttgtggggcagaaaacagttagcagtccttaatgtaatttggttgaaataaccgttcaaaccagactcctcctgttgctttgattcctttttcgcaaactttcttatgttctacgtatccaggtgctcctgatggccagcaatagacttgagacattggaagaatgtatagccttagcgtctatttagtgttaagattttgtaagtctaattactgtgaaatagtcctggtaactttatcgattctggatacaaagaaaaatgcaaagtgaaagacctttggaaattgctattcacaccagagtactctatgagacattacataggtgatcaagaagagtgatcacctggctgcactttagggtatgtttgtccaggtttttctaataagttaattctaatcaataacttttgttctaattagtaacttttgtataaatgttaatgttaaatcgcgaaacaatgtgggatgggatactaagttctctccaggaacatgaaatgtcagcccatttattcacatctttttgtcctccctattgtattggtccagatttgttgttcatcctgactgtatgctgtttttagacattagttattttttatgcttttgtctaaacaagctctggccgggcgccatggctcacacctgtaatcccaggcctttgggaggccgaggtaggcaggtcacctgaggtggagagtttgagaccagcttgaccaacacggttaaa

SEQ ID NO: 1880705 - DNA, 4001 bp, Homo sapiens; identical to SEQ ID NO: 1880704

SEQ ID NO: 1880706 - DNA, 4001 bp, Homo sapiens
accccatccccacctcctccgggaacgctcctgagtcctgtgcgggctagaacttcgaggcccgggaacccaactgggcactggaggctggccctgccggcgcggaccagccctggcctccacgctcagagccacgctgccccctgctggccagccctggaggggcggcccaggacttggcacctcaaggggtcttgcccgcaacctcgcgaaaccaccaagcatctatgtgtttggtcccaaaatcttgactggccccaggacccactgtggatgaggggcagggcgctgctgagtctggtctggtctgagggatcttcattagttgggcactatcccaatccttcttccaagcagttcacaaggtcgcgcgcggcccaggattatgcccccattcctgagaactggggcctctgagtgcgtggaagtggggctagccagtaggtttgcgggtggtgtagacggtctgcgcccaagcggcgcacgcaggttgtggtgtggtttgtgcctgaccatagcttgtactagggtcaactgcagaatcttccttggtttctttatgaagccccaggaggctgcgggccatggttgctccaaaacaaccagagtgcatgggtgaacacacacacacacagggtgcccttcctagtcccttggctctttctgggatgctatccttggggttgtctatggctgctcttccctagcccctgacatccctccacctcccagaacacatcattccacctccctgaagatcgagcctctgcagttcccggggcctcaggaagctacaaatgcggtgaaatggggaggtttgccagccacgttaatcctttttgggtcaccccacctccagcactgtgaaaacccacccagtccaaggtctgcaactgaatgtcagtatcaagtgtgcatcctcaaaataacagatttccagtgcagaattttaaattggggatggggaatggagggtgggacaggatgatgcgcagcaactccctggccctctcagaatgcccctatttgctctactgatgtttgctgttatcccggtggactcagagatcacgtctccctgcagcttgttctagtgattcatagactgtgcagaaacagtaactacaggtggaaaggccggctgggcctgtgggccatccgaccctatccaggctacaattcccaggtgatgtggttggttgatgtggttggaaactagtgccccagtttcctgctcatactcagtgtgggttgcacaaaaagtgcaattgagagggtcagaaatgttgggtgggtttccttgcctgccccaatttttcccccaatgcatctctagaaagtcccagctcttgtctcctctccagacccccatcacaataagcttcgctggtcccagtgactgtgtggcgctcagcgttgctggggctatttttcaggagaaaaagaggccgatggtgctggccaggtggagttcagctggggcccttctcaaagctgctaggcctgaagtttttgtgtacggctggggaagctatctggcctaggacagcctcttgggcagggagggcggaaggtgccagagaccctgggcacagcccggaactgccagatgctgtctccggtaagatatcaggtgcttccagggaaaagaacagcttgcaggagcttcttcctgggagagagtgtttcaggttctaccccctatttccagagtgtagttaggggttagggacccactaaaaaatgttttcccgcgtacttccttgccgcggaattcactgctcacattgtggggagggacgcaatgtgatgctctgggactccctgacgtgacctcagctcccagaacctgaggacctgatatcctaaatcccctagaatcttggtgtccccatagccggctcaaaagagtcccgtcccacctctcagagcgcgaagcctctgtgacgtcatggtctcctcccgcagacaccgtgacgtcacagaggcctcgggctggaacacaaggcttgaatgaggtccacagaggcattccattacgtaacttcgtgacgtcacagatgggccccgcctcgggctaacatatccacacctctcagccccgccccgccccgccccgcgaatcggcccaggcaggcgccacgaatcggttcgtctccactaacacgatccgcagacccgaagcgttggcagctgtcctgagtgaagggcggtgccctgcagcgtcctcttcttgaatcagtggtttagagtggtctccctgcccgcggggtttcagggcagcagttgccgcggcgtactcatcccacccacttctgcgcccactatggccgcgcccactgcggccccgccctcctctcccactgcgcaagcgccacgcgcaggcgcaaaaggaactcgcaggccagtgctgctggtgccggagtccggaagctgacggcggtgcgtggaaatcgtcgcggagttcagtgttttgcttttggggatcacaaactcaggggcacactggcccggcgggcgcatccagccgttggcgtatgtgtgggcagaaaatgcagacgagaaagtgggtggcgcttggctaatgcgggctggagcccttgacttggagtgcccagtccagcgccgcggtcctacagaggcccctgggatctgagctggcgagggtggcgcggcgggtcctacccaaggccagaaagttcgctgcggtcccagctcttttgggcagcctctctgaggtagagctctcagacggtcttcagcccggtggaacgccctggtgtcccactccacccgttcatcccgacttcctgggccgtctctagagcccagttggtagttgggcccagttggcatatgtttcagatgaaaaattcattacggacttgagatgctaggttggagacaaatctcatgtcagtggcagagaaagaattcgaagctgtgctttcattgaggggaagggccagaagacccagctctaggtttttctgacaagcacaagttttggggaagtccctgtgcttcactagcctcagttttcttcctataatgggggtagggcttttcctacctacctcattcactttgtgtagagttaaaagtaatacacattttgccaataatgtattcactgcttgaaccaaaaactaccctaatgtgttgtagaacaactttggcatgtatgaaggccttgtaaatgttgatgatgatgatgcttagaaatgcctctcagcattttgacgtagcctgcctcccaacctactgtattcccaggagataccacccccatctttattataacagaggcatcctgaaatgaaatgagagaggaagaatatcactgaactggtggacttcttgaaacccccggcaaaaagccttttttcaatgacgtagggagcaatggattaatcagttcacaaattgttatgtttggttgggatgatgtgtcatggccctatgtcagagcgctactcaccacacgtttgtggaacccagggagttaaaaaacaacctatggcgactgaggtgtggagctggggaaggagcctatgtacgtatgtggcaagtgtgactgcaaagatagggaagtgcttaaacacaggcttgcagagtgaaagcttccttgtggatttgtgttttcttatgattgattgattgaaacaagttctccctcagttgcctaggctggattgcagcggtgcgatcaggactcattgcatcctcaacctccccgactcaagcagtcctcccacctcagcctcctgagtagcaaggctacaggtgtgtgccaccacgtctggtaattttttctactttttttgtgtagagacgagctcttgctatgttgcttagactggtcttgaactcctggtctcaagtgatcctcccaccttggcctcccaaagtgctgggattacaggcgtgaggcaccatgcctgacccatttgttttctttgacttgtgttagagcatcctagtctaaagaaaaagtggcc

SEQ ID NO: 1880707 - DNA, 4001 bp, Homo sapiens
ttatcttctacatgaatccctaaatataaagaacaaacaagtaatttaacatagcaacaaataaaaattatacagggagacagcacatggtatactatctggagagcattacctgtgacactcaagctaggttgtgagtacaaaggagatttattatttaaattgtatacatttcatatgctcttttaagtgttggcagtagttccaataaaaaagttaaaatcaaagacttagtcaaagtttcctacaactccaaatgacctccatcaagtgatttttcactgctaaaagaggcaagttcaaagcatccttttcccacaaacactatgctgtcctctcctctaaattcctgctcatatgactgcacctagaatggatattttcctcttctctatccattttctaaccatccttcaggttctagctcaaggtccacttccaactaaaaggtcttctttgacaaaatccagcttccacaaatctctttgttaatggcaatatttcttatggtctgaacttctcatgaaactcatttccatattgttttgatttgctacctgaatttacaggtgcttctacactagtatagaagagtactggatttggaaccagaaaatgtggattccaatgccccagctacagatctctgacaagattcttttaccactctgagcttcagtcttttcacctatagattacctcaaatctgtaaggaccaaattggcacaagaaatgtgaattaaggccaggcgcagtggctcacaccataatcctaacactttgggaggccgaggcgggtggatcacctgaggtcaggagtttgagaccaccctggccaacatggtgaaaccccgtctctactaaaaatacaaaaattagccgggcgtggtggtgagcacctgtagtcccagctgcttgggaggctgaggtgggagaatcatttgaacccgggaggcagagactgcagtgagccgagatcgcaccactgcactccagcctgggcgacagagtgagactccgtctcaaaacaaaaaaaaagaaatgcgaattaagtaccattcaaaccacacatcagtgttcaggagatatttatggctttggctgtttggtggatttctaatctatactatagggccatagaagccagaaactgattcatacataataagagagggaatgagatgtttcctaagtacatttctagataactgaagcttatctctttaactgctacaatcatttagggtttggggtttttttactcccattttggatgaaaacctctgtagaatataaattataaattcccttcatagacataagacacaaaacatcttttaacctttcagttataattaggatcagcattatggattaaaattactctaatgaagtatatatagtgactcactaagctgatatgcaaagagttaattattgtggttttcactttatgcttgtttttgcacttcttctctttctacccccccatcaaattattaacacatatctctaataactctattccacatttacttgctacacccaattctttttcttttttctttttttgaaatggagtctcactctgtcacccaggctggagtgcagtggcgtgatcttggctcactgcaacctccgcctcccgggttcaagcaattgtcctgcctcagcctcctgagtagctgggattacaagcgtgcaccaccacacccggctaatttttgtatttttagtaagacggagtttcaccatgttgatcaggctggtcttgaactcctgacctcgtgaaccgcccgccttggccttccaaagtgctgggattacaggcatgagccactgtgcccggcctacttgctacacctaattctgagaaaccaggtaacactaggtctgttttgctgcacgagttctggatacaatttggtgattttgaacatagctatcaatcactcagctttttccaggctgagtggtggatagctacgttcaaaatcaccaaagtggctggataaatcaaagttcttactttgatttaaaccatacttcttttgtagatcatctcatactagccagaccctctatataggagctcaagattcctgaggaactcaaactgcaagctctattggcgacacactggcacagatcgataatattatcttcacaatggataataatcaccatgaagcaatgctgtgccagaaactttaataaagtatttgtaatttaaagccacccctgggagcaaaccactcctgggagccattcttaagtacagtatcaaaacttacctgcaagccgggaatggtggctcacgcctgtaaacccagcactttgggaggctgaggtgggaggatcacttaaggtcaggagtttgggaccagcctggccaacatggagaaaccccacatctagtaaaaatacaaaaattagccaagtgtggtagcacacgcctgtaatcccagctactagggaggctgaagcagaagaattgcttgaacccatggggcagaggttgcagtgagctgagatcgcgccattgtactccagcctgggtgacagagcaagactctgtctcaaaaaaaattaattaattaattagttaaaaacttacctgaaataaaattaaacagatttccagatttgctgctttgccattaaagatctttatgtacagcgctcacacctataatcctagcactttgggaggctgaggcaggcagaccacttgagcccaggagtttcagaccagcctgggcaacatggcaaaactccatctctacaaaaaaattagctggacatgttggcatgcaactgtagtcccaactacttgggaggctgaggtgggaagatcgcctgagcctgagtaggttgagggtgcagtgagctgtaatccagccactgtacaacagcctggatgactgagtgagataccatctcaaaaaaaaaaaatctttatgtaactgaggtgatacaaccaactaaacaactggtgcagctgtctgtactttcattaaaaaacacagctaacacagctccataaaatggagtgtgtatgaagaggagtttgacaaaggaacttctggaaatctgtgaaaatctgatcaatgaacaagcattcttagtacttttgtgcaaaccataaagtcatgtttctttcctactatgagttccagtttataaagacctgcttataaaaaataaataacataataataattacatacaacattttcaagaagcatacctcactgaattgctggaacaaaacagatgacaaaaagtcctgagggtgtaagtcaacagggggccccgtccagttgctctgaacaaaaagttgcaaactgctcacaccaagtagaaatatcaactgttgtctgcatataagaatggttaaagaaataaatatgaactactatcactgtataatctcaaacacactattccatttcagttttattaagaaaataatatctatcaacatttattgagactatcctagagtattaccaaaaaaaaaaatttctaaaacttaaaacaatttaggttagctaggcacagtggttcatgcctgtaattccagcactttggaaggccacggtaggaggatcatttgaacccaggagttcaaaaccagcctgagaaacatagtgagaccctgtctctacaaaaaaattaaaagttagccggcatggtggtacatcccagctactcaagaggctgatgcatgaggattgcttgcagcccaggagtttgaggctgtagtaagctttgatcatagcactgtactccagcctagatgataaagcgagaccctgtctctcttaaaaaaaaaagaaattaggtctacaatatccaatattatagccacgagccaaacatggtttaaatttgcattagttaaaattaataaaatttataattcagttccttagtcatactttccatatttcaagtgctcaatagttaagtgtggctagtggctaccatgtgggcaa

SEQ ID NO: 1880708 - DNA, 4001 bp, Homo sapiens
gatgacagcaacagatttaaaatacattgaggtttgtgcagctcatttccccctagttataccataaaactttataaacattgctttagctttgatgtttggtcacgtttgttgtgcagaagtcacgtttcagggtaggttcaccgccagacacggtcacatcaccattggctgtggatttccaagaagcaaaggagccaatctcagcaaagctcgcactggcatttttagctgcttaaatttgaagagcagttcagcaaagcttgtgctccctaaaatggaaatggggtgggaaggtcacatctctaaataaattcagccatacctctcctttcaaggaagcttcagaaacacaatcatgtttaaaacaggcatttttccctttgaaaatgactatgcaaagacaatatttaaaattatgaaattccttaatacactgtaatgtaaattgagtatcccttttccaaaatgcttctgaagagaggtgttttggattctggatttttttagattttggaatatctgcattacacctactggctttctttttttttttttttttttggagacgaagtctcactttgccaccggggctggagtgcagtggcgctctctcggctcactgcaaactccacctcctgggttcacccattctcctgcctcagccccccgagtagctgggactacaggtgcccaccaccacgcccagctaattttttttgtatttttagtagagatggggtttcaacgtgttagccaggatggtctcgatctcctgacctcgtgatccgcccgcctcggcctcccaaagtgctgggattacaggcgtgagccactgcgcccagcctcggctgagcattcttaatccaaaaatcccaaatccaaaatgctgtaatgaacatttcctctgagcatcatgttggtgctcaaaacgttttcgatttcaaacacttcagatttcagattaaggatactcaaacctgtatatgatttgatagaatttacccattctagacttcagaaagtgacctataactacatgtgaaactactaatattgtttaattttatatatatatatatatatatatatataaattctttaaatataatgtgcaaaagtgcctgtctaccttcaaatactatctaagtggtattttactggttctaatacagttgaccattgaacaaccctgtttgtccagcctggcctgaaaagaagtctatacttttaaaatgtcttccttttccttttagtagtttgactattaatgtgactaggtatggttttctttgtatttatcctgcttagggttcactgtgggttaatatttaacacaatttttcaaaattcttagcttctgtctcttcaaatattgcttctaactcattttttctctcctcttattctcttattccaaccccatgcatgtttatttttttttcacggtttccacatgtctcttgtactcttctctgtatttcctaaccattcttccctctgtgcttcagtttgtttactttctacttgtcttccagcagataagtgtcttccagttcacttcaaataatccagtactgagatcttcatttcagttactatatttttcagttctagaatttccatttaactcttttttattgaccccaggtttctggtgaaattccctatcattccttctattttcctggaaacattagacatagttattttaagttccagtatgataactccaatatctgaatcacacataagtctgtttctattatctgtttttttattattattatgtttcgtaatttttgattcaacactgaatcctgtagactaaaaattgcgggggctctgggtatgttttctttctcctatgaaggttacattttcttctgtcaggtggggagaaagcacacagatcaccttagttctgctctaggctaattgtaggtcaagtctgcttggagtgaaactgaagcagaccagatctaaaattaggctagagcaggcttagggcttggccatgtattaattcacctgaggagctgggatgctgatcagagccacttcactttaacaagcgttgaattccaccctttgtctcctcagtcctatgctgctgctgacatttttgcttacatttttggccttgtggcttctgctagatctcttgaagtcttatcccatgtatatgaaggctaaaatatcattaagtaactcaagggaaaggtatatccagagtctgagttatgatttctattgttctctcctgcctgagactgtgttcctcaagttctaggctcttgggcaatcacaaacccaacctctggctcctcagccctgcagcattgctgctttttgctggcactctacttcttgtactatgaactggcaaatgcctttgggggagaagctagggtgaatataaagctctccctgttgtacttcccttttcttattttttttttttagcttttatatttgtttttgagggcaagtgagtccaatacaagcaattccatcatggccataaccagaagtctctagatagtaaacttttatcagaggcttgcaaaacagcaaaaaactagtaatgtaattaaacttcaagtttaaatgattaaatggaacaatctttgcccttatcaaaaaatattttttttgagaatctcaaaaaaattgggtgcttagaattcatcatatcttagtattcagcttaatggataaattttttttatctgtttctatattctgaaaaatacaatcaggtgataatactattaatttttaaaactattataaaaaaattcaaacacaaaattaggtatttattagttgtaaagctttgtaatattagaaattaagattatatgtgattctaaaaaacccaactgaaaacctagaaaataaagaaaaatagctttaataaaaaaatcaattagtaaagaataatatggaatatttagtttattagtatagatcagtgtttggggctctgtgaagaagaatccatccttttctgaataaaaatgaaagttattcatatataaagttgataattttttcttttttgctccaaaacagtccctaacaatgacactgcaacattaatgaagaggaaagtcaaactaggggcagtaactactgagaaactagaacataaaggggtaggtaacagagttactgaagataagacttagatatgcaattaccttctagtcctataggtggcaggtgctgtggagctggcacagagtggtagacgaggaagcaggccagcatgctcagctgtgattcctccaagggctgcccgctgaggtaggcgtgcacacacatatcacccccgactgtgagagaaacaaatggaacggaaccaactgatgacagaactgagaggcacaagaaatatcttctattactttttcatcaagaacttattgaacgctcagcatatataaagcaggttctatagccggtattgaggctactctgacaagctagactgagtccctgtcattgtagagtttagagtgttgttgggggagacagatattacacaaataatgacacaaacaaatgcataattacaaattgtgaggagtgctataaaggtgcagtggtcactgtggttgtctccccgaaataccccttgtcacaccctaccctccaccatatattatatttgatgggactgacttcagctccagaactagatccttactagtcttggccaggggtcctcaaactttaacatgtgccagaatcacctggaaggcttgttaaaccacagatgagtgggccccactccatgcacagagcacagagattcttattcagtaggtctggggtggggccagaaaaactccatttctaacaagtgcccaggtcatgctgctccataaaccacactttgagaatcactgatcttgggtgatcaaggcaatcccattctcctgatgcagtgttagttcagagacaggcagacccaggccattttttcaataaga

SEQ ID NO: 1880709 - DNA, 4001 bp, Homo sapiens
tgatgacagcaacagatttaaaatacattgaggtttgtgcagctcatttccccctagttataccataaaactttataaacattgctttagctttgatgtttggtcacgttttttgtgcagaagtcacgtttcagggtaggttcaccgccagacacggtcacatcaccattggctgtggatttccaagaagcaaaggagccaatctcagcaaagctcgcactggcatttttagctgcttaaatttgaagagcagttcagcaaagcttgtgctccctaaaatggaaatggggtgggaaggtcacatctctaaataaattcagccatacctctcctttcaaggaagcttcagaaacacaatcatgtttaaaacaggcatttttccctttgaaaatgactatgcaaagacaatatttaaaattatgaaattccttaatacactgtaatgtaaattgagtatcccttttccaaaatgcttccgaagagagaggtgttttggattctggatttttttagattttggaatatctgcattacacctactggctgagaattctttttttttttggagacgaagtctcactttgccaccggggctggagtgcagtggcgctctctcggctcactgcaaactccacctcctgggttcacccattctcctgcctcagccccccgagtagctgggactacaggtgcccaccaccacgcccagctaattttttttgtatttttagtagagatggggtttcaacgtgttagccaggatggtctcgatctcctgacctcgtgatccgccggcctcggcctcccaaagtgctgggattacaggcatgagccactgcgcccagcctcggctgagcattcttaatccaaaaatcccaaatccaaaatgctgtaatgaacatttcctctgagcatcatgttggtgctcaaaacgttttcgatttcaaacacttcagatttcagattaaggatactcaaacctgtatatgatttgatagaatttacccattctagacttcagaaagtgacctataactacatgtgaaactactaatattgtttaattttatatatatatatatatatatatatataaattctttaaatataatgtgcaaaagtgcctgtctaccttcaaatactatctaagtggtattttactggttctaatacagttgaccattgaacaaccctgtttgtccagcctggcctgaaaagaagtctatacttttaaaatgtcttccttttccttttagtagtttgactattaatgtgactaggtatggttttctttgtatttatcctgcttagggttcactgtgggttaatatttaacaccatttttcaaaattcttagcttctgtctcttcaaatattgcttctaactcattttttctctcctcttattctcttattccaaccccatgcatgtttattttttttttcacggtttccacatgtctcttgtactcttctctgtatttcctaaccattcttccctctgtgcttcagtttgtttactttctacttgtcttccagcagataagtgtcttccagttcacttcaaataatccaatactgagatcttcatttcagttactatatttttcagttctagaatttccatttaactcttttttattgaccccaggtttctggtgaaattccctatcattccttctattttcctggaaacattagacatagttattttaagttccagtatgataactccaatatctgaatcacacataagtctgtttctattatctgtttttttattattattatgtttcataatttttgattcaacactgaatcctgtagactaaaaattgtgggggctctgggtatgttttctttctcctatgaaggttacattttcttctgtcaggtggggagaaagcacacagatcaccttagttctgctctaggctaattgtaggtcaagtctgcttggagtgaaactgaagcagaccagatctaaaattaggctagagcaggcttagggcttggccatgtattaattcacctgaggagctgggatgctgatcagagccacttcactttaacaagcgttgaattccaccctttgtctcctcagtcctatgctgctgctgacatttttgcttacatttttggccttgtggcttctgctagatctcttgaagtcttatcccatgtatatgaaggctaaaatatcattaagtaactcaagggaaaggtatatccagagtctgagttatgatttctatcgttctctcctgcctgagactgtgttcctcaagttctaggctcttgggcaatcacaaacccaacctctggctcctcagccctgcagcattgctgctttttgctggcactctacttcttgtactatgaactggcaaatgcctttgggggagaagctagggtgaatataaagctctccctgttgtacttcccttttcttattttttttttttttagcttttatatttgtttttgagggcaagtgagtccaatacaagcaattccatcatggccataaccagaagtctctagatagtaaacttttatcagaggcttgcaaaacagcaaaaaactagtaatgtaattaaacttcaagtttaaatgattaaatggaacaatctttgcccttatcagaaaatattttttttgagaatctcagaaaaattgggtgcttagaattcatcatatcttagtattcagcttaatggataaattttttttatctgtttctgtattctgaaaaatacaatcaggtgataatactattaatttttaaaactattataaaaaaattcaaacacaaaattaggtatttattagttgtaaagctttgtaatattagaaattaagattatatgtgattctaaaaaacccaactgaaaacctagaaaataaagaaaaatagctttaataaaaaaatcaattagtaaagaataatatggaatatttagtttattagtatagatcagtgtttggggctctgtgaagaagaatccatccttttctgaataaaaatgaaagttattcatatataaagttgataattttttcttttttgctccaaaacagtccctaacaatgacactgcaacattaatgaagaggaaagtcaaactaggggcagtaactactgagaaactagaacgtaaaggggtaggtaacagaggtactgaagataagacttagatatgcaattaccttctagtcctataggtggcaggtgctgtggagctggcacagagtggtagacgaggaagcaggccagcatgctcagctgtgattcctccaagggctgcccgctgaggtaggcgtgcacacacatatcacccccgactgtgagagaaacaaatggaacggaaccaactgatgacagaactgagaggcacaagaaatatcttctattactttttcatcaagaacttattgaacgctcagcatatataaagcaggttctatagccggtattgaggctactctgacaagctagactgagtccctgtcattgtagagtttagagtgttgttgggggagacagatattacacaaataatgacacaaacaaatgcataattacaaattgtgatgagtgctataaaggtgcagtggtcactgtggttgtctccccgaaataccccttgtcgcaccctaccctccaccatatattatatttgatgggactgacttcagctccagaactagatccttactagtcttggccaggggtcctcaaactttaacatgtgccagaatcacctggaaggcttgttaaaccacagatgagtgggccccactccatgcacagagcacagagattcttattcagtaggtctggggtggggccagaaaaactccatttctaacaagtgcccaggtcatgctgctccataaaccacactttgagaatcactgatcttgggtgatcaaggcaatcccattctcctgatgcagtgttagttcagagacaggcaaacccaggccattttttcaata

SEQ ID NO: 1880710 - DNA, 4001 bp, Homo sapiens; identical to SEQ ID NO: 1880708

SEQ ID NO: 1880711 - DNA, 4001 bp, Homo sapiens; identical to SEQ ID NO: 1880709

SEQ ID NO: 1880712 - DNA, 4001 bp, Homo sapiens
cagaataaatcaaccatataatgaggctgtcccaaagctaaaacaatagtggggctgtggcaatattctgttctgaacaagtaaggaaattcttcctctgtttcagtgctggttagacagcatacagatgattgttttgaacaggtgttagaaagctgtccagatcttcagagttctgaaatgttcatagtgagaataatcaaatgggccaatgtttcaaccctagaaacagttttgagaaatataatctaaattatcttcttcctatttggaaacacattaaattaacttattctctatttagaaacacattaatctttgaatctagccagtctcaccatgcttaccagttatccacagcactaggcccacaggatgccaacaggtgccagttacaagaactaggaaatgagaagtatcaggtataggtacaaaacttctttggggtcggcatgatggctcacacctgtaatcccagcactttgagaggccgaggcaggtggatcacctgaggtcaggagttggagaccagcctggccaacatggtgaaaccccatctctgctaaaaatacaaaaattagctgggtgtggtggcgcacacctgtaatcccagctacttgggaggctgaggcatgagaatagcttgaacctgggaggtggaggttgcagtgagccaagtctctagctcagtgcactgagctagatgcgctctagcctaggcgacaaagagagagattccatctcaaaaaacaaacaaacttctttgtggttggcatgatggctcacacctgtaatcccagcactttggaaggccaaggcaggaggattggttgaaaccatgaatttgaaaccagcctgagcaacatagtgaaaccccttctctacaaaaaatttttaaaattagctgggtgcagtggtatgtgcctgtagtcccaactacttgagatgctaaggctggaggatcacttgggcccagaagttcaagactgcagggagctgtgattacaccactgtactccaacctaggtggcagaataagatcctatctctaaaacaaacaaacaaaaaccttccatgcaacatagggcttaaaatcaacccagcagccatgtcagaagtgtggcaagagaatgtggcatgagtgagattgtcttaaaccaccaatggaaatgttattcaaggtgcaagtcctactaacaggaggtcacagcaatgtcgtcaaaactcatatctcggtgccctaggccagtacaggagagactttcctactacccttgattataattttgacttgtgtcaaggatttgcttagctgaagatcataaaatgccgttacattacatgtaactattatttatttaagatgaagtttgtttatgccaaggctattttttcattacatttttagaaattagaaaaatatatagaaaaagttagtagcataaataataaataactcactttaattctgactttttcagtcattaaatattttaattaataatctccaagcatggtgacccagccaggctccagcaccttcctgcagccttccccaggccaggaggcaaaggcaggtcagcagttatctgcagaaggagcagctggccccacccaggtccagaaggtgcgtggcaacccaatcaagcctcaatgccctgcctaaggctatccctggcccaggggtaagatcaagcccacacacatctttgtagcctagtttctccccctgcccatcccaaattgctgagcagcaatcccagataactaactttgcctcagggcctagcctgttgtcctgcccaactacacattctaacaacagtatttctcggccagatgtagggcatttgggtgcccttttagttaattaagcaattccttcatgttgtgggtgaatggaagacacaagggtattgctctgtgactgcctctgatcaggcaaagttgcaggctatttgggaagacagtctgcaattttgcctgatcagaggcaatcacagagctcagccagcgactcaacctgaccatagagttcagaaagtggtctcactggaacgcaaagcacagcaagcaattccacttgacctcagtgcacagaaaacagccaagcccacctagagaactcaacaccaaagtctgcttatctgggattgctaccaactagcccacctggaatcccaggctagactacatagtgaaggtctgctaccaccaaagatcacctacaaagaccaaaagaggtggctgtttcctcaactgcataggcaccaatgcaaggaacaatgattatgaaaaatcaaggaaatatgtcaccatcaaaagaaactaagaaagctatcataatgaaataggaagaagtaaagatctaagaaataactgacaaaacttcagaataatcctcttaaagtagtttaggaaactacaagaaaatatgtataaaaataaaataaattttaaaaacaattttcaaaacaaaatgaaaagtttaataatagagaaatagaaaaaaaagttttaaatagaaatccttctccctgaagtgtgggtatttgaaaaataaagaaatcctacagataaagaatataatacctgaactataatatcaacagcagatttgattaagcagaagaaagcatccgtgatgtcagagatgacatttgaaattatctagtcagaggagcaaaaagaaaaaagaatgaaaaggcttatggaaattatgggacaccttcaagattcacatattaggaattttggaagatggaagaaaaaagaagtcagaaagcatatttaagggaatatcagctgaatatttcctaaatctagggaaagatgacattcatgcataggaaactcagaagttgccaatcaaattcaacccaaaaggggtttaccaagatacatcataatcaaattgtcaaaaattcaaagacaaagaaagaatattgaaagtagcaagagatgagaaacatatcatgttcaagaaagtcccaatattgctatcagtggatttctcagcagaaacgatataggccaggagagagtgggatgatatattcagtgttgaaggaaaaaaacccaaacaaactgccaaccaagcaaagctgtccttcagaaatgagagggaaattaaactttcccagacaaacaaaagctaagggagttcatcaccacttggtctacttttaagaattgctaaaaggaattatttaaactgaaatgaatgcctgctaattaataacaaaaaatatgaaagtaaaaaattcaatggtaatagttaatacatagtcatattcataattcattaataatgtaagggtggtatataaagcaatttatcattactatgaaggttaatagacaaaactaataaaaacaatcctagctgtaattaatcattaagaaacagaaactacaacaaatgtaaaatttgacatcaaacccataaaaggtagcggggaggaaatgaaagtgtacttgttgtatataaagttaagttgttattagcttaactagcctgttatgaagtgttttatggaagcctcatagtaaccacaaaacaaaaacgtgtagtagtggcacaaaatatgaatataaaagattcaaagcatagcaccaaagaaagccatcaagacacaaaggaagatactaacagagaaataagtaacaaaaaacctacaaaacacacagaaaataagttacaaaatggcaacagcctgtgcttatctaccaataatcaccttgaatgtaaatggattaatcaaaccatttacaatatgtctccaatcaaaagacatttaaaaattcagctatatgctgccttcaagagatttactaataaggacacatatagactagaagggaaaaaacggacaaagatattccatacaaaccaaaaccaagagagagcagggatagctctacttatatcagacaaaatagactttcagtaaaaaaactataaaaagaaacaagaaagatcattgtataatgataaagag

SEQ ID NO: 1880713 - DNA, 4001 bp, Homo sapiens
atagggacagttgagggaaaattaaagaagcatcaaacaaaatactggacgttcatttaacttcctgtatggggacccatacgtaccttcccacaaagccatggacatcatcgtaactgtcatatatttcaacataatcagccaagcaacctgggtcatcttcaaggtcaaaatctaaaaaactcaggtgaatacgctgaccatacttgagtctaatgtgccagtagcagatttggttatcttcgtactcatttgggaagcctggagatttaaaaatttgctttggatctgtaaagacgccaccacactcctttgctgaaatgagaagaaaaaaaacgtaaaaaccccaaagcattaggaaaaacattatccctgttaaaaatgacatttcttagcaatctattactttttatgaaatgttaaatgtcttagtatacagcatctatggtatattatgtatgcttttagctaaagaataaatgtattttttcatcaatagttactaaattctctaaaatgaacatggactctttgtgaatttatttttatttttatattttgagacaagatctcgctctgtcacctaggctggagtgcggtgacccaatcatagcttattgcagccttgaactccttggctcaagcaatcctcccacttcagcctcctaagtagttgggatgacaggcatgtgccacccagccctggtaatttttattttttttgtgtggaaatggatcttgcaatgttgcccaggctggtattgaactcctgacctcaagtgagcctcctgcctctgcctctgaaagtgctgagattataaacatgagccactgtgcccagccatgaattttaaaaaagtaaatatagtaagaaaaaaatggctaggtgtagtgatgctcacccttagtcccagctaattgggaggctgaggcagaagaatctcatgagcctaggagtttgaggccaacctgggcaacatagtgagacctccagctctaaaaaataaaaataaaaataaattttaaaattaaaagaattgtaatgtaattaattgtacttttaaaaatatttttattttatcttttaaggcataacataacaagtcttttgtgcacacgcctattttttgttgttgttgttttttgaaatggagtctcactctgttgcccaggctggagtgcagtggcacaatctcggctcactgtagcctctgcaattgttcaagaaattcttatgcctcagccttctgagtagctgggattacaggcatgagccaccacgtctggctaatttttgtatttttagtagagatagggtcttgccatgtgggccaggttggacttgaactcctgacctctggtgatcgacccacctcagcttcccaaagtgttgggattataggtgtgagccatggcacctggcctatgtctatgtattttgacaaatatatacacatttatattacaaacagccctatcaagatggtagggactttgccctgtggtgtcaccatatgtcttcagggccacaagcacttagaataatggatcccataaattctgcttggaaaatcattatacaatttcatgatcgcaagagactttaaagtcactctaatccacttaaaaggaataatttataattattctgtatactgcctttactgattttaaactaataccctaatcctaatattttaagatttgatggagatattcatgtttgtttttccaagtcattcatcatttaacagatttcaatatgttataaattgtcataagaaaaacaaacacatataaaacaaaacaaaaacgctgtctcagaatcagtggtttgcaatatgacctagagggaaagctaggaagaagccctggttaattttaattccatatcaggtaagtgtctaatgtctagaaaaaagatgctccccagcctttctatgctcctgttctgctttgatgaaataaagcagaacaggagcatagaaaggctggggagcaacaaatgaaggtcaaggatctagttcaagcttggtgactactctacacttcattttcttcattggtaaaataaatgtagccatacctttcccattatctatcacacagggttattctaaggataaaatacagaaaataatttaaggatgttatgcaacccataagctattcttactgtataataaaatatacaacacatagtttgtatgtctgcataaggatgtacattgccagctttaggagcgagttgttccatcccatagcatccaatctttgttgtatatattaatagattagaaaaaattcaaatattgaactaatttggctgcctatttggctatatttatttagatctatattttatgttatatctagttactgcctcatctattatttagaatatcagctctaacttggtgacattgattaatcaataatgattgctttatttttgtgaagccattattttttttttttattccagtgatgtttcagtgagctgttcccccagtgctagttcaggcggtcaagtctccttcaagttaaccacatcctaaatagtcagcataccaccaaatccaaaagcgagctaaatgcactgagaattgggtaaaaacaaatctcccaggattctgtattcccagagtgtattcagcctctctgagaaaagaaagcaacttataataatttataatttaggattatattcttatgaaagggcaatgaaatactgaaaggaccatttcattggcacttcttcaatgactctagagtttaatctatggaaattatccagtggaagctcagagatcctaaagtttatcaagtgaaagaagaatcagagaatacatttgaaaagaagagttactcttaagagtaaaaaagagtggtctgcataaatatatttaagaaaatgtaagagagggagggaggaaaggaagatacatattgttgacataactaaatataggactaaattagtactgtatagtataggactaaataagcttaaagcatgtcaaagtgacttgaaagttaaagttacataaatgcactgttaagtatttattcctattttgtctcagttaagactagttgtagctgtaggcaaaaatctttctacttggactacacataattttgagatataggttagttacagacatgagaaactattctccaaatgttaatataattaaataatagattttataataatacactaaaacctcactatgtaactctcctactgtgttatggaatttcttatagggtaaatccaaatgggacacatctgaggatgtttatgatcctaaatgccaggaagactttgtaacatactgtaatattttgtaacattgtcctggtggaaatatacccaaaaagaacagcctactttttctccaagaacgtgacctaagaataattctttatagtaattatgagttaattttctcattatttcctagttgcaagcaaacatggaaaaaatatgaataaaaatatatggtataatgatagctagtatatacagtatataattgttaaaccatagaattagagttgcttagtttggaagtactagcatatatacacaaaaagaaattaaggaaagaatttatttgtttactttgtctccttttccccgttgtatcaaaaggacaattttgaatagttaccatttggtagcatcactttattgttttagctaatttactgtgacaagtttttaatctgcttttttattttctttttctttatggctgggaagttccctggcacagagaagatctgaattctcagtcccatctgcctaatcattattgactcctgatttggggttacttaattctctaagtttcaatttcctgatttctaaaataggtataacaatagctccttgaagaattattgtgaatattaagttagagtgtagacgaaggaacacaactcaatgtcgggtatagtataagcactttatgaattgtagttattagtag

SEQ ID NO: 1880714 - DNA, 4001 bp, Homo sapiens
aatattcacaataattcttcaaggagctattgttatacctattttagaaatcaggaaattgaaacttagagaattaagtaaccccaaatcaggagtcaataatgattaggcagatgggactgagaattcagatcttctctgtgccagggaacttcccagccataaagaaaaagaaaataaaaaagcagattaaaaacttgtcacagtaaattagctaaaacaataaagtgatgctaccaaatggtaactattcaaaattgtccttttgatacaacggggaaaaggagacaaagtaaacaaataaattctttccttaatttctttttgtgtatatatgctagtacttccaaactaagcaactctaattctatggtttaacaattatatactgtatatactagctatcattataccatatatttttattcatattttttccatgtttgcttgcaactaggaaataatgagaaaattaactcataattactataaagaattattcttaggtcacgttcttggagaaaaagtaggctgttctttttgggtatatttccaccaggacaatgttacaaaatattacagtatgttacaaagtcttcctggcatttaggatcataaacatcctcagatgtgtcccatttggatttaccctataagaaattccataacacagtaggagagttacatagtgaggttttagtgtattattataaaatctattatttaattatattaacatttggagaatagtttctcatgtctgtaactaacctatatctcaaaattatgtgtagtccaagtagaaagatttttgcctacagctacaactagtcttaactgagacaaaataggaataaatacttaacagtgcatttatgtaactttaactttcaagtcactttgacatgctttaagcttatttagtcctatactatacagtactaatttagtcctatatttagttatgtcaacaatatgtatcttcctttcctccctccctctcttacattttcttaaatatatttatgcagaccactcttttttactcttaagagtaactcttcttttcaaatgtattctctgattcttctttcacttgataaactttaggatctctgagcttccactggataatttccatagattaaactctagagtcattgaagaagtgccaatgaaatggtcctttcagtatttcattgccctttcataagaatataatcctaaattataaattattataagttgctttcttttctcagagaggctgaatacactctgggaatacagaatcctgggagatttgtttttacccaattctcagtgcatttagctcgcttttggatttggtggtatgctgactatttaggatgtggttaacttgaaggagacttgaccgcctgaactagcactgggggaacagctcactgaaacatcactggaataaaaaaaaaaaataatggcttcacaaaaataaagcaatcattattgattaatcaatgtcaccaagttagagctgatattctaaataatagatgaggcagtaactagatataacataaaatatagatctaaataaatatagccaaataggcagccaaattagttcaatatttgaattttttctaatctattaatatatacaacaaagattggatgctatgggatggaacaactcgctcctaaagctggcaatgtacatccttatgcagacatacaaactatgtgttgtatattttattatacagtaagaatagcttatgggttgcataacatccttaaattattttctgtattttatccttagaataaccctgtgtgatagataatgggaaaggtatggctacatttattttaccaatgaagaaaatgaagtgtagagtagtcaccaagcttgaactagatccttgaccttcatttgttgctccccagcctttctatgctcctgttctgctttatttcatcaaagcagaacaggagcatagaaaggctggggagcatcttttttctagacattagacacttacctgatatggaattaaaattaaccagggcttcttcctagctttccctctaggtcatattgcaaaccactgattctgagacagcgtttttgttttgttttatatgtgtttgtttttcttatgacaatttataacatattgaaatctgttaaatgatgaatgacttggaaaaacaaacatgaatatctccatcaaatcttaaaatattaggattagggtattagtttaaaatcagtaaaggcagtatacagaataattataaattattccttttaagtggattagagtgactttaaagtctcttgcgatcatgaaattgtataatgattttccaagcagaatttatgggatccattattctaagtgcttgtggccctgaagacatatggtgacaccacagggcaaagtccctaccatcttgatagggctgtttgtaatataaatgtgtatatatttgtcaaaatacatagacataggccaggtgccatggctcacacctataatcccaacactttgggaagctgaggtgggtcgatcaccagaggtcaggagttcaagtccaacctggcccacatggcaagaccctatctctactaaaaatacaaaaattagccagacgtggtggctcatgcctgtaatcccagctactcagaaggctgaggcataagaatttcttgaacaattgcagaggctacagtgagccgagattgtgccactgcactccagcctgggcaacagagtgagactccatttcaaaaaacaacaacaacaaaaaataggcgtgtgcacaaaagacttgttatgttatgccttaaaagataaaataaaaatatttttaaaagtacaattaattacattacaattcttttaattttaaaatttatttttatttttattttttagagctggaggtctcactatgttgcccaggttggcctcaaactcctaggctcatgagattcttctgcctcagcctcccaattagctgggactaagggtgagcatcactacacctagccatttttttcttactatatttacttttttaaaattcatggctgggcacagtggctcatgtttataatctcagcactttcagaggcagaggcaggaggctcacttgaggtcaggagttcaataccagcctgggcaacattgcaagatccatttccacacaaaaaaaataaaaattaccagggctgggtggcacatgcctgtcatcccaactacttaggaggctgaagtgggaggattgcttgagccaaggagttcaaggctgcaataagctatgattgggtcaccgcactccagcctaggtgacagagcgagatcttgtctcaaaatataaaaataaaaataaattcacaaagagtccatgttcattttagagaatttagtaactattgatgaaaaaatacatttattctttagctaaaagcatacataatataccatagatgctgtatactaagacatttaacatttcataaaaagtaatagattgctaagaaatgtcatttttaacagggataatgtttttcctaatgctttggggtttttacgttttttttcttctcatttcagcaaaggagtgtggtggcgtctttacagatccaaagcaaatttttaaatctccaggcttcccaaatgagtacgaagataaccaaatctgctactggcacattagactcaagtatggtcagcgtattcacctgagttttttagattttgaccttgaagatgacccaggttgcttggctgattatgttgaaatatatgacagttacgatgatgtccatggctttgtgggaaggtacgtatgggtccccatacaggaagttaaatgaacgtccagtattttgtttgatgcttctttaattttccctcaactgtccctataatattgattttggaatagttctactctcctaaagcaccatatcatttttcaacaaagatttttcttagctggctgct

SEQ ID NO: 1880715 - DNA, 4001 bp, Homo sapiens
gagtgcagccataaatccagagataatattcacttacatattttctacttcctccaaccatttcacaggaaactaatccaagccttgctcttaactactttgtgtcataaaacaaaaaacaaacaaaaaaccccacaatttcttgcagccatttttgtttgttgatgtctagagttaaaaaaggaatttgccccaaattctccatatcaagttgccaatgagtacctctcaatttcagtgaaaggatgccttgaagtatgtgaatagattttaattcaaatagtgttatcaaactccaagtaattggtgccccactattatctgttttgacagagtcgttgggataaactgatgttagggaaaaggtctacagtgaaacagggaaattgtgtaaaaataaattagggaatgtgtggccaaatttagtctcagtgagacccacagaagctgtgtgtatgtgcacatacagtttggtcatggcttactaatcatgacagcattatgtctgtctttctctctctcacacatattacacaaacagattccactgtgaagtttttctatgtagatagatattactgaaaaaccaacagcaaaaggtttgttaatttccacagaggggtatcacgcaaacagcaaaaacatgggaattgagaaacctaaaaaacatttttcttttaaagatacagtttcactgcagctcactggcagtattcattatgtctgtgactcagctataaaaaaggaatgagcaatacctgcatctttggagaaagttaatcttaaaagcagctttgattacttaggaaattacttaggaagcataggcattagggccagtcacacacagatcctgactctcactacctatcgtgggtaaactgcttaaccttttgaaaattagggtaaaatcatctacccaatgagagtgttggaaggattaaataagatgactaaggaagcgatcttggtacattctaagtattcagtacatgtcagtacatgtcagatgctgtcatgatggcaaaaggccaggtcatgatggcaaaaggccattacaataatcgccaaacagagaatattcacaaggcctcgaaaagcagccagcacagagtcagcattcattttattgaatgatagaatgaattccatatccatggatgacaaataatgatacatcagagcaggaaggcaaataaaattacaggaataaatggaccctgtagcctttcaactaactacaaactccagacaacctagtcctctaaaggtcctgcttcatgctcattatcttcttctcatagttcaaacaaccctgacaatattaagggatggcattttaaaattattctctaaaagcctaatgactggtttggtctaagacccagggaggccacccaagaggcctgagctcatagcatgtggttaaactgcaatctactcctcaaattcgaaagagaaagcaaatgaaaaagaagcaaggaaagctaaaaagattctgtagttggctgaaaaatgatctatagttaggctttgcccctatccaaatcagagtggggctgtttcttgaatgtcagaactgaagtgtcttcttctctcacacttttcttagctcatttcccaatcactttcttggtggagtctctctttgccaaaaggacatgcccgtcaatcaacacacactacttatttgtacctgtctcgacgccctccccatcactatctattcctacaccacactgtcattagtgcatatttctaaggttcaaaattttacaagattcttgtcctataagagcgattttctgcttaacactaccaaattgatcagtctgtgctgtgtatatcaaccattccctcaagccagccaaatttgattaaatgtacatttgtctatgcattattttgtaactgcaagccttgcctatgttgttttctggcacatgttaggcaattgtctgtttgtcagttattacctactacataccagacaacaatataggctaatctatagctttcatgtctttcaaaggccatgcccatcaaggcccctctataccataactgtacactgtgggtgcttgggaaggatggctatttcactggctcactatgaaatcaccagctatttcactagctcactgtgaatccaggcacctaaagctgttgtatgtatgcaatttcagtaaactgcagcagtcaaatttgggaattgcactggacacaaggtcaaactgaccttgtttaacttcacatcaatattaaaataatgcatcacgtaaaataaaggtgtatgaaaattctagttttcaaaatcctgactgaccacatttgaaaccttatgtttgcatagcacgcgtttttttttcagtactagatgatagttattaaatgatttaaggtcttattaatacttcctttcccagacacagcaggctaggctagtcagacaaaccccttgctctctatttaaaacaactaaacttctcaacttaaaaaatatccttaaaagcatcagaggtgacaagatagtaagaagctctcaggataaaaatctaagggaaactaggaacccagagacctaagtagaacaccacagctccttctggcccaaaggcatctccaccatgagttaatctgggtttctgttttggcagcccctggaggaaagggggaagaatctaggcccagtgcctacctaatgtggaggatattatagaagacactgcgcatattaagctgggaccccaagatataacatccataggatgagtgtgtgccatacataaaccctacctctacccccaattctgggaaacttcagggatggttgccttgacactaagcagaagaagagaaaaagggaaaggaaaataacaccatgagaagttgtggtaagagacccacaactgtgatcatgaccaaggtggttacggtcatggggagttagcccaggtgggcctgggagtcatggtaagtcatgtgcttggtctggggtgatcctgggctggggtatcgtccatgccggacaggagcataagcataaactctctgagagaatcatcatcttcctaggcctcaagattctccctccttaatatttcctaagaacaaagagtagtacacaattaagcacacaaggaaaaacaggttccatgaatcagaatcagaaacacacccgcaaatactggaactgtcaaatacagattgtaaaacaactatgcttcccctatgtaaaaaaataaaagaccacataaaaagtatctgcaaagaacaggaaactatgaaaactgaacaagcaggtttttaaaagatgaaacagaacttttataaataaaaatatatattaaccaaactaaaaactagaaggagaagataataaacagaaatagttaaaagggaattagtgatttgaaagatatgtcagatgacatctaacatatggccagagaaacagaaacaatgaacaacatggaagggaagttagaactcatgagggtagtgagaggatctaaaatacatttaactgtaattacagaaaacgaaaatagtgagagtagagaagcagcaatatttaaagaagtaatgactgagaattttccagaactgataaagatagcaattgggccaggcatggtggctcacgcctgtaatcccagcactttgggaggccaaagcaggtggatcactacaggtcagcagttcaagaccagcatgaccaacatggtgaaacactgtctctactaaaaatataaaagttagccaggtgtagtggcactcacctgtaatcccagctacttgggaagctgaggcaggagaattgcttgagcctgggaggcagaggttgcagtgagccaagattgcaccactgcactccagcctgggtgacagagtaagactccatctcaaaaaaaaaaaaaagatagcaatccatagattcatagatttaagaaggcccagagaatctcgagaggaatacatatatttttaattgcaataca

SEQ ID NO: 1880716 - DNA, 4001 bp, Homo sapiens
tacttaaatatttgactttaggtaatgaagaattaaagtggatgaaaatattgcaatgctatcaggatttattgagaattgctaaagctgagtggctagactcttagttctaaagaaacctaatagtgacttggtatatttttaactgaaatgtaagcttgaaaatagcacattaaagtcaaattatgtggcttaagacatcctctcaacagcaacacaaattctagttcctgtctttccattctctttcctgtttgtctgaaaacctcaaatacctcttgttctaattctacgctattcctttaattcctttctctttgatacattttgcttaattttatattctaatgtgcttttccctctcagacacgataaccaactattcaagatgccatctaatgcactatgccattaagtattgtggtcagtgattttaagtgtaataaattatcttcaggttgaaaagagcatatgcaaaagaaatggatcactacatcttaactagaggcatggatcaaatcaacttatggttggtttgaaaatgctttaagacatatcaggattgacttaaaactaggctgggcagagatgtaacactatgtggatagaagtgttacaaacacactagccatattttaattaaaatagagtttattagcttttaatataaacatgagaaataaaaaccacataaattgtagcattcttttcaaaataaaactgcaatcaatacttgaatctccaaactctgaattccataaacaatatttgtttttttgaggtggtagattgtaatatttgtataccattatttatcatttatgtctctgtcctttaaaaatgatggaaactgcagcacaatatgatgtgaagcattgctataatagaggaagtactcctgtcccagaaatgctttgtttataagcaagattcctaggattagatttgagaaagtaggagaaacagatttcacatagttgagaacactaacctcttcttagtatttcaaatttaggtgacattatcggtctcctaaaattatttgctccttgccttttaaagcctgaagagttcctaagggttatgtaagtatttcttaaatagcaggacttaatgggacacctacagcttggtagcatgtaggatgataaaacagctgttcatatcaccttctataattagggtccaattccttttattacatgttaattaacactgctcttcaaaatcttcctttaaagaaactgcggtaatcaaagcatatagagcacagctctgcgggtaactacttttaaaaagagggcattttatggagatacaaggtattccaaaagttcagtgtaattttaagctttgatacttgtagaaatataaatgctacaaacctttacaaaaccttgtctgaacatttttcttctgcttttttctttgagacagggtctggatgtcgcccaggttggagagcagtgacatgatcatggcccactgcagccttgacctcctgggctctactgatcctcccaccttagcctccagagtggctgggactacagacacatgccaccatatccaactatttttattatttttttttacaggcagggtctcactatgttgcctagactggtcttgaactcctgcactcaagcaatccttccacctcagcctcccagggtactgagattacaggcatgaatcactatgcccagcccatttcttttgcatttaattttgcatttttctaagagatggggtcttgataacgttgtccaggttggagtgtagtagctattcctataggcaccatcatggtacactgcagcctccaatacttgacctcaagcaatcctccagcctcagcctcccaagtagctgggactataggcgtgcaccaccacacccagcttcattttgcaaattttgaatataaagcttttaattttttgtttcagtcaatgtctgctatcaagagtgaccgaaacaaaaaattaaaagcttaatattcaggagacaggtgccagttgcacttgtagtcccagctacttgtgtggctgaggctagaggatggcttgagaccaggaagttctaggctgcagtgagtgcacaatgattgcacctgtgaaaagccactgcactccagcctggacaacgcagtaagacccccatctctttaaaaacaaacaaaacaaaacaaaaaactttcaaatcatgttttttaaaggtttatagcatttatactcatgctgcagtgccttggagggcccaaactatattcaagcttaaaactgcttcactttttctcatcgtcactgaaccaccatgttggttggcattatgaaaatatcttttaatacatttatttagcaagagaaaaattatcagaaaatgagaagcaccatttatagttcacaagaaatgcaacatggactccaatagaagtagatatcaataactgatacttcctctgtttatgaccccaaacatgctaaaatgctaaagtaatgcttgcaaagaatatgaatgacaaatgttatccagcagctttttggtttaaaatgattgccaatgactagcagcttcaatggtaacagtagggaggaagaacccttcagtacctaacaacgctgctgtctgctcctaagtggctttagttagagtcccatgttttaatggtaatactgcattgattttaaaggcatatgcagcaaaatgcggggggagggagagaaactggaagaaacataaaagttatatggttagtgtctttaaagtctaaaaatttaaactattgtttaaaaaaccttacatagttcacagctatcggcccacacagtaagcaaatatctgtgtgtaggatgggagccttcactttggagtggtttttgtaactctgtttacattaaaaaggacagaagagtgttttgttgcattgacaaggtcccattctttcctgtggagtataatccttgttgtccatgagtctcttgaatttgagatctttccttttgatgaaaacactaattttgctggtttttgagcaggaaaggtggtatttctccagtctttgtagatgaaggtcccatgacgttataacccctcatttctccttttaagagaggatggctttagagcgctgaataccaatgaagttatcagcactgaaagaccttctcatagcggctctacacaagtctttgtcttcacacaatctagaaatagcctaggaaagtcaatcaaatagaaaacaggtacaattttaaaaagggttcccgcctttgaaagagcaccattgtgaaagccacacatgtggactcctttagatagttcacagttacagctactttggctgagttttacactgccaggttgtggggacactacttcctgacagttcaccaaggtaatatcctttaagggctatggttagattcccagagaacaaaggggaatttattatattattaaaaaactggattcccaaagatatcaaaggtattgtgatagggctcctaacagcaatagcatctgttatctgttaacttattccttaaatataacaaacgtacacttgtgcaaaaaaatgtttattcagctattcaaattctacccaatccttattagctattatatactcaaagcacattttaatgaggcaggtgtgtgctggactatactggaacatatgagcggtctgatgactgacgcgccaaaaggtattacttcacatgcacgttaattatggtagaaatacatattattatttttttcttttttttttttgaggcagagtttcgctcgttgcccaggctggagtgatctcagctcattgcaacctctatctcccaggttcaagcgattctcctgcctcagcctcccaagtagctaggattacaggcatgtgccaccatacccagctaattttttgtatttttagtagagacagggtttcaccatgttggccaggctggtctcaaactcctgacctcaggtgatcccgcctg

SEQ ID NO: 1880717 - DNA, 4001 bp, Homo sapiens
taagatcttagacataaacctaagtttgcagggaaatactcatgtctgaaaggagatgttcttaaattgacattttacatatatcagttgtcacaacttaagatcccacctttactcaatagtgcttaaggggtcatggaggaagatttgattgattgttttttatgtatacaaggggcaggccgggtgcagtggctcacgcctgtaatcctagcactttgagaggctgaagcaggtggattgcctgagctcaggagttcaagaccagcctgggcagcatggtgaaaccccatttctacttagatacaaaaaaaaccagccaggcatgatggctcccgcctgtagtcctagtccagctactcgagaggctgaggcaggagaattgtttaaactgggaggcagaggttgtagtgagccgagatcgtaccactgcacttcagcctggatgacagagtgagtctctgtctccaaaaaaagacagagtgagactctgtctccaaaaaatgaaagtatacaaaggacagttgttttacccagaaaggaagaaataagaaagtcaattattagaaatttgtttaactggcatgtgttgagttcctataccttattagatacatttgaacattctttcattaagttcttaaaaaatatgaattaggtattattttcatctcccatcttacagataaggaaactaagatttagagagtataggtcacttgcccaaggtcacggactactgggaagcagggacatgaattgaatcaaactcttttcaaatctaaattcagtgcacttaatttctgtgtcatgccatcacactttctctccatgaaagctaatttctcttttaacattaggttttataggtagttctactaattatgtttgtgaagttttgttttcttttcccttcacaagggctggacacagatcagcattctcatgttatgaatgatttagcttcggattactcttctgcaaatggagggaggaggcaaacctcaaattaaaggcagggttggaatataaaagtctcagctcctcaagagtccagaaaaacctcctcccaagagtgctgtggcctcttggcgcctctccaggcccagcctgcctgcaggacttgcttgctccatcttgccggttctcaacggagaactctttgttttggaccctgttcttgtattctgctcagtggacttgaaaattggaagtttccttgcttcctggtccttcctgtgcctgggaaacagacttggaattcttcttttcttctcttcattcagcaaaaagacaaccccaccagttaccattccttgtattagttcttggaacccagcctgggccaacagttaggccccctgagaaaagaagcctaacttcatttgcctagtccttccctcaatagattaagaaatgaagagaaaaaaaccttcttaacatatactacataatactaatatttactttaaaaaaaaaataaaggcttaacccctgcattttcatcacttgagaaaattgatataagctaatattttcaataatttaaagaaaataaaccatttctttcctgctcccctccccttctgaatattcggcataaatagttgcttgggtagaataaattctcactattcattggtttgaatgcttgtgtatatcccaagggtatacacaatgacctctacacacatgacctctgttttacatagtcaacttttattttgctgaggcagaaataatgcatgcagcaaagactgccagctgtttaccaaaatcccttctcctcttcttcctgagcacacagctagactatacttcccagtctccattgcaattctgtgtggccacatactagagctcttgcactgctgtgtttttgcatccccttctaccttctggcttcctgagatggagcagactatatgcagtggaccaggatggcaagggctctactgtcctttcaggagagcccttgccatcctggtccactgcatatagccgagctcccactgacctggaaccctcatcctggactgttgtccaaaagagagatagatgtgtttttccctcaaacatgagaagctgaatttggcggtctatttgttacgatatcatagcctgtcctaactgaaacagggcacatgtagtatgtagcacaagtttcttagctagtgagagtgcttagcagaagctcagtgcctgcccttcaccaagatttgaggtttcctactcatggagtgtcatcagtaactcttgccaagtgataaatcttttgaatattggtggaatatgataacacaaagtaaactaacccctaaatgttggtagcaaaagtaaaatacaattgagtgtgtcttagagggcaaaggttcttggctaaaaggtggttgttttctagagtttaacaataaaataccaaactcatattagaaataggaataattttaccatatgctccacatatagaaagaataaaaaactcaattctggaactgtttcaccaaatgcttcaaccagaattttaaaaataaatatataaataactatggtcctgaatttataatattaatgatatgtaggaataatttacattttttgatttaactcacaacatttcaggtagaaaattatatggtatatatatggaaatttaatgatttacacacacccacacttacatatataccgacatacaaagttatcaccttatgatatattccttctaaatattatttgtttgatccaaactctaggatgaatttaccttcttaattctctaaaactatgatattagaccacatatttttgcatcttaaattgtaaaatttcagaacatagagaaaagaagaaaagagatataaatgatatttattcaagactattgaactcatgtggaaaaatagtcccccgaggacgtcaggtcctaatccttagaatctgtaaatactacctgatacagaaaaaaggtttctgtctgtaggaacctaagaaaagacatttttaaattaaaaacaattaaaacattaaaaatttaaggtctttataggtatgattaagttaaggatattgtgatgaagaggttatcacagcttattagaatgggccctagatgcagtcacgtatatccttatgagagagaggcagagggagagctgacaacgaggagaaggcaatgtgatcagggaggcagatgggagtgatgcagccacaagccaagaagtgctggcagtcccatgagcaggaagaggaaaggccagattctctcttagagttcccagagggagcatggcctggctaactcctggatgtaggcctagtgaaactgattttggagttttgtcccctagaactgtgagaggataagtttatgtggttttaagccattgagtttgtggtgatttgttatagcagccacaggaaactaatccaattccattttctaacagctgagttcaactttgctaagtttatatctgtgatattttatcctaagtctttggggacctaagtttgttttccttttccttggcctggaaaagacaaatgtcccacccattgtattacatgttgttgaatgtctttagtgagctcaagagagggaacatctctcttctccagctgagtctgagtcattgaaaaacagagtaagatagatagagaggaaattatcaattttatcattgttaaagttgattttggaggatcgccttactatcactgaatctcagatttagagagacttacctaccttatttccaacattagacaatgtactctaaaatgtagggtctgaaatagcagagcagaaagtatgctttctctatgcacatagctctcaagagaatgaggaggtaaagggactcaataacattaaatgattccctcttctcctgagaacagagatgtcaggactgctgtgctagtggaaatctttttatatggaaagaagtgctgggagtggagatgaaacatttcctatggttccatctccttatggg

SEQ ID NO: 1880718 - DNA, 4001 bp, Homo sapiens
acagcagtcctgacatctctgttctcaggagaagagggaatcatttaatgttattgagtccctttacctcctcattctcttgagagctatgtgcatagagaaagcatactttctgctctgctatttcagaccctacattttagagtacattgtctaatgttggaaataaggtaggtaagtctctctaaatctgagattcagtgatagtaaggcgatcctccaaaatcaactttaacaatgataaaattgataatttcctctctatctatcttactctgtttttcaatgactcagactcagctggagaagagagatgttccctctcttgagctcactaaagacattcaacaacatgtaatacaatgggtgggacatttgtcttttccaggccaaggaaaaggaaaacaaacttaggtccccaaagacttaggataaaatatcacagatataaacttagcaaagttgaactcagctgttagaaaatggaattggattagtttcctgtggctgctataacaaatcaccacaaactcaatggcttaaaaccacataaacttatcctctcacagttctaggggacaaaactccaaaatcagtttcactaggcctacatccaggagttagccaggccatgctccctctgggaactctaagagagaatctggcctttcctcttcctgctcatgggactgccagcacttcttggcttgtggctgcatcactcccatctgcctccctgatcacattgccttctcctcgttgtcagctctccctctgcctctctctcataaggatatacgtgactgcatctagggcccattctaataagctgtgataacctcttcatcacaatatccttaacttaatcatacctataaagaccttaaatttttaatgttttaattgtttttaatttaaaaatgtcttttcttaggttcctacagacagaaaccttttttctgtatcaggtagtatttacagattctaaggattaggacctgacgtcctcgggggactatttttccacatgagttcaatagtcttgaataaatatcatttatatctcttttcttcttttctctatgttctgaaattttacaatttaagatgcaaaaatatgtggtctaatatcatagttttagagaattaagaaggtaaattcatcctagagtttggatcaaacaaataatatttagaaggaatatatcataaggtgataactttgtatgtcggtatatatgtaagtgtgggtgtgtgtaaatcattaaatttccatatatataccatataattttctacctgaaatgttgtgagttaaatcaaaaaatgtaaattattcctacatatcattaatattataaattcaggaccatagttatttatatatttatttttaaaattctggttgaagcatttggtgaaacagttccagaattgagttttttattctttctatatgtggagcatatggtaaaattattcctatttctaatatgagtttggtattttattgttaaactctagaaaacaaccaccttttagccaagaacctttgccctctaagacacactcaattgtattttacttttgctaccaacatttaggggttagtttactttgtgttatcatattccaccaatattcaaaagatttatcacttggcaagagttactgatgacactccatgagtaggaaacctcaaatcttggtgaagggcaggcactgagcttctgctaagcactctcactagctaagaaacttgtgctacatactacatgtgccctgtttcagttaggacaggctatgatatcgtaacaaatagaccgccaaattcagcttctcatgtttgagggaaaaacacatctatctctcttttggacaacagtccaggatgagggttccaggtcagtgggagctcggctatatgcagtggaccaggatggcaagggctctcctgaaaggacagtagagcccttgccatcctggtccactgcatatagtctgctccatctcaggaagccagaaggtagaaggggatgcaaaaacacagcagtgcaagagctctagtatgtggccacacagaattgcaatggagactgggaagtatagtctagctgtgtgctcaggaagaagaggagaagggattttggtaaacagctggcagtctttgctgcatgcattatttctgcctcagcaaaataaaagttgactatgtaaaacagaggtcatgtgtgtagaggtcattgtgtatacccttgggatatacacaagcattcaaaccaatgaatagtgagaatttattctacccaagcaactatttatgccgaatattcagaaggggaggggagcaggaaagaaatggtttattttctttaaattattgaaaatattagcttatatcaattttctcaagtgatgaaaatgcaggggttaagcctttattttttttttaaagtaaatattagtattatgtagtatatgttaagaaggtttttttctcttcatttcttaatctattgagggaaggactaggcaaatgaagttaggcttcttttctcagggggcctaactgttggcccaggctgggttccaagaactaatacaaggaatggtaactggtggggttgtctttttgctgaatgaagagaagaaaagaagaattccaagtctgtttcccaggcacaggaaggaccaggaagcaaggaaacttccaattttcaagtccactgagcagaatacaagaacagggtccaaaacaaagagttctccgttgagaaccggcaagatggagcaagcaagtcctgcaggcaggctgggcctggagaggcgccaagaggccacagcactcttgggaggaggtttttctggactcttgaggagctgagacttttatattccaaccctgcctttaatttgaggtttgcctcctccctccatttgcagaagagtaatccgaagctaaatcattcataacatgagaatgctgatctgtgtccagcccttgtgaagggaaaagaaaacaaaacttcacaaacataattagtagaactacctataaaacctaatgttaaaagagaaattagctttcatggagagaaagtgtgatggcatgacacagaaattaagtgcactgaatttagatttgaaaagagtttgattcaattcatgtccctgcttcccagtagtccgtgaccttgggcaagtgacctatactctctaaatcttagtttccttatctgtaagatgggagatgaaaataatacctaattcatattttttaagaacttaatgaaagaatgttcaaatgtatctaataaggtataggaactcaacacatgccagttaaacaaatttctaataattgactttcttatttcttcctttctgggtaaaacaactgtcctttgtatactttcattttttggagacagagtctcactctgtctttttttggagacagagactcactctgtcatccaggctgaagtgcagtggtacgatctcggctcactacaacctctgcctcccagtttaaacaattctcctgcctcagcctctcgagtagctggactaggactacaggcgggagccatcatgcctggctggttttttttgtatctaagtagaaatggggtttcaccatgctgcccaggctggtcttgaactcctgagctcaggcaatccacctgcttcagcctctcaaagtgctaggattacaggcgtgagccactgcacccggcctgccccttgtatacataaaaaacaatcaatcaaatcttcctccatgaccccttaagcactattgagtaaaggtgggatcttaagttgtgacaactgatatatgtaaaatgtcaatttaagaacatctcctttcagacatgagtatttccctgcaaacttaggtttatgtctaagatcttaaggaaataaatactataaaaagacatagttcaaataatgtattaatagaaaaaaggtccataggaatatctcagtgtttt

SEQ ID NO: 1880719 - DNA, 4001 bp, Homo sapiens
ctcctgcctcagcttcccgagtagctgggattacaggcatgcaccaccatgcccggctaatttttgtatttttagtaaagacagggtttcaccatgttggtcaggctggtctcaaactcctggacctcaggtgatccgcccgcctcggcctcccaaagtgctgggattccaggcatgagcatgtgttgtttctttagctggatgcatgaatgtgccattgggagctgctgtccatcctcagggacaaacgtgaggggaaaggcatacatgtagacatatgtacaatctcttctcattttaaaaaagtcacagcacttgcaaaagaatcacttctcatctgtggcaggacaagatttttgacatttgcttctgatcctgtcctgggcctgagtgcgaggagctcctcagacagagccacctccctcacctgtcctcaggccacgtggaggtgaacttccaggcacaagcaccccacacctggctggggctgctcttctggagtggcagggccatgctgagaaggactgacaggtgacagtcaaggcagccctgccatcaccttcctgcacattccggggtgcaactcagcctctgtggtctggactgacatacttcttgggatgcactttggctcttcgcaggataaatgcatttgtttcttaataaatacatctttaaagctggtcaacattcgttttatcctgctacttaatctaaggagtctaagaagctgacaaaggaaaaggaaaatttcaccatgggggttgggggaaggcaccatgattgtagggtctgggctttttttttttttttttttttttttttgagacggagtcttactctgtcgtccaggctggagtgcagtggtgcgatctcggctcactgcaacctctgcttcccagttcaagcgattctcctgcctcagcctcccaagtagctgggactacaagcacgtgccaccacgcccagctaatttttgtatttttagtagagacggggtttctccatgttggccaggatgatcttgatctcttgacctcgttgtccgcccgccttggcctcccaaagtgctgggattacaggcgtgagccactgcgccaggcaggtctagacttttattctctagcctccgagaaagtaattttacagcaagacagttgctggaagtcactggcacagagcttgagtggccattatccttaaaacacctgaaagccgggctaagtaaacagtgccatcattcagtctaccactgacccagacctctgccccaagggcttcctgggctaagtaacagtgccatcattcagtctaccactgaccccagacctctgccccaagggcttcctgcccatccaccaattcttcttctgggtatgagacctcacctgaaagagcaagagaacagagctcggggaagttgaggggacaaacgttccccaccaaagccacatagagaaccactctttctccctttctcctacttgttcatcaacaagtactctaaccacctaggccaggtgcagaagcacagcacagatgccctgcactcctggcactctgtgcacactcctgcatgccctgcattccctgcactccttgcacactccctgcagccctgcacttcctgaataccttgcacactgtgcacactccctgcagccctgcattccccgtatacccagcaggccctgcacgctctctgtgccctgcacactgcgcttgtctctgaggcagtgagaggcagccacatgacaacacagtggggtctccgccccgtggagggactgtggcttctgtgagcctggcagaagggcgtgacccgcactttggggtcaggcaggaggaagggatgcttcagtgagacctgaattggggctgaagtcagcctgacaagagatggccacttgtgatttagaatattacagcattctagatgaggtataccatatacatatgaggtatatatatatctctcatctagaatgccgaaatattctagatgacgttgccagtgagggaggaagaggaagatggaacaacttgtacttctccctccttccatcctcttcttcctcacactgaactcccaggcttaaaataagagctggcttcagtgactgacaccaaggggagggcacctctgggttggaccctgaggggtctttgtgctcagtagaatcttggggggccagctaggcaacgctgcttgatgtaatgaggtccctcagggtcggctgcctacctactgtgaaaacagttatttctggggagagagggctgtccccagtggagagcctcagaaatgaactcagcatttgcaggaagtaaaaagaagtggcctataccggaagcgtaggtttggcctggctgaaccgcaggggaggatccagtctggactgggggcatgagatagctctagcccactcctcagaggtctctcattttgagtccccatttcagggggatgctgagagcctgagaacccctggtctagctgacaagctcctcttcagccacagaaagaggggaggaggcccaggtaggggaggtaggtccctgggtccccaggcaggttggcagtggaactggaggagtccagaggcttggcccctcccccagtaatgcagccacctttgaccccgtgcttcttaaagatagctgggactgcccccacccttccctagcccaggtcttgaagtccttcccatccttcccacagttccgatttcggcttctagcccatcccacccaaggaagctcagcacacttgtctgcgccccctttctcttacatcctcctcctgtctgccactccccattgatttctcttcctgcctctttctctctccgattttctccaccagtgggtgcaggttctgctcagtcttcctgcctgtcctctccgggggcccccagaactaagctgagcctgctccagccccatattttaccgcaggaggttggcttccttcatggccaggaggaagtggtgaggggcagctggcatgcctggtggtcagggacaggcagggtctgagacccaggccaggcccctctccctgagcaggtttctccagatccaaaagaaagagctggcgagattggaaaggtcctttctagaccctaaagaacccctaataacccacagggccagtctgtgctcacgtggcacagtggaagagaggacactatttttttttttcttctgctcgggggtccagttttttcttttctttttttttttttagttttttgattttttttttttttttgagacagggtctcactatgttgcccaggctagtttcaaactcctgggctcaagcaatcctcctgcctcagcctcccaaagtgttgggattacaggcgtgcgccaccacgccccagcctggaggcccagtttctgtttcaggaagtgacctctgagccaaaccatttactcacctccttctccatctttctgccctacagcccacttcctccaaatgcaaaaagctgacaggacactgtccctaagtcaccccatcacccagccctggacaagtccgcctggcagttttgaaaactagtcccatgggcatgcttctgagtgctgtgtccttcccgtctgactgatggctctcaggcagcacagccctccgaggtggtcaggagtggcggctgcactccgctgggaatcttgacactgctccttagcctcccctgtcagaggctgggcctcagaggagccttccaggtctcctgggtgctctgcatccggcgtggggcgcccactcccagagctccgagagtcaggttcgaggccttgtgatatcccccttacctggtggtcactccattgcctgggtcctggggcgcctcccttggctggcggggggtccccgtgggggctgggcgaggctcttcctggcgtcctcttgggagccactctcctggcttggcgatgatggctgctggggaggaggagagaaagttcagtccacatctgctctggagccc

SEQ ID NO: 1880720 - DNA, 4001 bp, Homo sapiens
tactaaaaatacaaaaaattagcctggtatggtggtgcatgcctgtaaccccagctactcaggaggctgaggcaggagaattgcttgaacccaggaggcggaggttgcagtgagccgagatcacaccactgcactccagcctgggtgacaagagccaaactctgtccaaaaataacaataataaaaaaaagcctgagtttacaaatctatagaaggaaatttaaaatatgatctctgttcccatcaaatttctttgtttcaagtgatataaactaactatggctgattagacagtagggaatttattgcaagggtatgagaaagcacgtagaaaaggcttctttgtggctcaactccacaacactgtattttatgtttatgaaaacattgggaaggctgaactaccagactcagaaatggcataaagaaggggtgcaggtaacagcctgagccacagccaaaatgatgccacaatgtgagtgaggtggagactctatcactccacctgactgttgctgacactgaatactgaggcttatctgttattgctactgaacttaaacatttaatgtcaccaccacagcctctgtaaaccctggaagctgatgttgaagccacctctgcaaccattaaaggagaaataaattctctgctttcctgatttttgcatctctcaatgcaaatttaaagtctgaggcaggtacctctgtttggctgagtataggtgatgtgttcataccttagctgcagggtagcctgggacaagaatttttttgacttccatactgggaaattcaagcaaaattcatattattagaaatttctcaaatgtaagaaatgggttcaaaggctgaactcagccattcaaaggctgaaacctctcaaataaaactaacatggatctactactccatcccattaggttggcgtgaggattaaatagataataatagatagagtgtctaggaaataataaggactcaatgttcattttcatcatcattgtattactcttgtaagagtcagcttatcttcatggtatgccagttgtctgtaatacctatagctgagaaaagtgaaataaggatttgaagtgtttttatttcacataatgggaaaatgtagggaaaattaaggaaatgaggagtaatgccagaagagatgaaagtgaaaagactgacagacagagtcagataaggaaagtaaatgggcattagattagttgcagaattactgactcctgtgaaggaatggattgtccagggaaaagaagctagccaagaaatggagacctgggaatgagatccatgctactccgagctctaatcctagggctgaatctcccaatctagggtgcccatacaaaaagaacacaataattaaagacaaataaggaatagaaatattctgggtctttttggaattaaaaccttatagcttgcatctgtttggtagtggtgattgtagtggtggtcctagtggtgtgtgtatgtgtgcaagttcattttgttttgttttaaacttacagaacagaattgagatttggattttaagggaattttgatatttcattttgacagctctccttctgacacttcattcttcttcttctcgcacccaaacacacacaggcatacaaacctctttgggattggctgcagaaacagtgcctcccagagtattcccattcatctcatttgtgcttagctgacctctaatacctagaggagaactgtagtgcaaacatcaagaaaataataatgtaattctagaataatatccctaagacttataaatatgaagcaaatataagaacccttttttcagtggacaagaattgcttgtctattcatcacatcctttttttgtttggaaagtgtctcctctctctctccatgttgactctagaaggactataagccacatattcaactctgcaaaggaagaagagggcttcacttcttcttacctcttcttcctttacagaattggacatgtgatttacactgaccagtcagtttaccttatatgtcttaatgcctgtgattagtccagagagaaatacatgaagtagggataaccaatccaaacactgctttggagtttgattgttgggataaagtctctcttgagttcacaaagcttcaggatcatgtattcatgtggcaagcaccaggatgctctcaccaccttatggaaaaagcttgcctgaagctgaacaaaggcaaatggagctcaacatacctctgaacaatctgagccaacaacttctccttttgacttcagctactttaagttgaggttttattacttggtgtattagtctgttctcacactgctataaagaactacctgagtatgggtagtttataaagagggatttaattgactcacagctccacaggttgtatagaagacatggcaggggaggcctcaggaaacttacaatcatggaggcagggcaaatgggaagcaagcacatctttacatggcagcaggagagagagagcaaagagggaagtgctacacactcttaaacaaccagatctcatgataactcactatcacaagaacagcatgggaaaaatctacccccataatccaatcacctcttaccgggtccctcccccaacactgggggttacaattcaacatgagatttgggtggggacacagagccaaatcatatcacttggaagttgagaattttatatctcatacttccccgccccaagaaaaaaataatttcatacccccttagtgatatgagttgaacttttagtatgacttaagaaaacatactgacaaaaatggccaataatctcagtaaagcttttaaaatattatttactcagactctagagaatgcttgcacaacaagtagattaatagacacctaacaataacttattggtccccccatccaaggttaaaaatcattgtttataagtgcttatgctttcaaaacaatactgagaaaaatgcacttctgagtgttatcatattttgaagactataaacccttcatccacttttgaaaagaggatgatattgaaaaagccatttgataagcttttatatccaaagaaacaaagaagcagtttgcttcgaagactccagggacacaaggccaccacctgtgaggacacaggagccacctatgagccatgaaagtttggaaacttgcctgggaagttcatcagggtcaccaccagaggaaatcattgatattcatggagaattggatgctcagcagtgcagtggcatataggtcacacacaagacaaaaactgtttctgaggtttgaatgcaatgccattagtgagccgttactgatatgtttgacactgtatcagaaaattttaccaaagctcccttttctactaaaagcaactgaggggaaaagaaaatggtagaaaaccaaaaataaaagcaactatttcccgggaagaccaatgaagcccttcaaaaagctgactggattgtattaaactgctaaggtttgaatgcatctccccagagttcatgtgttggaaacttaatccccaatgcaacagcatcgagaggtggcacttttgagaggtgattaggtcatgagagctttgccccctggaatggattaatgtcattatggcaggggtaagttcatgatgtcaggaatgggtttgttataaaagcaagtttggccctctcttgcttgctggctctcatccattctctcttcatgtgatgtcttctgccaggttatgactcagcaagaagacccccactagatgcaaccccttgatcttggacttcctggcctccagaaacataagacaaataaacttctttttattgttattatcattaattttttattttttatttcaataagttttggggaacagatggtattttgttacatgaatatgctcattagtggggatttctgagattttgttgcacccatcactcaagcattgtatactgtacccaatgtgtagtcttttatccctccc

SEQ ID NO: 1880721 - DNA, 4001 bp, Homo sapiens
gcaaaggcgggtggattgcttgagcccaggagtttgagaccagcctgggtaatatagcctgtctctacagaaaaaaaaatacaaaagttagctgggtgtggtggtgcatgcctgcagtcctagctactcaggaggctgaggtgggaggatggcttgagtctggtggatggaggttgtagtgagctgagattgcaccaatgcactccagcctgggtgacagagcaagaccctatctcaaaaaaaaaaaaaaaaaaatttgccctataacatgggtgggcttcattcaatcagttgagggctcaaaaacaacaaaaagcaagaggcaattctctagcagactgcctccagactgaaactgcaccatccactctcctgggtttccaggctgctggccagcagactgcaactgcaatattggctgtcctaggtctccagtctgccaaaccacacagcagattctggacttgccagtctccataactgtgtgagtagagtccttacaataaatctttcagccaggcgcggtggctcacgcctgtaatcccagcactttgggaggccaaggtggggggatcacaaggtcaggagatcgagactatcctggctaacacggtgaaaccccgtctctactaaaaatacaaaaaaaaaaaaaaaaaaaaaattaggcgtggtggcaggcgcctgtagtcccagctacttgggaggctgaggcaggagaatggcatgaacccgggaggcggagcttgcagtgtgctgaaatggcgccactgcactccagcctgggtgacagagcaagactccatctcaaaaaaaattaataaataaataataaatcttcctaggctgggcactatggctcacgcctgtaatcccagcactttggggaggagaaggtggggatattgcttgagcccagaagttcaaaatgagctggaacaacattgcgagatcccatctctactaaaagtccaaaacattggctgggcatggtggcataagcctgtagtcccagctactcaggaggtgaggtgggaggatcgcttaagcccaggagattgagactgcaatgagttatgatcacactgctgtactccagcctgggcaacagaatgagaccctatctctacacacacacacacacccttattgtttctgtttctctggagaatctgaatatataatcagaggtttgaaaatctatgggatgtttaaagggaggtcacatccacttacacagattaagaaaaattccactttgggaggccgaggtgggcatatcacttgagcccagaagctgaagaccagcctgggaaacataatgagaccccatctctaaaaaatctttttaaattaaaaaaaaattcatgaacacattcattctttcatttatatatgtcataaacattcactgagcatctacttggagccagggactattgttaatactggaaatacagcagtaaatatggacacagttccattgtggagcttactttttaaaggtggaaactgtgtaataaatacacattataacatcaggtagtgctaggagctacaaagtataacaaagtaggatggggtaaagatatagtgatacaaggaaggcaagagtagtcagaattctattttggatcaggatgccctctctgaagggaaggtgacatttgagaaattaactgaagggaataagttaagcaaacctgtgagaagagttcagggcaaaagaaacacctgatgaaaaggcagtgaggcacatgctggagattaccaggagaatctgagtgaggcagtagaaaaatgaaatatgagaagagtcagatcaagggcccatggtaagcagtttagattttattttgaatgtgatgcgatgtctccaaagagcatgacctcatgtttgccttttaaaaagccttttactaaatgtcttactgcttttactattccctcctagagtaaagaatggactctaggagggaacagtaaaagcagtaagacatttaagaagatggggttggctgggcacggtggctcgtgcctatattcccagcattttgggaggcagaagtgggaggatcatttgagcccaggagttcgagaccagcctggccaacacagagagactccgtctctacaaaaattttttaaaaaattagccagggatggtggcacatgcctgtggtcccagctactcaggaggctgaggtaagaggattgcttgcgctcaggaggtcaaggctgcagtgagccatgactgtgccactgcactccagcctgggtgacaaagtgagactccgtatccaaaaaaaaaaaaagaaagatggggtttaataaagtggaaaggatcttgacaagtgagatattctggatacgttgatacaatcaaatacgacgaggctagagagtcacctgcttggggattaaagttctgagagttgatgtaatctcaaattagagagtctataaagagacaggaagagatgagaaggtgtatatttcgaggtacaaagcagaagcagactcagtaaaggaaaacaagagagatgggacccaaaatattacttgagagaagccaaaagtacaaagagcctcataaagcagcaatgtcaaatgctacagaattaaggagatggtgagaataaaccaaagaattttacaagacagcaatttcaagaagcttagacatcttgattcagagctataaaagggttcattttttattaccaagttttaattagttttcttaattcccaaatgggatcccaaaaagttgactctgaattaactgaaaaggaggtcatccaggtgggcctggtctaatcacataagccttttaaatctgggtctagagaggaaagaccaaagtaaaagaaatttggaagtcagagaggcaagctcctggtagcctgcacgaaagcaaacatcaatgttatgaatggcctctagaggccttgaggcaaggaactgtaggcaggctgtagaagctgggagcagtggctggcaagaggcagcaagaaaagaagtacttcagtcctgtaactgcaagggactgaattctgccaacaaactgcatgagcctggaagaggaccctgatctccaaatgagaaccacagcatggctaatactttgcagccttatgtgacctggagcggagaacacagatcatccgtgcccagacttctatcctacagaacccgtaaggtcattcatgggtgttgttttaagctgctaaatttgtggtatttgttacgcagcaatagaaaactaacacaggttcgttccactttcctatggaaggggctgcttctgttacctagcagcaaataggaagagaagcgaacttgaaaaaacaaagcttgacttttatgatctctaactcactattcctagggattctgttcaattactgcttgagtcacagtacttggtttgctatctacattttgccaaaatatcaacttcctgaaaatcatgagcagtggaaacaggctttttaattttcaattttagaaagtaactttggcaattacgcaaaactagaagtaactgggtatttaggctccttgaatgtcaaagtagtcccagcgcctggagacacagatccctgccctaatctcagaaatgagccacaaggtcatgactcctgtctttccttgaagaccaggagtttcagctccacaaatgaaaatctttcgcttttgtttggattaagaataactcagaagtgttctcagctgcgaaaagaaaggcactccctcccagataattacaaccttgacccctaaaatgtggactctcgctagaagtccaggcacctccttattaaggatgcaacaagccgccgctccgctcgtcctgacgggaactgtagttctcgcccgtcgaccttcagcactgaaaacctatcgcgcgcccaaccggcgacccagacgccagcagccaggattggtcctggacgggggcagcgcggccctgattggactacatgcccacgaagccgcgc

SEQ ID NO: 1880722 - DNA, 4001 bp, Homo sapiens
acctcctggctctcctccctttctctcctgccttgggtttgtattcctggtctgagccctgatgccccagaggtggacatctgctcttccttcctcgttcctaacctaagacatactctgaaatttgcagatgactcagaggttagcataccaatataaaagatgacagaagaaaattcaaaatgaccttgatgttttggaatgctaccttgaaaaccatcagttagggataaaggtgaagactccaagttaaaaaattcagtgtcacaaaggagcttttgagctgatggatatattcattatttaattttttttttttttgagatggagtctcactgtgttgcccaggctggagtgcagtggtacaatcttggctcattgcaacctctgcctccctggttcaagcgattctcctgcctcagcctccggagtagctgggactacaggtgcccgtcaccacgcccaactaatttttgtatttttagtagggacggggttttgccatgttggccaggctagtcttgaactcctgacctcagatgatccacctgccttggcctcccaaagtgctgggattacaggtgtgagccaccgcgcctggcctggatatgttcattatcttgattgtgatgatggttctgtgggtagatgcatatgtcagaacctatcaaagtgttattttttaacacttgttgtatgtcaatcatacctccataaagatgtctagaaaatgcaattctgtctagacaaacagagtggaaactctgtcttgactgcagcacctttgagaaagcttgggaggttctactgactatatttgtaatttgaccctaattttttcttttttttttttttgagacagagtcttgatctgtcacccaggctggattgctgtggcacgatcttggctcactgcaacctctgtccctgggttcaagcgattctcctgcttcagactcccgagtagctgggattacaggcatgtcccaccatgcccaactaatttctgtatttttagtagagacagggttttaccatgttggccaggctgttctcaaacttctgacctcaggtgatctgcgcacctcggcttcccacagtgctgggattacaggtgtgagccactgcacccggccatttgaccctaaattaatgtgaggttttcactaaagaaactaatggaagcataatgtggagatccggcaagtgtacatggcaccacatctgaatagcacactctgttctgggcaccataattgtgaagtgttgacacccaagctcttacctgtgtttggccaggagacaagatttggagccgtcttggaatccaatttacttggatttttcaggagtccagttcctgctaatggactgcaaattcctgccagaaaatgcaatcctgacttgaggcagatgtaagaaattcatagctctctatctccaggggtttagagagttcactaagtggccggagttccatgtgggccccatgtgctctattctgctggggcacttatgacaaatgaccttctcagggagggtgcaccctctgtggcctagttatgatgggctgcatatcctgcgcagttctaagtatgctagtgtaattctactccttgctcactaggaaagtttaagggaaggcaagagtaaggaagctgttactatgaggataaccttgaatctgcttattagaaataagcactaaactttcacgccctcaagtactttatgattgttaacaaattagtagcaatacacctcctagtggatggggacacagcagtgtgttgagctggccagccagaggctgaaaactgcctggactttaggaagcccaggatgtagcatagagcagtagcccctgcggtgccctcagctggctctgcacctgtctatccccttccagatgccatgctgggatcagtgctagggatcaggctcaagggtcaggcctggcctttgggctggtccttgagcctgaccccctggcactggccagcacattttgcttgatttctcagctaaacccaacctccttcggctacagggatttctgtaggtgtatcagaggccaccagaaaggtgtgagaattctagaaaccatgtacaaagaattgtttaaagatctgggagtatttaacttggaggagagaaatgaatgggaagcaaggcagtggtcttcaaattcttgaagaactgacctgaccaggcttgttccattgggcaaggacacagaaggccaaattagggtacaggagcaggttttctggggagacaaattcaagcttaacacaaggaggaagtttgcaacaattaggactggccaacaatgaactgactgttctcagaaacaatgaactccttttcactgtgggaattagaatattcatggccagggatagacacaaaggatttctgtgcctgaatgttctgtggaagcttctccctccaggctctggaattctgtgattctaaaagctcctgtgttcttatactttggagatccctgtttagactgtggacatctgcttgagtttacccatccacttccttcccaggagctcagcgctcccctgcacatcacggaaatggttttcattatttctttgcttcagaggtgaggatttctcttccccacattgtgggagcatgaggttgaggtccagagattctgtacatcataccagatttctctcactctggatgtcaggctgtgtcctgaaatacatttcctatggagcctatgcccttttctgtttgaacgatgggtttaacatgggatacacggggctctctaatgggaacactaagaggctggaagcaccgggcggggatcctcatcttcccacacctctctccctcacccatcgaatgggcatgcattttcctcctcatcacttccaccctcgctctgagctgggagaatatgtcaatgacagtgaaatcagtaatcttgtcattcttactgttgcaaaatgcacaaactgtgacatatatcatagtgtgtagatattattttgcatacaatactgtgttctgaataacactagttcaccacactgcaagttcaattgtttctctagtaatttgtggtattcccagtgcctaatacatttaggtcatcaatttacccttcctgaattgaattgaagggcttatatgcagagggtaagagtgtccttcacatgggggtcacttaaaaatatttggtaggccaggcgcggtggctcatgcctgtaatcccagcactttgggaggctgaggcgggtggatcacttgtcaggagttcgagaccagcctgaccaacatggtgaaaccctgtctgtactaaaaatacaaaaattagctgggtgtggtggcacatgcctgtaatcccaactactcaggaggctgaggcagaagaatcgcttgaacctgggaggcggaggttgcagtgagccgaggttgcagtgagctgagatcgtgccattgcactttagcatgggcaacaagagtgaaactctgtctcaaaaaaaaaaaattgctaaagtaattgttatagctgggaagggcctttggaggctcaaactcctcattttggaaggtggaaatctgaagtttagataaataaggaccagccagctgaaccagtactggaacacaggtgtcccactggctgcagggtgccctttccactgtgctcccaatcatgtgtcttctttctccatttccagccttgttaattttgtgtgccacacctgcttcaagaggcaggagaagctccatcgctgtgggcagtgcaagtttgcccattactgcgaccgcacctgccagaaggatgcttggctgaaccacaagaatgaatgttcggccatcaagagatatgggaaggtgcccaatgagaacatcaggtgagagctgggcaccctggtggtgcttcagatttccaaatgtcaggctggaatggtggcagtaacaacattcccagatctaaggaagccaagctgagtgcaagtcag

SEQ ID NO: 1880723 - DNA, 4001 bp, Homo sapiens
ttcaatgtaagttttctatttgtgaaaactagcaggaataagaacaatgggaagacaaaattaaacactgacaatgtattaagtgtattattattaaataagaattcaagacttcaacttactattccatgcacctaaattaccaacaacaatagttcttgcttggaaaataggctaaaggaaagccaagaaagcatactttccatttataggcattgtacacttagagtagagatatacagtaggaaactttgctcctgcacaccatgttgctcatttcttcttcactgtttgctgcctagtctcaagtgggtctctctccctcagtttctgaagtcatcttcaaaaaatgtatattttcgtaaaaagttacagttgtagtatgctgtgtatgctacagtccttatgacagtaccaaaaacaaattaagtgcaaatttgacactcaaaactcgcttatctagtaataaatgaaaaaagctcaaaatgaaataatgaccaaataaaataaagaaaaaaatatagaaatatttttactaaggaatgttagccagagaagacaagcaacaagacaagcctcatcagtgatgtcaacaagtctgatcctccaatccatcatttatcagagttgtcaagaaaataaaaaatatctgtaagtagggtggaggtattaaaatcaaaaagaaaaaaaaataagaaaaacaaatatataaataaaaagaaaataaaaaataatgagatgccatccaaaacaaaactcattcttccctttcactagttcacttttaccatctagactcagctaaagatcagaaacgattgtcaaagaagcctacactgatcaaccactgagacttaagtgtaacacacaggaggtttgctttaaaaataatgatgaaaatagtaacttctatctataaaataggaaaggaaaactgtgtttgccctctttgagaattaaaaaaaaaaaaaaaagggcatggaatcataggtaagactccctctggtggaaaacatatactattccatttcatagcaccattagtcagagtaaacgagttttgtgagcataatgtcttttatgagggaactcacaatgcataacacaagaataataactgacaatttttaacatgcatgccctatttctatggtattcatatacaatgactgagtcagcctaagaagaccccggaaagaatagtcattaaactgaaaagccttcatttagttatgaaattaccaatatattttaacatattcctggaatatttgccagaatgactaataatcaggaaaaaccatgctgcatttaaattatccaagatcagaaaaggtattaagaagttataaataatgcgattaaaaatgtagatatagttgatagaattatttcatgaatattcaactaaaaaccttatttcataactgaatcaaagcaaacttaataaagatagataaagccctagaagactttagaaggcaagttcactttccacaatgtagctgtttatatgttgtctcataataaaaaacttctaatttgatttccaacaagctaagacaaaagaaacgaagccatttattacaacaaagaaaattacctatgtaaacaaaatttttttttctaattcctaaatatatctgaatatcaaatagaatatgatcaaggatgctttctattatataaaatgattataaatagatttaaataaccaatttgtttcaagcacaatgttaataaatgctaacatttcagaagctatatataaatacagttagctaattaaacctaaaaaccctataaaagtagatttctcttatgtttgtgttacagttctggacacacactgctgctttttccagatggaatctccctaacctcaatcctgacaccaacacacagcctgctcctttaactgactgcccagttctagatatgaagacaatcaagaacaccaaatcttttcttgattgtcttcatatccagaactgggcaatcagttaaagtttggttatgtttttataattaattgcatgtgcatacatttccccgttttgtctttaccctaaaatactttattaaacaaattataaccattattgtttgtaatgataattatgaaatgactaatcatttaatacaattaggtcccctgtgactattttcttaaaaattcctgaacattaagctgcaatttttttcaatctacgaaagcttttgtttttaaaatatcagtacaataaagatgatttacacagtagtctaccaaaatcctctaacaagtagcaccttcccagtttcacaaccagtttggttcatattcaggattatgacctgaagatgaagaagggcctagatattacttaaatctataaaagaatgatgtgtaataatgtgcaatgttagtgttatatggaatatccacattctttgaaaatgcaagttatgtaagataattaattctcaattaaggaaagaatctcagttctttaaccatgacaaataagaatttactgaccataaaacaaagttaaatatcagtaaagaattattttataaataaagaggatatagagcactaagcatattttgcttttatctttttttttttttttttttttgagatggagtcttgttctgttgcccaggctggagcgcagtggcatgatcttggctcactgcaacctccgcctcccgggttcaagtgattctcctgcctcagcctcccaagtagctgggattacaggtgcacgccatcacacccagctaatttttgtatttttagtagagacggggtttcaccatgctggccaggctggtctcgaactcctaacctcaagtgatctgcctgcctcggcctcccaagtgctgggattacaggcgtgagccactgtgcctggctaagacctagagaaaaataggtttaaaattttgattattgcttgtacacattataagcctttgggccttgaagtatttccctcttcaaattatattagactaaaacacacatacatacacacacacacacacacatacttctgtgacttagtagttgcagttaaaagttaaatgcctacatatactgaactgtgtgataaatggctatgctccatctttcagtgctgggcaacagcatacctctgttcttcctgcttcacccaagagcactgaataaactcttcccttctaggctgctggcagaaacatcccagattctcttttctgcggtgttagcattgccaatatttatcacaagaatccccacatccatactaggccttcagagaaaagggatgggatacccactctgctgagtccagagagagatggctaacttttactgcaaacagcatgattcctgtgctgctcattcagcacagtgttaaggagcctgtgatagggtttatcgcagaaactaaaatgcttgtatgataaaatgtgacttaccaaagaacatctggaacagaatcagctcaaaaactggagaactacatatgaagatgatgcccttaacttagaaatttagggaaaaaaatggaaaagctaaaaatggaaattatctatttcttcggtactttctatatttctatgtagtaaagcaccttgggagagaaagcatcaagtattatttatgtttgtatccttataatttaatcacatctcaactttcattaggtttgttttaataacacacctaaaatatctatgaataataaatagtttccttaccttttgcatacacatgtcagctattatggacagaggtattgtaaggcttagtgcaagtgtgcctatcaatgatgaggtaagaaagcagcccctaaaaaaaagaaaatatacatttctatatttaaaaaattaaaccaaagaaaaacactgaacaaagactttctatcctataatataggcctgtgagatcaggagcaaagataagaggctaggatggattgaaacataaaatataataaagttattaagatgattctcagtttttc

SEQ ID NO: 1880724 - DNA, 4001 bp, Homo sapiens
ctgcaagaaacagaattcaggaagaagctccaggaaagagtgtggggtgaccctaggtggggactcccaccagccacagtgtaggtggttcagtccaccctccagccactgctgagcaccactgcctccccgtcccacctcacaaagaggggacctaaagaccaccctgcttccacccatgcctctgctgatcagggtgtgtgtgtgaccgaaactcacttctgtccacataaaatcgctcactctgtgcctcacatcaaagggagaaaatctgattgttcagggggtcggaagacagggtctgtgtcctatttgtctaagggtcagagtcctttggagcccccagagtcctgtggacgtggccctaggtagtagggtgagcttggtaacggggctggcttcctgagacaaggctcagacccgctctgtccctggggatcgcttcagccactaggacctgaaaattgtgcacggcctgggcccccttccaaggcatccagggatgctttccagtggaggctttcagggcaggagaccctctggcctgcaccctctcttgccctcagcctccacctccttgactggacccccatctggacctccatccccaccacctctttccccagtggcctccctggcagacgccacagtgactttctgcaggcacatatctgatcacatcaagtccccaccgtgctcccacctcacccatggtctctcagccccagcaggccttggctggcctctctgatggagcaggcatcaggcacaggccgtgggtctcaacgtgggctgggtggtcctggaccagcagcagccgccgcagcagcaaccctggtacctggttaggaacgcagaccctctgcccccatcctcccaactctgaaaaacactggcttagggaaaggcgcgatgctcaggggtcccccaaagcccgcaggcagagggagtgatgggactggaaggaggccgagtgacttggtgagggattcgggtcccttgcatgccagaggctgctgtgggagcagacagtcgcgagagcagcactgcagctgcatggggagagggtgttgctccagggacgtgggatggaggctgggcgcgggcgggtggcgctggagggcgggggaggggcagggagcaccagctcctagcagccaacgaccatcgggcgtcgatccctgtttgtctggaagccctcccctcccctgcccgctcacccgctgccctgccccacccgggcgcgccccctccgcacaccggctgcaggagcctgacgctgcccgctctctccgcagctggccttctggtccaagcacgtcggtgagtgcgttctagatccccggctggactaccggcgcccgcgcccctcgggatctctggccgctgaccccctaccccgccttgtgtcgcagacggtgaccagtgcttggtcttgcccttggagcacccgtgcgccagcctgtgctgcgggcacggcacgtgcatcgacggcatcggcagcttcagctgcgactgccgcagcggctgggagggccgcttctgccagcgcggtgagggggagaggtggatgctggcgggcggcggggcggggctggggccgggttgggggcgcggcaccagcaccagctgcccgcgccctcccctgcccgcagaggtgagcttcctcaattgctcgctggacaacggcggctgcacgcattactgcctagaggaggtgggctggcggcgctgtagctgtgcgcctggctacaagctgggggacgacctcctgcagtgtcaccccgcaggtgagaagcccccaatacatcgcccaggaatcacgctgggtgcagggtgggcaggccccctgacggggcgcggcgcggggggctcaggagggtttctagggagggagcgaggaacagagttgagccttggggcagcggcagacgcgccccaacaccggggccactgttagcgcaatcagcccgggagctgggcgcgccctccgctttccctgcttcctttcttcctggcgtccccgccttcctccgggcgccccctgcgcacctggggccacctcctggagcgcaagcccagtggtggctccgctccccagtctgagcgtatctggggcgaggcgtgcagcgtcctcctccatgtagcctggctgcgtttttctctgacgttgtccggcgtgcatcgcatttccctctttacccccttgcttccttgaggagagaacagaatcccgattctgccttcttctatattttcctttttatgcattttaatcaaatttatatatgtatgaaactttaaaaatcagagttttacaacttttacatttcagcatgctgttccttggcatgggtccttttttcattcattttcattaaaaggtggacccttttaatgtggaaattcctatcttctgcctctagggacatttatcacttatttcttctacaatctcccctttacttcctctattttctctttctggacctcccattattcagacctctttcctctagttttattgtctcttctatttcccatctctttgactttgtgttttctttcagggaactttcttttttttctttttttttgagatggagtttcactcttgttgtcccaggctggagtgcaatgacgtgatctcagctcaccacaacctccgcctcctggattcaagcgattctcctgccgcagcctcccgagtagctgggattacaggcatgcgccaccacgcccagctaattttgtgtttttagtagagaaggggtttctccgtgttggtcaagctggtcttgaactcctgacctcaggtgatccacctgccttggcctcctaaagtgctgggattacaggcgtgagccaccgcgcccagcctctttcagggaactttctacaactttataattcaattcttctgcagaaaaaaatttttggccaggctcagtagctcagaccaataattccagcactttgagaggctgaggtgggaggattgcttgagcttgggagtttgagactagcctgggcaacacagtgagaccctgtctctatttttaaaaaaagtaaaaaaagatctaaaaatttaactttttattttgaaataattagatatttccaggaagctgcaaagaaatgcctggtgggcctgttggcctgtgggtttcctgcaaggccttgggaaggccctgtcattggcagaaccccagatcgtgagggctttccttttaggctgctttctaagaggactcctccaagctcttggaggatggaagacgctcacccatggtgttcggcccctcagagcagggtggggcaggggagctggtgcctgtgcaggctgtggacatttgcatgactccctgtggtcagctaagagcaccactccttcctgaagcggggcctgaagtccctagtcagagcctctggttcaccttctgcaggcagggagaggggagtcaagtcagtgaggagggctttcgcagtttctcttacaaactctcaacatgccctcccacctgcactgccttcctggaagccccacagcctcctatggttccgtggtccagtccttcagcttctgggcgcccccatcacgggctgagatttttgctttccagtctgccaagtcagttactgtgtccatccatctgctgtcagcttctggaattgttgctgttgtgccctttccattcttttgttatgatgcagctcccctgctgacgacgtcccattgctcttttaagtctagatatctggactgggcattcaaggcccattttgagcagagtcgggccgacctttcagccctcagttctccatggagtatgcgctctcttcttggcagggaggcctcacaaacatgccatgcctattgtaggagctctccaagaatgctcacctccttctccctgtaattcctttcctctgtgaggagctcagcagcatcccattatgagaccttactaatcccagggatcacccccaacagccctggg

SEQ ID NO: 1880725 - DNA, 4001 bp, Homo sapiens
cccaggctggagtccagtcacaagctcttggctcactgcaacatccccctcaggctcaggcaatcctcccacctcagcctcccaagtagctgggaatacagatgggcgccaccaccacgcccacctggctagttttttttttttttgagatggagtctcgctctgtcacccaggctggagtgcagtggcgcaatcttggctcactgtaagctccacctcccaggttcacgccattctcctgcctcagcctcccaagtagctgggactaaaggcacctgccaccatgcctggctaattttttttttgtatttttagtagagatggggtttcaccgtgttagccaggatggtctcgatctcctgagctcgagatccgcccgcctcagcctcccaaagtgctgggattacaggcgtgagccaccgcgccgggccctgcctggctagtttttgtattttttgtagagatggggtcttgctatgttgcccaggctgatcttgaactcctgagctcaaggaatccacctgccttgacttcccgaagtgctgggattacaggtgtgagccagcacactggtctcactggtggttttcctcactgcctctcactggactgagtgtgatcatctcacttccctgccacgccctctgccctgagagctaggcctggcacccagagccctgagtgagtgctaagtgagcagcaacatctcctggagtgacaagaactctgttcccagtttctccctcctgctggacacttgcccctcaattgctcatctcagcctgcagtccatacacccctactccaggcctgtccttcaggccctctccaccctctcttgggcctgagctctgggtggcagtgaggtggccgctgtcaggaggctcatgcaggaggcgcgaccaaagacccctgggctctcacaggcccctgatcacacctggtgacacctggaaagtgtcccaactcaggagtgaggcgggcaagggggctgagtgctggagtgtggccatgggaccagcacatggcatctgtgtggcactgcctggcagactctgggaaggtgggagtctctgtttcagcctccagacttcctgtccaggtaggggacaacttctaagaggccgaggcgtttgtcacgcctggggctgtgctctccagcagagcacactgcacccggctggctgtcttcccctggagaggggctctttacactcaccactagttcgcctctggggtgtggggatgttggtcctgtccccggatgccagcccgactgtggggtctagagactgccacaccatgtctctaataaaccgagtcagaaatagtgccctgtggctaagcggcagggcagcggtggcctgcatgatcctgcccttgcagctcaaagctgcttgggcctcttggggccatgcagtttccatgaaaacaaggaagagcaccaacccccagagataagccaataaacgcaacctgcaaaaggagagaacaggcagcaagagaggcggagggaacccggggggcctggagagagaggtgagtgtgtggcagctgggctgtggagcataaccagagaggccgcaggctgcgggctggaggaaaacgagggccttgcaggggggctactgttcctggcagagagaaaggaggcctctggaggtcagagagagacacaaagagagcagacagagcgagggtcagtgaagaggccagcacgcaggtgcccgggccctcttgggtcagcgggcgtgggtgcccaggccctggcacttcccccatgaaggcagcctgctttccacgccttctcatgatgcctgtgagggtctcctcctgcttccaggcagggagccagctctgggcctccttccattggcctgggaggttgtgctgcatttcagagagagccatcgggagcagaagcaacatgcggagaggatgagcagggacggaggctccaccatgacactctcagtcccagcatctcctcagcccagtcaccacactggagagggaggaggcccttcagaccccgcaggcctctgcaccctgggagttccgcgtctaactctcttcctgcaatcatcagaggcaggaactgggcccaggtggggtaaaggcaggaagacgtctgcctgccctgctccctgggcacttccctggatgctgtataccacaggacagagatcgagactgtcttttgaaaaacatttagagacaggatctcaccctgtcacccagactggtctcaaactcatggcctcaaaggatcctcccgccgtggggtcccaaagattataggcgtgagccacggcgcccagccccaaaccgtcttgattcccgactttgtaggatgaaggcctgagtgaagaggtggggaggagctaagcggaggagccctacccagcctggaccaccctggggcacgcactctgcgtccacctgacctggacgtgcctcctaaggctggcagcgaagcccaggagcagagcccacggatgggccctgcaggtgctgggcctagaccgaccgacagacaggcctggccactcagggccacgccgccgctgtgccgcgcctgccccctccccgcccgccacccccgccactggggcagggacagcgggcccagctctgacctcgggtctcgggcacgctcgacgtgggcagagacacggccgcagggtcctggggctcgctcgctagcctctgcccggcacacatggacttgagcatctggaagacggcgaggggggccacgttcagcttcagcaggtccaccaggatcctggcggggacagacgcggggccggtgagccctctccgcccggcgcggccacctccctgaagaccggacaaggacgggggcgggggcagcgggggctcctcccgaccagcgggccgggcgtacccggagagcagaggtcgggggtgtctggcgagcatgcggcccccacccgccccgctcacttgaacacgtcggggtcgataccgccgcccgccgcctgagccagctcgtacagctccatctcctcggtgctcagcaccttcttgcgccgcagcgccagcttctgccgggccgcctccagccccgggggcgccgccgaccccggcccaggccctacgccctgcgccgccatccgcgaggcccgccgaaaggtgcgccccgccccgccgcgccccctagcggatgcgcccaccgccctctccctgcagcgccagcgtctggcctcccgggctgccctggcgggagcggcgggagcgcggggacggggccgcctcctcggcgtcattggagcccaacagttagtgggcgctcacggtgtgctgagcggcgcgctaggcgtcgggagtggcatggcggactgcaggggccagctgcttggcggtcagggcgtccctgatagacttgcattggtcgtgctcgcttaggtggcagcacccagcccagtgccaggcatacattgggcgctcagtcaatacctgtttcaagaaagcgtgcaattttctggtccgcaccggtgcaccactaggggtcgctcttcggggggggtggggggcactaatcaacaaccctgcttacgcgcacgcgcattccttgctagggagaaagtgcgtgagccctaccttggggcgccagaggccgccacaacgcaggcgcattcagctaaggaccactccctccccccgcactcctgcctcgccatttcccctccctggccggccggccggccttcttcgctttgcgcacgtaccttttgaggtaacggcccaaagaggtagaagcgcttttcccgcccggccgcggggcgtggctctgcgcgcagcttgatgacgacgttttggcgcggtggcggaatggcggcttccacctctgaagcgggcgacgctatgggtcccacaggtgagtggcgcgggacgcgcgcgtgagacggtccgacgccctgggggcttccgcgagcccctgcggaggccatctccgttcctccgcgagccccagg

SEQ ID NO: 1880726 - DNA, 4001 bp, Homo sapiens
gccatcttttcaggtagagtgaggtgggtgggggaggaggggttgcaaggggaatgtttattgtaaattggctgcatttatgaagttgatgtaagtgtactggatccgagagcatttcttttaaatgaagccacatgaaatgacttcgagatgcctgcttctgaatcttgactatcttagcatatccttcagccgagtcataaatgcagattttatttatttaattaattaaaggaaagaacttcttaacccaggtaaaagttccatggacttccacatcaagggcacacagaccacggtgtgtgtttactgcctctttaaagaaaagttaacatagaaaagaaccaaagaccagaaggcagaaaacatttcttttcgacactgccaaaatacttgcaaatacacttacgctaggacatacacacaaaaaagaatgactctgacgacaacaagacctaaacataatcaataatcctgtaaatacctaaagggaagccaccaagcatcactgccatcggtcgtgatcttaagagagccacggtctgcatggaaggctacagttcgcttgcatcctttttgggataataacttaattgatttgtctcagtggctaaggatgcagacaagagatttattatggaggaaaaatatctgcaatcctgtttttgttttctcaacaagcatcttgccactgacctctaaatcaatttaaccttttctaaacagacttgcacattttttagataatttaaagctacgttttgttattgctgctgctgaaaggctctgtgagatgtatcacaacatggcttcagtaaccttcttttaaaaacaaagatgaaaaacaaaaggcctcaactataagctcccagctccattccttttcccagcaggggattgtgatctaaccactgaagtggctttcgagttcaatctgttaaaaaatgtatgaaacggtattaaaataggaaagagcatgtgtatgactcaggcatatccaagtatcttctgcaactaggatgtcacaggatttccctgtgctactgaaaaccttgagaaagtgacagtagaagttcctgtttctttctctttttttttctttaaatgaggggggcgcgcgcgaacacacagacacacacagagacacagacacacacacacagacacacgtcttccgggtttcctacgaatcagacaggttctctgaggttcctagcgaagactgcacaccagcgtgacgacttattaccgcactccgctacacacaaaggttttgggaaaaacccaaacttgttgcagagctgggtgaagcccccggcccggcgcgcttctgccctcgccggctctccgctcctgcccctgccccttcctccacttcccaccctgcccggcccgggcggcggcggcgagggcatctcccctgctcaggtcgccggccgagcagtccccgcggccgccttcctgggaaacaaggtcaccgcccagccggtccctccgaggaggcgcggagcccctgagcgcggccccctttgtaacgcggggctcgccgacctcggcgcggcatcccggccgccgcctcacctgcttgcgatagggcgtccggcagttgctgctgcccccggggttgccactgctgctggggaagatcatcgctgcgggcggcggcggcgggtgcgggcgcgggcgcgggcgcggggcagcctcgccgcgagggggagggcgcaaggaggtggccggccgggcccggggccgcggcagctctgggaactccctctcgccgcgcggcggcggccggcgggggctgcagctccgcgctgacttcccctccgccttcgacctccgcactcgcctaaaagtacggcgcggcagcgggcgagactcgagcagctcgggcagccgccgccctgcgtgccatggacgggagttcgcgcgcggagctggcggcgtcgccgactctcccggcggcagcggaggagcagcgccgccgcgtccccacctaccgcggcctcaaccaccgccctgagagcgcgccggccgggggcggggaggcggcagcgcaccgcctcgcgccgcgcccaggcccacccgcgcctccccgcccgcccgctgggcgcggcgcctgccgccccatcgcccgcccggcccccgcgctctccctcccgggatcggggccggagccggggccgggcggcccggggagcagccggcgcccccgctctggtgcaatggttgggtctggctccccgcatgccgcacattcctcggagtagccaacccccctcctctgttctttttccccctcggttctttcctaagcaccagcggcagctttgcaccccggctcgaagccccttttaaggtcgtcgcttcggggaccactctggcacctcggtcttccctctcttcttcacctttcgaactaggccccccgcgccactcttcaagaaaaggtgtggacaatcacccctacttcaacgaacacacgaccctcccgtcaaacctctgcaaatctccatcccccgattcacacgctaaaattttagcagaggaaacagctctccactccccagcccctcacccaaatacgatcggtaaagttttgttttatccctaagccagagtttaccagctttccttcaagatgataatatcaaggagcgaaaatcatttaaggccaccggtttggtaaacctttctccctaaaacctggaacagtgtaatccttccttatgttaattattagatgcgacacaaatgtgttttcttaggacacagaaactcggcaaaaaagagacaaagggaggagggacttccctttgtttcccgatgtaaatgacctacggctgctcaagccgtcccttttctcgaccacctttccgtggacgtatgaagccccgaacctgtgcagtgcagaaggcctccacagcagcccggactgacagagcctgcggtctctggataagccactgggacgggcttgccatccttcacattggcctgttccacggtgacttttacagaatactatcgctgcagtaaatactacagagttcttccttggtttctggtctcttaataccttcctggaaaggctcatctgccatgataatgaaaaatcctaacttgtctaaaaagtgaaggcgtatgccttctggcttccctaaggaaaacagtgtcccctatggaaatgaagtcttctggcaaagctgtggccattcaaaggcttttctagcagcaaggaactggaaaaaatattcatcctagatatcctgctggtgacttagtgaacctcttccatactcaggctcttccaacattctccagccagataactggaaagcctcacctattataaataaccgtataaaacacacatgtaattcctgattcttttcattaaaaaaaaaaaaaagcaaagtaacttattctgggcacagtgctaggtgcacaatggacgagtaagaacttgccagacaaaatttacgtaaaaatctgtcctttaaagtgattaagtatcaaacacagtataatgagcattcattgaaaattggtgtatctggtggaactattttctgctactccatgcataagacaactgttttgacttcccttttgctgtctcctctcactaggaccctttactgcaagttatcaagcacaagtataaaatagaaaacattcatcagaatgttcaagtcataggtgcctttctctgagaacttactgctcaacaccccagcagctcagacctgtcgtctgtgcatctatggaaaaaattccctgtacaacctcagttgtcaagagtggtctcttaggaaaccacaatgtaaaccacaaaagaagagaatagattaatttttctatggctgtactctaaggtcatgatattttggatgctgtgcaatccagaatgctaaaatttgattggatacactctgcaatagttttatggggataagaaaagtttttaagtgatgatgaaatttaaattagaaaactaa

SEQ ID NO: 1880727 - DNA, 4001 bp, Homo sapiens
aagccagatgcacccacggcaacaaggaaggagcttacagaggcagtgttgagtgaaaacacacaggcaatagacgtatgacccataaccatttacgttccttaaaaatgcaaacacacgaaacaacacattatgtcagaacatatgcaaacaaaaagatctctcaagcacagggaatgctggcctccctggacaagggcaatgggagtggcacatagggtaaagtatcttcacaaacagggacagacacttcccacgcccgatgatgtgaatgcaccgggggcacagaactgcggctgttccaccctcggtgtcagaggttccttcctcgacatcaaaacgacaaagttcaaggacgtggtggctcacacctataatcccagcactttggaaggccaaggcgggcagatcacctgaggtcgggagttggagaccagactggccaatatggtaaaactccatctctactaaaaatacaaaaattagctgggcatgatggcgcacgtttgtaatcccagcttctcaggaggctgaggtgggaaaatgattgaacctgagaggcggagcttgcagggagccaagatcgcaccactgcactccagcctgggcaacagagtaagactctgtctcaaaaaaaaaaaaagaaaaaaaggttcaaggaagaaaggaaaaaaaattccaaattcctctcttcagaaaaaccatctacatcagtgaacaacatcctgatatttttatgcctgtatatcaacagaaacacaggtatgctttcatgaaatgggatctatcaatgctattttaaattacatttaatttattttaatatcagttttcaacataagcaaatgaaagtaaaactagtgaattttctgcaccaaaacagtatggaccttagattttaaaatcctctgaaatgagaaaaacaaatggattctgcatattgaaagatcacaccatgtgtgcacaaactatttcacttggaatcactttggtctgaacaccagtgattcttttgccggactgcctttgtccaccttcctataaattagttttacatatacaaagttcacaacagttttcatccctctaccacgtttacctttacttactgtggctgtcttcagcctttcctctagggcagcggtgttcacgcggtagtgtgcgctgcaatcaccttgctaaacacagatgctgctggggcccacccaccagggcgcctgagccagcaggcctgggtgcagcctagacacctgcatttccgacaagctcccaggtggaggctggggccgctggtccaggagccacacttggagaacgatggatttctgtcaatagcaatttcagccttgctatgtcgtttgttgctgtttgaaatgtattggtttggttctgacactgtttcggttctgtttgcttcctgaggtctgacatcttattttcatttcttagtcttatacgttgttgacatttattttattgaattcatgttcttatcaaactgttctcttaggcaaagcacaggaatattttttttttctgttcacgagctgtgcgtcctctgccttccgcatgtttatcttgcgcatgctgtggtcccttctccagcactgagtcacgggtttctctgtgggacgtttgcctgtcacttgccctccccttccctgcctttccattctcttcaagcccgagcagctctgactgggtcctcatatgttttaacacagcactggaggggttttaactctttccacaaaacctggcaaaggctcgtcttcccctcttagccacaggaagcccaggcagtttgtgttcaggccaccttcgggaagcctgcaaggatggtggtggcaggaggagctcagccgaagtggaagaaggttcgttcaaatgctgaggctctgctcctgcttctggaatcctgtgaaatggcccagaccagagctggcttcacctcatcacagggagagtggtgcatccagtcctggtctcaggccatgcccacaggccaacgcatccctggagcctccacttcttacggagagtttcaactcacagttatcttcccatgtctgccagaggcattgcaagactccctgtctccagatcccaagcacagaggcggcctggggctccgcttgtgtaccagtgggactcaggcttggtggcaggtcagagccacacgaatctgccttctgctctactctgaaatcttttgcttattttattggctactaatttttctttctttttttttgagatggggtctcacagtgccacacaggctggatggagtgcagtggcgcaatcagagctcactgcagccccaatttcctgggctcaagtgatcctcccgcctcagcctcccaaagtgttgggattacaggcgtgagccactacacctggtctttggctacaaattttcaaagtgtatggccttgtttgttttctgctgggattatttttctagtttttcctttctattctgttagggactgggggcaggacactgtgattccgcttaatcctgctgtctttgacatttttttaatgtccatgagcagggacaaatcttagtctcataagaatgtgcctgatttgggaagcaggcctcactcagcaccgaccgcccctcctggcacagcactggcatcccctggtgttccataaacacagagactgagagatgagcagacgagtatgggccctggatgctccctgcagcccctctgcagagctggacctgcagtccaagactccttggggatgaggggtctagggtttagtccctgtccctggacagtgatggagctaaaggcatggggcagcgtctgtcccttttatggggggaagctgaggctgctgggggcagtgcctgtcccgagatgtccccagactcaggtgctctgctccttccttcccataaatcctgggcctcccctgtgtcctaagggcctgcggccacctggctagtcctgttgctggtcctcctccaggtgcagggcaccggtgcccgcaaaatgagccaccctgcccctgaccactgcagccaggcccctgagaggaggcacatgactcagcccaccccctcctggcattgttatcctcctgccaagatcctgaggccatgccagaaaggacctggggccagcctagacctttccatcatttcacgtaggcagcagccttgccaaagtccccgggggcagagcggctgtttgggtctggcgtctgctccagcctggcgtcccccatgctgagtgtggccccagggccagcgccgcaggctgagatcccaaggctgcatctctggctcggacctctggtcacggctcaggctgggtgcctggctggccacctcccctcacagtgctgtcagactctcagtgagctcatggcgggaaatgattacctttccatgtgaattcaggccgggtctggacaagtgaggaggtgcactttcctccacatctgtttgaaagtgattttcttcatggaactggcagcgcggatcaagaaaaatgactcagaaccgacaaaaactccaggtcttccaaggaaacaaaatcaaacaccagtgtgcctaatggaagcctctggcagcctggagagtgcagctcgacagcccctggtggtcccagggcctctgctcgctcgttagccagggtttccagctcaaggagcaagctctgtccacgcccagagccacctgcccctgtccccagagccttggggccatagtaactttggaggaaactggtccccaaagctcggccaacccgccaccatccgcaatagaaggcaaaggctgcaggaccaccctaggtggggggcacactggccctcccaggctgcaccccgcgcccagagctcatctccagacacagccatgggggtgacttcccagggggcctgtggaggctgcttctttattgcaaggtgcctccccgagacagaattccatggttttggtagcagactcccaggcaagcctccctgcctct

SEQ ID NO: 1880728 - DNA, 4001 bp, Homo sapiens
gggttctgatcttctgggtgaggcaattccaagtggtctttggaggccgccttacccctctcccaggagctttcacagatggagtagctgtgagaatccagtggggctctgagtctccagtctacactcaaccagtgtagagtgacaggtgagctttggtggctggacacagtcggttcagttattctgaccataggaggctcattccagagctactttatccagtgctagattttcctgatccatctatgaatctcttgaaaattgtgctacaatgtccccatttcccattttctagcatctctctgaatcattcttctaagttaccaggtaaagtttttgttgatgaaaatgatgatgataatgtacaaggaaataaaatctttttttttaaccccaaagactgcccaaagagagtaagtcctattaactggcagggacttggttttctgagcaccacaatgcattaagggtcatgagtttggaaattaaagctggtggtgttgcattctgcataatcaagcagggaggtttttaaaattgggggagggatgggaggtaggaaccagtgaggcttagcaccgtgtgaggaaaggcaactcagaatgtgaatattaagttgtttgctacagtgtatgtgatataaaccctctcttacgtcaccctacaagatcatcaccctctgctgctcactagtgtgtgtatgtgcttttgagagaactaaatagcatgctgagttctgcattcagatttgtttgaaacaaaaacaaacacctcacactgatgttatgcccatttcctcatataaagttctcctcacaatctttggagatagatatcgttgtccttatttaatagatgaagactgtttgtaaactgaggcttacagaacttacataacctgtccacagccgtacattagtgaggggaagaactgcttcttccccatgtgggcttccttttgcccaacttccagcatcaaggagccccaagagtgcacggcactgcccatacagcagataagtcacagagccaaccaagagaatgtgagtgaatccctcttcttaagttttggaacccacttctagagttcacgtcaggtcatttgttgtgcctaggtctgtcagtcatggctaagagtgatatgaaaaagtagaagacacaggacagatcagaaaggagaaaggaacacaggctgtgactcagggtagaatcccagccctgttgcaataacagactcacttaagcaagttgggttttataacagttatgaacgttagtttttctcatctttaaaatgggtattatagtacctcccttataggattatggaaaagattggaactgacaaagttgaagggtctaccaggcccttgtgaatgagaaatgtcatgttattattggtcatgaaccatgctgttaaactgcctgtaatctcctagaatgtgaaatctgaggaggtcttgaacatcacccaattcaactccttatctataaaatggagtaaaggagatccagaatggttgagtaatttcccgagttcaccatgagttatggtagagttaggagcggaaattcaggggagatttttttttttttttttttttttttgcacctacgagcccataagaaattgaggactgcaggaaggagttctgtgaagcactataatgtgtgagataaaaaatttactccatgagcaatcagaaggaggtagaattgatgcaaaccgagccaagaatgaaggttatatcttgattagaacttgaaggaagagtagaatgctaatggacagagagtggctgccttttcagataaggtgagaagtgctggaagcttagctaggtggccccgtttccacagtgtgactaagaacagaccagtctgagagataacagaagcagggagacctgtatggtccaagttcagaagtgtcctgagttataagcacaagttactcaggaacacttctgaactgggaccacacactctactcttcagagaggatgactttgggatcataagggatacattcttggtgacactatgggtctgatggggaacggtcaccactcttccttgagaaatttttgtcctaattctcaaaaggtgtaagagagcatacagattaaaagagtggtgattggggatgggataacaactactagctgacatttgttgctcattatgtgagaaacttgcacttagtttcttacctacagtttccaggctataggtaaatttaaacattttttgcttgacaattggttgagtttgtctaaagacttgggatcaatagaaaggaatgtttggtgcaataagaggttgtggagaccaaagttttgtcatgcaggtgaagcttttagctagcaggcttcagagagaacaggctgtgaaatgtttaaagtccgtgttgatgttaatgccccatacaggtatgatgaggcctgttcgaccccacttcccttcatggcctgaaccagtctttcagattaaattttaagagccctggctgaggaggaagtctgtttagatggttggggggccttagaattttatttttggtttacaaagtaaattatatcatatgttagaaagtgaaaagtgctatggaaagaaaagaaaaagcagaacaggataggaggatggacattcaggggagggcacagcagggaactgcacaccccagcaagatggtcatgtcattgagaagtgacctttgagcagacttgaaggaggtggggagtatatttgttttagcaaatgtatgtggtaagtcctaacactcttcttattggcaaaacaatgaaatacaggcaattagttgaatggtgatgatgatgattttgatgaagattaagatggtaatgagctgctggtgcatttattttagtctaggtggtgctttccagaaatttgtttgtttgagatttgtaaaacctttgtaatgtactatggtttggctgggttgagaggacatggggtggtagtggtgacaaagccaagaccttcaagcccagattccccttcactgctcccagtgtctacattaagaatttaaactctctcagcctcactttcctcacctctcacctaaggtactgacagcctctgccaccagcgcaccatgtgactcagcaatgtgtccacatggccaaacatctcatttctctaaaacatgcagaagtaaagtcttctacatatgatttcacttaatgaaagggctccacttatttttttaaagtttgaaaccattgccttagtctctaaggtctcttttaagtcatcagatactttcaagcaagagtgatgactcccgaaagggtgctcttaacccgctcatgtttaacgtaatctcaatggtttgtctttctgttttcagagtaaaacccaggaggagtccaatgaaaagttaagagaaagacattaggtccacacatttatcagatcaagtttgagcagagtcctggaggaggtgagggcaggggctgccagtggaggtggtgagaagtgctattcttcttggtatatctttgaagggagagctagaagattttaccaatgaaagaaagttctcatttatgcaaaaggcaagtcattctgtacctactatataaggtcatgacagctatgatctccaggagatgaagaattctctaccagtggactaatttagagctctgtacctgccttgcagccctgtgttctaggccaaagggcagcacatatggtgaagttaattgaacctgtgtgattcagttagggtgcgttaaaactagaaaccactataatcagatggaaaagtgcctacatgcatcccaagagagcttgatgctctctgtgggaaactgtcaaactcacaggagggtgggggcagcatgtggaaagggaaggaagacaaccacacgcagctaaagcagatgagctgtggggaagagggagaagatgtgaaattagagagaaggaaattgcagggagtgaggagaatcaacccaagccac

SEQ ID NO: 1880729 - DNA, 4001 bp, Homo sapiens
attctagttcttttgctatttccaccacatctgcacttacttcctccactgaagtcttgaacccctcatagtcatcaatgagggtgggaatcaacttcttccaaactcctgttaatgttgacaatttgacctcctcccatgaatcacgaatgtttttaatggcatctaaaatggtgaatcctttccagaaggttttcaatttgctttgcccagatccatcagagacatcactatccatggcagctagagccttatgaaatgtatttctcaaataataagacttgaaggtcgaaattaccccttgatccatgggctgcagaatggatgttgtgttagcaggcatgaaaataacattaatctcctcgtatatctccatcagagctcttggatgactaggggcattgtcaatgagcagtaatattttgaaaggaatcttcttttctgagcagtaggtctcaacagtgggtttaaaatattcagtaaaccacgctgtaaacagatgtgctgtcatccgggctttgctgttccatttatatagcacgggtagagtagatttagtataattcttaagggccctaggattttcagaatggtaaataagcattggcttcaacttaaagtcaccagctgcattagcccctaacaagagagtcagcctgtcctttgaagctttgaagccaggcactgacttctcctctctagctatgaaagttctagatggcatcttcttccaatagaaggctgtttcatctacattgaaaatctgttgtttagtgtagccaccttcgtcaatgatcttagctaaagcttctggataacttgctgcagcttctacatcagcacttgctgcttcaccttgtgcttttatgttatggaaatggcttctttccttaaacctcatgaaccaacctctgctagcttcaaacttttcttctgcagcttccacacctctctcagctttcatagagttgaagagagttagggctttgttctggattaggctttggcttaagggaatgttgcggctggtctgatcttctatccagaccactaaaaccttctccatatcagcaataaggctgtttcgctttcttatcattcgtgtgttcattggagtagcacttttaacttccttcaagaacttttcctttgcatttacaacttggctaactgtttgccgcaggaggcctagccttcggcctatctcggcttttgacataccttcctcactcagtttaatcatttctagtttttgatttaaagtgagagatgtgcgactcttcctttcacttgagcacttagaggccattgcagagtcattaattcgcctaatctcaatattgttgtgtctcagggaatagggaggcccaagaagagggagagagatggggaacggtctgtgggtggagcggtcagaacacacacaacattaagttccacgtcttataaaagacgctgtatgtggcaccccaaaacaatgacaatagcaacatcaaagatcactgatcatagatcaccataacagacacagaaatcatgaaaaagttttaaatattttgagaattaccaaaatgtaacacagagacaccaagtgagcacatgctgttggaaaaatggcgctgatacaattgctggactcagggctgccacaaaccctccatttgttttcagaatgccctatctgcgaagcgtaataaaacgaggtatgccatagtacagtggcgccgcgaccgacaaaggaaagcctccgggaggtcaaaagagataccagagagtgcgtcccgcactggaggaagaggaaggtttttaccaagcagcgagtccagagcccgcgccgtcaacgacgcggtgctgccttttttccgagccgctgcgggagggggccaggacacgctcccttaggagagcgggcgggtcacaaggacctggacagaggcagaactgaggccagcagccagctccgccgctgagtccagccctctgcgcagccgccctgagctggcgtcccgagatagccgcttccaaaccgggcctgcgcgccgacgttccgctgcgccccgcgcaaaaccggaagtacccgggcccaaggctgagggacccggtggagcggaagtcactccctgaggcagtggcgacagcggcggcgagaggatgaacaacaagttcgacgcgtgagtggctcgtggccgcccccggggccccttccccgaacagttcccccgcgcccgcccccgctggggctggggcggcgcaaaccctgcggcaccggcttccctgctgggatccggctgcggccggacctggcctggactggcggggaggagggggctggggagcaatggataccggagtcccggagaccccagggccgtccgaaccgagggcgaagagctgggcccgggggaggggtggctgtgccgcccggtagggggagattttcggacgccccgccctggtggatgcggattgcctgcgacgtggaggggtggggacctcggcggtttgggtgtttccgcagtctggcagcgctgcctctgaatccagctttccccacacactccctctcccctctgagcctcagttttctcatctgcagagtggggacggtaacaccctttgtcgtagagtttggaggatgcaatgaggtaatgtggttgctgccctcgacgcggtggaaggctggcttaggaattatcttcctgagactcttcctactttctttctcctccccttcccgttcccgtcttccaacacactcgccaagacctaagtatacttgttgccctctcctgcccgctccggtttctagtttcagcatcaaacagtttggaggtacagagagaaaatgcagaagtatctttacttatccccctccaaggattgtatcttgaggtagaatatgttccttcctctcttctagtagtctagtaaatcgactgtctcttcatccgaaaacctggatttctagtcccagattcaccacttaccatctgtttgactgtagaaaagttacccagcctctaagccattgttgctcaaaccacattagtggctaggaccctgctgccacgccggggtgtgataagggtcagatcacactcagcgatgcttaaagatgcttgtgaacattgctaactattgcgatataaacgtaaagtggaattactattagtttaggttgtgacctggtgcttttgatgggaaattggggtgtttccaatacagagagtactgtgcaaattcagggaatactggatttccaacactccaggcaggtaggtcctcaggaatgttttctggttgctgagaggtctctgctacttgagaaagtctttgcccgacctcttctctatcctgctgtttaactgagcctgtccctctacgaacctctcccccgctgccgccccatttcatctctattgtaaaccctgcaacaactagctccagatccaaatcctgcctcagtggagctttctggaacccttataccccttcctccactgatttgaacaaatcaaatgtcatcctaagaagacatcttatgggtcatctagctcaagcctacccaaatcatttgggagtctgcagtaagaatggtaataatggacttccacagggatcttgctaggtatttttcatatatatatatattttttgagacagggtctcgctgtgtcaccctggctggagtgcagtggtgtcatcacagctcactgcccactcaacctcccgggcaccagcaatcctcccatctcagcctccagagtagccggactacaggcatgtgccaccctaccttgctaatttttttgtattttttgtagagacggggtttcgccatgttgcccaggccgatctcgaactcgggctcaagagatccacccaccttgcctcctaaagtgctgggattacaggcatgagccaccacccccagcctcatatgttatttctactctaacaattctgtgaaggggatcttgttgtctccttttacagatgag

SEQ ID NO: 1880730 - DNA, 4001 bp, Homo sapiens
tagcggtccatggtctgttaggaacggggccacacagctggtggtgagcagtggtgggcaggcctgcaagcattactgcctgagctctgcctcctgtcagatcagcttgacattagattctcacaggagggcgaaccctttgtgaactgcgcatgcaaggatctaggttgcatgctccttacgagaatctgacgcctgatgatctagggtgagacagtttcatcccgaaaccatctcgcatatcctcccaccctggagtccgtggaaaactgtctttcacaaaaccagtccccagtgctaaaaaggctggggaccacggatgtacctcacttccatcaggtactctacagacaaactctttcaaaacaaccactgcctttccaattctattaaattatacttggcaattcttgtccctcaagaaccgtaagtctaaccaaatgatgaaaccccgtctctgcaaaaaatacaaaaattagctgggcatggtggcctgtagcatgtgtgttgtcccaactactcgtgaggctgagacagaagaatcgcttgaacccaggaagcagaggttgcggtgtacccagatcgtgccacggcactccaacctgagcgacagagtgagaccctgtcttaaaaaaaaaaacaaaactgtagagtttgagagcatccccaacatttccctgcaagataaacgtttacatttgtcttccttccaaaataaaaatgtaacctcaaaatcaaaaaagcattgaacatgctgcaacttgagattacatatagcatattaaaaataaccttctgtaacttcaataagtgttcacaattatacaaatgacattgtattttaagtaatttaataaattgctttgggaagtctcaatttcttggtagttaggatgaaggtttccagtgacacattttcttaaaagagaatatgctcttggttacagcgaaggggacaccagaaagtgaggtactacaacctcagactgcaggactccttggcttatccatttggagtcttgtagggtagcagcttggagagaactgcctgactcgctcttccaaaagcaggcacaaagagtgcagaaagttctgcagagtagacatgtgtagagatttttaaataatgttgtactaggccaggcacagtggcttacacctgtaatcccagtgctttgggaggtggaagtgagaggatcactcgaggccagcctgggcaacagagagagatcctgtctctacaagaataaaaaacatataaaaataatgttggattaaagtgcatggtctaacactttggggaagggaaaaaaaatagagaaatgagataaaggtatcaaggacactccttataataaaacaaattaaccactgcacacctagtgcccacccattagctgagtgagggcttgtccatatgccatgggcgcaattggatacacagtcaagtggtgactgaggtgtcttcatttcacagagaagtaaactggttcacaggatcagaaagttgtctgatgttcccagaaaaagtagagggagagggcaggaactgagaacccagatgggccgcccccagcccagagctgcatggagggaaatgggcatccccatcctcgctgagcacgtccaagctgatccttgatccaggcaggccacccctaaaaccccatcccggaggcctctagacaccagcaccccttaacaacaactactatcctccccacccatacctcttctcagcctggtttctcctggcttaaaacatcccttatcttgcttctctccatccttacccccatccttgaaggcccaggttcaaatcctgtctcctcttccatgaggacagccttgattcccccagtccatcgatttcatcctcttctcctggcactcaggatcccccaaaaggagtaccaagccctcaccacctggaatccactctcctggctaccatgcttcccaggagaaatggttccaggtgagccaggaggctggaactaagcagcctgtccctcaggtggcaaatgacagccaagggctggcaggccccgcccacggcacacagccactaaatgccagcgctcctcctctcacactgagcatccagttaaattgggctccctctgggatgctgcctcttctccacagtcagacatcatcctcctcccagaggaaaacacttctagtgatgtgtgaccctgggtggcaacttcagagcaaggcggcaaagaagcaaaccagctccctgctccatctcggattcctgtcccgcctcttctccctttctcaaaggctggttaaatcctaacaccttactgacaagtgtttcaggactgttgttttcaagttgttgctttttaagtatcaaaataaaccatatacattttaaaatacgtatcctcaaaaaaaagtaacactttggccttttatccaaatgttctataaaaggggaggcatcattcaggccttcgaccaagacttgcttccgtatttaaagaagtgcaatagtaacatagctttctccggccacccgccaagaaaagtttttgtcgccacagtaaaaagagaacatgtttgctcaatatgtgggcactattgaactgcttaaaaactgggcctcttttaccaagcaatttgagtcacctcagttttaaacgagtctctgcacgttcccttcatataccataggtgatcacatatgtggagggacgagggaccacagcaatcccagtgccacgggcttccaatctcgccggtctgcctgtcactctccctgggggcgtccaatcttctcccccagcctccgctatctctaaattgatggctgcccactctgtggtccattgtgaccttcttctctctccctctctagatggtgcccatgggcccctagtcgtgagtggggtagagatgaaaataaagaatcatcaccctgaagccgctggtggctacctgaagcttcatgataccattctctgtatctgcacttgtttgaaaatttccattataaagagttaaaaaaagacgatccatcagaactttgaagaataaaagttttttaaaaaagagaaacattcagttaaaaataggagtattcatgagagatattttaagttcatttgaaggaaataattccttatgtggtaaaggaaaagaacaaaaatataatggctgcatctcaagaataaagttacataaaagttccttataaacaagcttcaaagacaaccataaaataataaaggtaaaaatatatctcactagttccaaatgttgactatttagaaaggatagcatttgtaacacttcgaccctttcattattagacaaatatatttgaatctgaaaatatcattcggcttcccagtgaacaatctagagccagacctggagggttaaaaacacacatgcacataaaactcaccacaattgtgttattccctgatcaagactcaaaaaagaagtactttggagaaccagttggatgttaagtgcttctcaaagaaaataaacaattagaaaaatttctaccaggcactttgggaggccaaggcaggtggatcacctaaggttgggagttcgagaccagcctgaccagcacggagaaaccctgtctctactagaaatacaaaattagccaggcatggtggtgcatgcctgtaatcccagctactcaggagactgaggcaggagaattgcttgaacccaggagaaagaggttgcagtgagccaaggtcatgccattgcgctccggcctgggcaacaagagggaaattctgtctcaaaaaaaattctgaagcacaaataaactgcagcaagtttatggtccatagaaatatcttcccagagcattaacactttcatattcatgagttcaatggattccaataataaacatgtgaaattggctgtgcaggtttcatgcgattctgcagggaggtgggaaacaggagctaagtgggttgccatagctacaaagacatttgatgtcagctctggga

SEQ ID NO: 1880731 - DNA, 4001 bp, Homo sapiens
aagcagtactagttgttcctttttttatgtgtaacaaaccaaatgaatttagttactgttattccagaccagaagactggaatacaatgactcctatcagtttacatttcctatttgaaggtaaaagagttgtttctctatatcatctatttgatctttcatttctcaagataaagttcactgatttctggaggaattataaatagaagtaatccatttagctaagacaaaaaagacaataggacatattgaaattttattataaaaagaaaccaaatttatatccaaatagaaaaaaaagtttcctcatcattcatgcattatccagaaaatcttaaaatttttaataaaattaccagcctctcacctgggaataggtgtgtaaatattttatatgttgtctttaacttaatgagttatcatggaataggaagtttttaagcctgaattactcagcactattctacttttccaattcattcaaatgtaatttactactattaaattagtattaatttatttattattatactttctcaatggggccaagcacaatgttaaacatatgatatagttttatttatgtttcataatgtacggtttaatggacactaataaccatttgtggatttcttgcataataataacatacagaactctaatagtcatagaaaaccttcactgagtattacctatgcatcagtgaccataatttgtcgtgttcatgtgatatatttagcgatcttcacaagcttataatgagggaaatactaccggcattattcttctcaataaagatgaagaaacaaacgcttagagagattaaataagttgccccaagtcactaacccagatattaagcagcaatgttgatactggtagcagacatgtctgcctccaaaacctgtacttctaaccagttaacatctttgtttctaatgtgtatggcttctatgggtacccacatagaatgggtacattgttgaacatgacacatctgtagccatgcttccctcattagtccatatcacaaaagaagagttggttttccccatgtctatttctcaaccctccgattgtgctctgccttctctctgtgtgtcaactactcccaaatatttaggatattcctagttttctcctcagtgcatcacaactctgtattcagggttgtgcctacctgataaccttaacatccatgccattgtttcccttttgatatgtgagttatccttaataactcattcatgcttaccactcatataagtaaaatatgtcaattctaattttaaagtaaaatacacccacttgtctctatcttcatgtcttccttcactttagtccaattcataggcttctaaaccagccatctaaaatccctttgccttcattttttctccttatatttgttctccacacagcagccaggttgactgttttttaaaacacacaaagttaagcagttaacagactggggccatactccacgatggctggttgaagaaattcaccattctgtaggaactaggatttgtatggctgcctgaagatccatgaatattgactgctgtggagcaatcccccttcccgctccaaatcctggtttctgcaccatgcctccactgggagggcctctcattctaccaaccggcccacctcgagggcctccaggacactgaagacaattatctcatgggaaaaatatggaacgcttcatgaatttgcatgtcatccttgcacaggggccatgctaatctctatattattccaattttagtatatatgctgctgaagcaagcaccaaactaattttttacgtgagtaatacctacatataaactacaacatacatgcacatagacactaaaacagtacaaacatagagtgaaaagttaaaattcttcccacaactgttgattgtattagattggtgcaaaagtcattgtcgttttcgccaagttactttcaaaaaccacaattacttttgcaccaacctaacagttgacacgtatgtgaaaattgttgtgttttgatcctggatccttatagaattcttgtaactttgctttaccgcaactgagtacattgactcttggaataaaaattatattttctgtaaaatatatgtttaggttatttattaactatatataaattttcctttcgatttattgtattggctagatcctgaagatgatgctgggtagacactgtgaaagagggcatccttctgtttttcccaatttaatgagaatgcttctgaaagttcatatatgtgtattgaagtttttagaggattccattcattaaacagaggagttgctttcttctctcagcatggtaaatgttgggtcaatgaaaaaagaaaatgtactgtatacacacaatggaaaacccttcagccataaaaaagaaggaaatcttgttcctgatgacaacataaataaacgtggaaaacctacgttgagagaaatgtcaggaacacaaagacaaataccacataatatcacttatatatggaatccaaaaaagttgaacccacagaagcaaaatggtggtttccagaagctaggggattggtctagcaagatgttagtcaaaggatacaaaatctcagctggaagagataagttcaagcattctattgtatagtatgataactatagttaacaacaatctactataagcttgcaaattactgagtacactttaaatttctcactaccaaaaaaaaaagtatgtgaggtaatgtatgtataaagtagcttgatttagccatttcacaatgatttgacagatatagcaaaatatcatctggaacaccataaataaatacaatttttattcgtcactatacaaaaggagctgatcaatagtaacaattgttgaaaatattttaactggatctgagacattacgaatttttgtagaagtgcattagggaagtgccttaggaaagaaaatttttttattccaggtgtggttgatagagttgaattacagtaacattttgttttaaataacctttttaaaaaatacatagctaggtgtggtggcacagagctgttgtcccagctgcttgggaggctgaggcaagaggattgctagacccaggagtttgagtctagtctgggcaacatagtgagaacccatctcttaaaaaataattacttttttaaacctaagaaattagctctagttggtcaaaaagtataattattttaaaattactgcacttatttgatatattttaaaatgtgagtatttgtattcatgttcacattgaacatcataaatgaaattttcatcatatatgagattattttatagtttttgtttgttttcctttgctaattctgttttgcataaagttaaatgtcagcttctaagcattcttatttcccatatttgtgtctagattaagaaaagcaaatatttgttttttaagactttaaagttggttagaagcagtgtttatgttataaattaacctttctcgttctttactttggtcatcaatatctggtttataaaaataaatattttcaatattttcataactttttaaagttgaaagcaagaatttaatgttctatactcctctcttggtatctttagctttaaaaaatacatattaggtttgaaattgtcttttgagaatatctttgatatttttctcttggatttgatacatagggctcttatttttcatatatagatgagtgtacacagatatgcatagaaattaccaaactttaaacatacatacaagtgtgtatgggaataaatatgggttgtttggccaagtttaaaaatttcatttattcttcatattaagccaatatacgtgtatgatatcattcacagattgatggatattttctttgtggcctaatgtcatcaatgccttccaattctataggtctcattgtaaagagtagtttatgcttctttggattcagagttatccatgtatttattaaaacatatatatagttgtg

SEQ ID NO: 1880732 - DNA, 4001 bp, Homo sapiens
tcttttttaaacctatcattttaccccatgagactataataatgcctggtacataggaaggcacttaaatatttattaaagagaaaaatgaatgaatgatttcttcatagcattatttataatattcaaaatttggaaataacccatatgtgcaacccaaataaaagaaacagttaaataaaggatacctaaataaaatatatcaagtagataacataaataatgttttggaaaatattttatgtcatatgaaaaaatgtttaaaagataattttcaacattaaacctcagttatgacatcaatgagttttctctaattatatagagaatgaaatatagttatagctgatctcattttttcttggttctgcttacccaaagaaataggctgtgtaaactctaaaggcacctcaacttctctgaggccacgcaaagccctcttacctcagagcccttgccttgttgatacatgtagttatttcagctttttaggcttcctgcattcctcggccctcttttcctgctgctaactcttttcatactactatggccttactttatacctttatacctagttaagcagcaaagtcattgaacccacaataaattagcctggaataatattctgaaacattcaaataacttatggatcaattctgctgctgtcttgagttcattcttacacttaccccttatgaatccctgtctgttgctttgaaactatgttttacttctggagcacaatcctcactctgtcagttacaggtccatgcttcctctggtaactcaaattactcctggccatgtgtacgcctcttctttttaccgcagcacatttgatatcagaaagatataatgtaaaactagattatccatgaccccaatattataaatactacataagcaaaacagtgagttttggcaggataaactgagctttatttctctacatcatctgtcccatgctaccaccccatcattcacaccatcttcctctcttacaggtgggttggtcatgggaattcattgtaaatatgaaatgttttgtaatattcttctaaggagggggaatactattctgagaggagggggaaatagtgattggaataaaaccagagcccaaattatttgcttgcaaaaaattaatccaagttaggtttatggcaccacaaggatttaggaaaaactttatttggaattctctagagcagtgtggccacaaacaggttttctaatttttctctaaatcgcatttgaaaattgtgtacctcctcacacttactaagttaaaataaaatttgtttcattataggtttatgaagttccaagtaatgcaatttttcaagtttttgtaaacttaaacattaagttgtttttgcttttaaagctgatgagtagaatctaaatatcatacagctttcagcattcatttaaaatagttgagtaagctctttttaatattaaagtaatttacacttaaaaattaacttttatttccattccacttccctcatgaaatttttcactgcgtaagttatttattctatgtcatattcttttattgatgtctccttaatatttctctaaaaaaacatgcatataagttaattttttaaaaatttctaatcaaaattatagtgtgtgtggcagggtgtggttattgaacacttccttactttttgaaaacaaaaggtgttctaggccctcgtcctagaattagtcatttctccaaggagctctggccccttttcttgaagaatggaaccaaattctgagtgctagggacactgttattggagtgtccttgattcttgactctcttagtttagagcaaaagaaaatacaggtgtatgtgataattgatttacatgcatgtacttataaatatttctatatgtaattctctctctcactcgctctcactctattaagcaggtgtgaaagtaattgcagtttttgccattataatggcaaaaaccgcaacttaatggcaaaaactgccgttacttttgcatcaatttaatatctatctatattatggtaaacatgagttcatactgatgttgccagctccaatacattaccacataaattattctagcatcttccccttgagtctctgtaacctcctattccaagaataagaaatctgttttttgccatctgccatcaacacacttaattttttatttacggtatacatgcataattccagaattattattttatataccagcgaaagcaactttatcaactagattatgggacttgtgtatagttgcatgctttttaaaatgttttaaattaacagacttttagagcagttttatgtttacagaaaactaaaagaacagagtttacatattccctctctccctccacacttagtttcttccattgttaatgacttgcattagtacaatacagctgttatacttgatgaaccagcattgaatacattattattaactaaaatccatagtttacattatcgtttactcttggtgctgaacattctatgagttttgacaaattgatgacatcaatgtaccatgacaataatatacagaataatttcactgtctaaaaatcccttgtgctcctattatttctttcctctgtgctttaaacatcttgaatccacaaccacagagttttttctgtctccacagtctgctttttacagattatcaaatagttgaataatacagtatgtaccctttttagactggcatcttctaattaacaatatgcatttcaagttcctccatgtcttcattgcttgatagatcttttattttcatggctgaataatattccactgtatgaatgtatcatggtttgttcatccacttatccactgaaggacatctggctgtttccaaattttggaaattatgaataaagctgctataaacatatgtgtgcaggtttttgtgtggatatgagttttaaactcattttgataaataccaaggagtgtgattgctggatttgtatggtaaaactatgtttagtgttataacaatggccaaagtctcttccaaagtagctgtaccattttgcagttccagcagaaatgagagttcttgttgctccatattcccaccagcatttgtcgtcatcactgtatcaaattttatctattctaacaggtgtacagtggtatctcacagttgtttgaattctcaatcccccaataacatatgatgctgagcatctttttatatgcttatttgccgtctgctattgtttgtttgtccctcatgaatctcatgttgaaatttaatctccaatgtggaggtgttgggaggcagggtgtaactgtaggtgtttggttcttggggatggatctcttatgaatagattaattccctccctcaggggtgagtgagttctcactttaataattcccaacagagcttgctgttgaaaagaggctagcacttctcccctctcactcttggtttctttcttgccatgtgatccctgcacacactggcttcccttcatcttcaaccataattggaagcagcctaaggccttcaccagatgcagatgttcaatctaaaatcagaatcataacccaaataaaccttttttaaaaaaaaatgaatcacccagattcaggtatttctttacagtaagactaaacaaactaagacatcatctgtatatctttttttgtgagccatctgtctaaaatcttttacccattttttcatcagaattcttgttgagttttaagatttcttcctgtgttttggatgtgaagcatttttcagatatgtgttttgcaaatattttatcccagtctgcagcttttaaaaaattctctttacagtgtcttttgcacagcacaagcttttaatattaagtaaaacctaccaatttatttttcttttcatagatcttgcttttggtgctgtatctaaaaaggcattgtgaaacacaacatcacttagactttctcttatgttgtcttctaggagttttattgt

SEQ ID NO: 1880733 - DNA, 4001 bp, Homo sapiens
ctccgcttcctgagttcaggtgattctcctgcctcagcctcccgagtagctgggacgacaggcacgtgccaccacacccaaccaatttttatatttttagtagagacggggtttcaccatgttggccaagatggtctccatctcttgacctcctgatcctcccgccacagcctcccaaagtgctgggattacaggcgtgagacaccgcgcccagccaagaatctcttattctaatctacaggcaccagcctggagttcagaggaaccaggtgggagcagctgatagaaattgaaaaagagaagcaagtaggtcaaaacctgaggatctggagggaaaagcagtgaactagcacatggcctgaaacaacagaaaaactgaagttttactgcaggaggcctgattttttcagcaaacatgcacatgtgttttcacctcctctcttgtaaaaatgttagcaacagtaaattaggggagagtaacttatctgatgtctgcgtttgtgaggataataattattataattacacacaagttaattctgatccagaaacacctttagtaatgtatgcactgaaagctctcatgctttgctttcttattacataacaacaatattcacaggactatttatgagaaggaagggacattcaacaacaacaagaataacccaaatgctctaattaaaaaataggcaaaggacctaagtagatagttccctgagggaaaatacaaatgtctgtatcaggccattttttcactgctataaaaaacacatgatcctgggtaatttataaataaaagattaattggctcatagttctgcaggctttccaggaagcatgttgctggcatctgcttggcttctgggaccacctcagggagcttttactcatggcggaagtcaaaggaagagcaggtgtctcacatggaaagaacaagcaagagagaaaaatggggagcccggtgcagtggctcacgcctgtaattccagcactttgggaggcctaggtgagtgaattacctgaggtcaggagttcaagcgcagcctggtcaacgtggtgaaaccccatctctaccaaaaatacaaaaattagggggtgtggtgagggcacctgtagtcccagctactcgggaggctgaggcaggagaatggcatgaacctgggtggcggaggttgcagtgagccgagatcatgccactgccctccaatatgagcgacagagcaagactccatttcaagaaaaaaaaaaaaaaaaccagattcttgggccccacctccaaattcctgggcatgttgtattttagaaccattgccgtcatctgcaaggcttctgctctaagaggagagtgcccaccttcaggaacaaccaccttgaactgtgaactttattctgttgattttgactccacagtgaagggagagttgactagttacacagacagcaaagcgggagctgcaatgtgtatggagtctcttaattagatgtttgttcggtgtgaaacatttattaatgcaggctcagtgtagcaattctttcctttccttttattttcagttgctttttctattcacatgatgactaaggtattggaagatccaaaaatcttacatagcaccatttgagctataataattagcttttctttggtatcctagagatgttctcatcctagagtctatggataagatgtgatttcattggaaatgcctacaacccaactagccgctcaacttggtttatgcttcttctaaatgggatggtcagctgaattgtcctctacctcttgtgtatttacaccattactgctttttctgaaacttaacaaaacttttccctgcttacctaaattatactcataactattctacctataacaagcattgttctcttgtaaatttactgggctatctacagactatactattttattggcatttaatcatattttcaatcattgcatccgattgcttgtaatagcaaaaaccgcaattacttttgcaccaacgtaatacacagttgcccatactacaaagaacaaaatcttgtaacatgagagctggtctataaaatctaagctttgtcttctctgggtttatggaatcagtcaaacagaaaactctcctgcttggggaaagcatgatgaagaggtgatggtcttaaatgaaggagacgagggacaactgagtaaacagtaaggaagggtctaaatgaaataaaacatcttaacactgagaacgagccagtagccataaagctattatgaagacaggcaggtaggcaaaattataagggatccacatttaggttgaagttcttgggagaggtaatgtgatgtgttttgtttttgtttttgtttctgtttttttgttttgttttgttttgttttgttttttctcagcttaacagtcaaggtttaggtcaaatctcaagagggtgaatcatggccactatgttcaaagttgggaacaagtctgcaaaaccttgatcctcagatggtcagagtagactcaggaggcaaggaggcagggcaagtcagcccctattgagcgccctgtggactggacgaaaggctggatctgatggaatcagtgccatcccctgaagtggtgataaaaatgtgaaagtactgtgcaggaaggaactgaacccagctctgtaagtccagatgaatgctgccctgagggtgggctgtctggagatttgggtgaaaggttggtcaagaaacctgggagacagggggcacccttagataaaatgtgttaagtagaaacctttattaggaataaagcgaggaaagaggaaggcagttaaatgcagcccttatatagcacatgcaagaactgtgtggacctgccatgcaatggtgccagtgccactaaagaacaaaatgagggacaatatgaaccccagaacataatgggtagaaatcagttacttttcctcttggtttttgatttcccaggtgggtgtgcagtcttatttctgggttctctattctgtcccattggtctatgtgtctgttcttgtaccagtaccatgctgttttgattaccttagtcctatagtatagtttggtagtgtgatgactgcagctttgttcctttgcttagtattgccttagtcctatagtatagtcaggtagtgtgatgcctccagctttgttcctttgcttaggattgccttggctatttgagctccattttcattccacatgaattttataacagttttttctagttctgtgaagtacgtcagtggtagttaatgcaaatatcattgaatctataaattgtttcgggcagtatggccgtatgttcattttaatgatattgattcttcctatccatgagcatgaaatattttccatttgtttgtgtcatctctgatttatctgagcagtggtttgtagttcttcttgtagagatctttcactttcattgttaattgtatttgtaggtatcttattctttttgtgggaattgtgaatggcagtttgtttgtgagttgactcttggcttgacagttttggtgtgtagaaatgctagtgatttttgcacattgattttgtatcctgagactttgttgaagttgcttatcagtttaagaagtttttgggctgagacgatgaggttttctagatataatatcatgtcatctgcaaacagggattgtttgacttcttctcttcctgattgaatgccctttatttctttctcttgcctgattgctctagccagaacttccagtactatgttgaatacagatggtgagagagggcatcctggtgtcagttttcaagaggaatgcttccagctttgacccattcagtatgatgagtttggcccattgagctgtgggtttgacatagattgttcttactattttgaggtatgtttcttcaaaatctagcttatcgagagtttttaacatgaagagatgtcaaattttattgaatgccttttctgcatctattgtgataatcatgtggttttgtcttt

SEQ ID NO: 1880734 - DNA, 4001 bp, Homo sapiens
atacatttagatatatagatatatatctaaatatgtatatttatatgtatatatgtatttatttttatatatctaaatatatatatatttagaatcatatcctcttcctgaattgatccctttatcattatataatgtccctttttgtctctttttacagtttttgacccatagtttcctttatctgatgtaatcatgatagctactcctggtcagttttgatttccttttgctcagaatcacttttatccatcccttcactttcagtttatatttgtctttacaggtgagaggtgtgcttcatatcagcagcatatacttagatgctcacagcagctatgggggcagggtcccaggcttatggtcttgcatacctgttatggcacctgggtcttgaggtgcaagtttgctctccttggcaggattagatgtaggtttcccatgaagccaagatttgtgactctgaggcaccccctagcagcttgggttcaaggtgccacgttgtagtggtgattatgcccctgaggagcaaggtacagtactaccttgatccctcagaagaaggggtaatctggaggtatgggcagggggagaaaggtatggatgcaatttgagaacctgagccaaatatacccagtggcatctcccaggagatgaggcactttgcagtagtgaccatagaccctggaatggtggggcttagcagcattctagactctttacagccatgtgtagcaacagcaagtatcccagaatggcaaagcacagctctagtttgggccgggggggagtgggtacatggatgactgcactccccagggagagaggtatctcagaagcccagaatagggaactagtccggctccagggaagcaaggtactagaggtatttggcatatagggtggagtatttcagttcagccacttctctcttgcctgggcggcaggatactataacagctcagccttggaatatgcagctgttcagcttggccagggcattgacttcccaggggcaatgtgccacttcagctcaggcctgtgggatgtgactgttctaggcagcccaagccccatttccctggaatgcagagtgtcacatcagcttaggtactggggtgtgtgaccaccctggctggtcaaggcatcatttcctgggatgcagggcacagtttcaacttaggcactggagaggcatgacttctctgagtggtcaaggtaatgttttcccaggatactgagtttttgtttttgtttttttttccttttgctaatacctaatgggatcatatggtagttgtatttgcagtgttttgaataacctttttatactgttttccatagtggctttactgtttatagtcccacgaacaatatgtaagggtacctttttctctgcatcctcaccggtatttttttcgtttaataaccatcccaaatggtgtgagatgatacctcattatggtttgatttgcatttctctgatgattagtgatgtggagcatttttccatatatgtgttggccatttatatgtcttcttttcagaaatatctgttcagatcacttgcttatattttaatcaaatttttttggtatttttttgtttgagtttcttatatattctggatattaatgccctgtcaaatgagtacttggcaaacatattctcccattctgtggttgtcttttcactatattgattgtttcattggctctgcagctttttggtttgatataatcccctttatttttgattttgtttcctgtgcttttgatgtcttattcatgaaatcttttccgaaaccaaagtcctcaagcacttcctccatgttttcttcttgcagttttatcatttttggacgtatatttaggaatttgatccatgttgagttgatttttgtatagaatgagaggtgaaagggggcatctgttaggttgatataaaagtaattgcagtttttgccattactttctaatagcaaaaatcacagttacctttgcaccagcctaatagtatcagtcttctacatgtggatatccagttttcccagcatcatttatgaaaccgtcctttctccagtgaatgttcttggcacctttgtcaaaaatcagttggctatagatacgtgcattaatttacggattctctattctgttccattggtctatttgtctgttttttttttcccccagtaccatgctgttttggttactataactttgtattatattttgaagtctggtagtttgatgctgccaactttgttcttttttgattaggcttactttggccatgcaggatgttttgtggttccgtacaaatttaaatttttttttctacttctgtgaatgacggcattgttgttggctgttttattttattattatttttttaatttttagagacaaggtcttagtcaggcaggagtgtgatcatggctcagttatggctcactgcagcctcaaactcctgggctcaagtaatcttcctaccttagcctcccaagtagctagtactacaggcatgtgccaccatactcagctatttttttattttcttgcatagatggggattatgttgcccaggctgctcttgaactcctggactcaagggatcattctgccccaatcacccaaagtgctggagttacaagtgtgggccactgtgcctagaactgcattggtattttgatagtaattgcattgaatctttagattgctttagttagtaaggtcattttaacaatactgattattcacatccatgagcttgggatgtttttccattggtttgtatccttttcaatttacctcattagtgttttgtggttttccctgtagaggcctttttccacttgagttaaatttattcatagggttttgttttgttttgtagtttttgtaaatggaatgggcttctttatttttttttcaggtagtttattgctagtggatagaaatgctactgatttttgttggttgattttgtatctttcaactttactgaatttgtttaacagttcttaaaggttttttttaggtggggaggagggtgttgaaacagagtcttgctctgtcaccaagctggagtgcagtggctcgatctctgctcactgcaacctctgcctcccggttccagcgattcccctgcctcagcctcccaagtagctgggactacaggcatgcaccaccatgcctggctaattttttgtattttagtagagacagggtttcaccatgttggccaggatgttctcaatctcctgacctcgtgatccacctgcctcagcctcccaatgtgctgggattacaggcatgagccactgcacctggccagtttttccatgtataatatgtcatttaaaaacagggacaatttgacttcctcttttcaaatttggatgcccttcatttcttcctcttgcccaattgctcttgtttgaactttcaatactatgttacataagagtggtgatggtgggaattattgtaacattccagttgttagagaaaaagctttcagcttttcctcaatccacatgatattagctgaaggtatgtcatatatggcctttattgagttgcggtactttccttctatacctaatttattgagagtttttatcatgaaagcatgttgaattttaccaaatgctttttctatattgacatggtcatatgaattttgtccttcattctgttgctttaatgtatcatgtttactaatttgcatatgttaaaacattcttgcatttctcagataaatcccacttaattctcatatattatttctttgatgtcttattggttttggattgctagtattttattatggattctgcaactatcttcatcagggatattggcctacgttttcttttttttgctatgtccttgtctggtatctgagcaatgctggcctatgagaatgagttagaaagagttccttctgcttcaattttcagaatcatttgagaagaattggtattaattattttt

SEQ ID NO: 1880735 - DNA, 4001 bp, Homo sapiens
tgaaattctgtgccattcctgttgactccccttcaagctattccccatgcacatatatccacatatatccaaaagaaacaggtaaagtccatctatgcacataaaagcccacttattttttctcccaattataagagaacaacttttcaaggctatataaaaaagagagccttgctattttctaacacgtatttttacagacaagtagtacatagtatatatactaaaactttgctaaacaaatcaagttgatgtcttactggagcaatgaattgacctctaataacagctatagctcacctatagtaatcagataaaactagattaccctggattaacaaatttttttttgttttctttttttgtttgtttgtttgtttttggtgtagaaggggaatgttgtgaaagagaacagttggaaaacccaaaaatatacaaatccacaaatacttagtttatgtctataaacaaagaaaaagccttttacttatcttcagaaatgaaagtataagcacaaagacaattgatcaaattattaattgtggtcttctactggagactatgacccatgtcattttagttatacataaagaaaaataatggtgtaggtgatacctaatgttatccatgtatccgtgaagaaaaagtactgcacagaaatatgaacacaactaatcagatttatcttttatatatgacattttatagatgctagcagatttttctaagctttcttaaaactgtcattataaaatatttgtaatactaaagtcaagaatttaatttagtatcatggatctaattcattaactcttttgaagtaaaagtaaatcaaattttaataaactttagtctgacaatatttgctcacattaaaaaaattatttagaactttaacatgtgtgatatataataaataacagatatatattttacatataatatataatatatatgtgttggataaatatataaggatacatatatatgaacatatatgtatatgtatacatatatatgaacatatatgtatatgtatacatatatatgtatatacacacatatgtatccttatatatttatacaataatcagtatattattacaaagtaattgtatatttctccaaaaataaggaggcagtggttatttaaaacaataatatcaaaaagtctcctcaaaataaaacacatccatattttaacataattgcaatttggtcatattggttatagtataaacataatattgatttagaaggacacatttttcagatcttaggaaaattacaggtaacaaattcatcattcctccatctccctcttcccttcttggttacactgtatgtatctttatcacttcactatttataaagtgatctatcaatgaacaacatcttttaaatcactgtccttgcttcattctttttcctaacattttcttgctagttggtatccatcattcttacccacatttggggagatagaaaagtttttgtattcctcattttgttgtacctatccacctaatgccttaaaaatcaaattattaacatgcaggataagtcacctaatcatgagaattagcagctttttggtttaattataatcataaacttttcttctgaatcaatgttcacgtattcaatcatttatcttcagaaatgtcttcttatatcaaaaattcaaatctgagactttatctcctttcacattttacaatgtctgaacttctttataatctattttagactctaacaactttgtaaatatattacttgtcattgttctctacttttaagtttgaatgtgatatcactctttatagaaggctccaagcaaatctgagaataagttttgaattgatttagttactttttacgtgcatttatttccaaatgcacactaaaatattaggttggtgcaaaagtaattacagtttttgccattaaaagtaatgataaaaactgcaattatgttcgcaccaacctaatagttattagaaagatggtggttatacaaattagatctctttcgtcacacattttcttctaaatgtatattttcaagtgtcttagtaatttcttgcagctgaaatagagaagctgatatttttattaaatagttttcagaaaacctcaatctctttatctctaccactgctctttggctttctctaaacatacacctgtatgcaccataaatatatttattgtgaatatgaaagttcctcaaggttcctgcgtgtttatatctaacatcactgatctataaggcatatattaaactttagtgcttctttagtaataatgatgcgcttgtaccaccacctatccacactctcacacaatcaccccttttgaagtaaagcctatattttaaaaataaccattacagattgtgagtgcagtctaggatcacatagcagaactaaaagctaactggcccacccacaaagtaaatgtgagacagagggctcggggtagccatactctagccaagtagtactgacagataccaatagatataatcaaatgttacacatttgtgtttgcaaacgggataaatattttcctgaccaatctatacttttgatgattcaagctacaggataagttttaaaaatgtcttttgcacttatctacattacttaatagtatcttcttgtcatagacaactgttttacaccattttagtaggaaatcaatttgtcattcaattccattttctaatgcagtagtccaacccaacccagaatgcattattgatatggaaatgagtgtaattagcagcgtaaatgatctgttatttatgatacaagtcagagcagtaaatcaccattggctcactatcattactatgcaaatagaagaaagcagttaatggtccatgtgtttaaaacaggccacttgcttgctcatttgcaaatgaaaggcaagggtgagagtttaaggtagagatgacagtttatcatattgtcagtcctggtacttggacttaagaaaaccaagacacaccaatcattatgctagttttaaacgttatcccctttctctactgtatattctgcctcgaacctattcttacagcaccttcaaacttattttgggttccctgtgatttgcacattggaagtggaaataattgtgagagtgcttgtaagtgtttcgcactgtatgagatagtttttatgccatatgggaaaaacacaataaaaattcactattatgaaataaaatagcatcactggtcatataattcacttccttttcctacaaataaattttattttcttgtaaggagagaaactagcaataatttgagtagttagagaataaaggaaatatttgtgagccttactggaatttattcagtatacctgaaagaaattggtctgcctgtcctggttgctctcttttcgtttaatattccagggaatgtgagagcttgtggggaaacgtgagtgcattagcagcaggccaatgcttgcttagtgaaatgggaacaaaggcaagacacatgaaaagctagaggaagaagagggattgagggcaaatgcaaattctgcaagcttcacttgcatagatctgatcattttttaaagtatttgacagactttcagaaatacagaactgagaaagaataataatgtctttatattgaaggtgtacatagtagaaaggatctcaatctcacataaattatctccattttgcaaatatataaataaaactgacaaatcacttatgaaaccttattttggtttgttgttatttttattaagctatggattcaagaatgacatacaaattgggcatgaattttatatacaggaaatgataataatatttaaacagtagaaaatactttttcttataccaacattttttcttaaattatatgtacagagtggttggaacaatgctttaattcatctttcttatcagcttatgttttgtaaatattatgtttttctttaattccaaggaaatagctaggccat

SEQ ID NO: 1880736 - DNA, 4001 bp, Homo sapiens
ggcagcagtaaaaaagaaaaacaacacacacatacacacacacacacaaactagcaaaggatctgaatagacatttctccaaagattcagaaatggccaataagcacataaaaagatgtcagataccgctggttattaggaaaatgcaaatcataaccataaagagataccacttcacacccactagaatgactagaatcacaaaatcagaaaagtattggcaaagatgtagacaaatcacaactctttgtgcactgctggcaggaatataaaatggaacagctgctttgtaacacagtctggcagttcctcaaatgttaaatgtaaagttaccacatggcccagcaatgccattcctaggtatgtaaccaagaaaaatcaaacacacgtgtccacacaaaaacttgtatacaaatgttcacagccatgttgtttacaacggctacaaggtggaaacaacccaagttggttttttttgggtttttttggtttctttttttttgttttttgagacagagcctcgctctgacacccaggctggagtgcagtggcgcgatctcggctcactgcaagctccgcctcccgggttcacgccattctcctgcctcagtctccggagtagctgggactacaggcacccgccaccacgcccagctaattttttgtatttttagtagggatggggtttcaccgtcttagccaggatggtctctatctcctgacctcgtgatccgcccacctcgacctcccaaagtgctgggattacaggcgtgagccaccatgcccagccccaagttgtttgtaatgatgaatagaacagatgaatggacatggtctatagatacaatggaatactattcggccataaaaaggaataaaatattgatacatactaaaacctggatgaaccttgaaacattagtcaaaaaaaaacaggcacaaaagaccagatactgtaattccattcaaaagttcagaataaggaaatctatagagataggaaggttagtggtaacttagggctcagcagttggaaggtggagtataggggaggcgatacctaaagggtatggtgtttcttttggggttgatgaaaaggttctaaatttgactgtggtgatagttgcacctatctgtaaatatactaaaaccactacgtgtacacttgaaatgggtaaattgtgtatatgtgatgtatatctcaataaagcttttaaaatattttttaaagtaattcagccactcactaaataaaagaacattgggcatttgagatttgacacaccgatgtaatctatacacctctgacagtggtccaggcccatgtgtgaagtccatccctctgtctcctgggaagcagtcagcaaactgaagccagccaggagagctgagtctgtgtggactcagcacacccctaggccgtctggctcaaatcccccacacagatcaacgcccacttttctctgccccatcgtccacacagccacggccggtattactttgcacaaacttctgccgtgtttccagataaccattactcaaagctcaaaactaggaagtaaccctgaccacccaggcttccttacctgatcattatctgtttcttgaacaaaaaatgcttctccattatctcccaatttcatatgcaaatccacagattccccattgatttctatgtcaacctgaagggaaaacatggttaagaaaagaatgaactgccttcaccaggacaggagacctcatggggacggccaagtctccacagatacgctatcatcgcatacaccctgaagtgccacacaactcccagtctcagtcaggccgtcccatccaagggaactgtcacttgaggactggaggagttctgggttcgggagggcaggtccctgaccaggaaagatggaacccaaaacagtacgttggtgcaaaaataactgcagttttggccattattataattattaaaaataatggcaaaaactgcaattatttttgcagcaagctaatagaaagattcctccgagaccacctggtctagctcctccttttttggctgaggagctgaggccagacaagaggagtaaccagcccagggtcacatggctggtgagagttcaagctgcaatcaaagcttccccagccccagacattagaaattacaccctggaaaactcatcaactattggctgggatccttcacacatactcaaggaagagtttcctcttgaacttaactcaaaggaccaatcaggagacatcatcccaaaatccacattaggtgggggcatgaaatgtctatttgcaaggatttgtttctttccatttgtgtggcagattgtcttctaaaactagccacatcaatatcctggtcctacctgctcttccagaaccttcgccactcctgaaaataaactagaaataaaattctaagctcgcaactgactgaacggaccccctctgggacaaggagatgccagagaaaccttaagaactgagttccaggccatgatggaatgggagataggacaggcttcctcataccccacctcagtaaccaccattacgctttcctccctaagggccaaacagaaaccagccctttcaaaagactgtgcactggtatcaacaaaagaagctgctctgcgtttttgtttgtttgtttgtttgtttgtttgtgtttgttttttgcctgataagagcccaggaactggtcctggcccacctagggagaatgtgccctgagggttttcccttcctctgctccaccctttgatgttagacaccagaaaactccacccttggctggtgctagtgccatcacgttttgaacatgggtcccatggacaggcagaagctcagttgcacgtgtgcatgttttcctctcctgaacactcacgacctctcctgtggcttattaaatatgtagattctgtgaccccagacagcacaaatccctggtctctttgccccttcctcaaagtgtctgtttctgcttctggcaggaggctacacttcccagcctgtcagaattggccaccctgcaggcagcaacctagttctcctctccaaatttatgaactttatccttcttccattgacaccaccaagaaaagcctatttctcctccccttgagcccaggcagcttgtgatggccccaaccagtagagcacagcagacgtgacgccatgtggcttgcaaggctaggccataagctccagcatctgcctgtcttcctccctctcaagatgctcacctcaccactgccactgtgttgtggggtgccctggccacgtggagaggccatgggtagttggtatgaccaaagcctcagcgaagagcccagccaagagccagaatcaaccaccagtcacaaagaacgtgagtgttcagatgattccagccctcagcctttgagctttccagctgaggccccagagagcagagacaaaccaccccactgtgctctgcctaaattcctgacccacagatacaggagcttaataaacagtggtgtgtgccacggcactttaatttacacagccatactaactagaataatttcaattagtcactgtcagttccgtgactggccatttccaacgaagacctaaaactctgggtctgagagttcaagacaggtggcatcaccagagtacaagggcattctctaaggagagccggtgccaggtccccgtgccctgagagctcaccactttctctcgggagcgcaggacccccatcttcccaaagcggacgtggaaaggggagcattggaggtttccattgggctggcggatgacaatgatgtcaatgcaccctgagagtgtggcgggattcagccccttgtagagctccttcacggtgacaaacacctggccggctaactgccccacgtaattcatggtctgcacctggaaaacagacaaaaaaaaacacacacagacacacaattaatccaaggaagagccaatcaaaatgaactcctcaccatttcaaaaac

SEQ ID NO: 1880737 - DNA, 4001 bp, Homo sapiens
gaccctcctgccttggcctcccaaagtgctgggattacaagtgtgattacaggattacaggctaggattacaccatgcccagacagtgtctcttattaaacacacctaacagtatccttaatttgatatattagaaattctcaacccatcccatatagctagtagtatcctgacaccaaaaccagacaaaggcattacaactacagaccaaactctgtattagttttctactgctgctataacacattgccacaaactcagtggctcagaacagcacaatttattattttaaaattccagaggtcagaaatccaaaacaggtcttatgggactaaaatcaaaggatgcattgcttctggaggctcttaggaaataacagttcctcaccttttccagcttccagaggctacttacgttccatggctcttggatgcttccatcatcacatcatatcctctattcctcgcttatgcttagacggctgaggagatccatgagttacatgcctaatctcttcaaagagccctctatgtgactgaatactctgacttttgatgtttctaaggcactagcaaaaggttgtccagcctcactcttggcttatactttggagcatgcttttctgatagcaaatatctaaattttagcaccttctgtgatctggataggtaatttcacaaattgacaagcactgattgcttgtttttcaacagttcttctctcaatttatatctttcctcgcacatttcactataagcagcaagaaaaagacaggttgtactttcaccactttgtgtggaaatctcagctaaacatccaagttcattacatgttcattacatgtaagttcattacatccaagttcattacagcagaagtgctgctttctatatttaggacacaaatgagttaatagttctgcttctatatgacaaagatcccttttccttcaggttccggtaacatgttcctcatttccttctaaaccaccttgtcagcactttaaacacctgtatgtctaccaagtctgcttatgacaattcagatattctctaagacactgtaggttttctcccctatgatccttacttccttctgggccctcactggcagaagctttatcatccacattttatctaacaatctattcaaggtaatctagattttttttttaaatcatgctactcaaaattattccatactctgccaagtacccaattctaaagtcactttcacattcttaggtatgtattaccaggaccccatttccagttactaatcaatatagtgaaccacactgaatactaaattagaaaaaatcatttatgttgagcaataataatgctgaaaatgttggggtcttttctgcttcaaacttttgagtaattatgtcattgtctagtaagaaaattttgctcattctgtgtcaatcaccttataacatagttatatcatcttatatttttgaatactagggaagcaataacatgaataagtattattgtgtgttgcattttgtcctcccaagatatgttcaagtcctaacccctagcacctatgaagatgaccttatttggaaatggggcctttgcagatgtaatcaagttaagatgaggagataatggtttgcaggaccctacattaaatgactggtgtccttataaggagaaagagatacaaggacacacaggaaagatggccatatgacgacgtaggcagaaattaaagtgattcagctacaaaccaatgaacagcaagaactactggcaaccaatagaagccaggaagaagcaaggaaggagtcttccctacagcctgaattcagagggagcatggccctgctgatatcttgatttcagacttacagcctcctcaactattgagaataaatttcagttgttttaagccagcccgtttgtggtattttggtacagcagctcaggaaactataatagagtctagagctactataccaaaataaccacacacacacacacacacacacacacacacacacacgacatgaaatcaaagagaataattcccctacttcattcaacaaacacaaagttttgtttttacaactctccatgcaccatacttcctactgattgatacaagagcatggaaagcacagacattgacagcttcgtaaatgaacacgggaataggtcatgtttttaaaccaccaaaaatggaaatggcacctgaaacaggaataaaaggtaaacaaaaagacatatattggtggcagtatacactgctattttacttctcctatttccaataatatctctaataaatatcacacttaaagcagcatagaaaagagaatgctagtgttacaaccatgaaatcaagataaatgcaacagtgtagtaagtctggcaagtgtgcttgatcttcaacatttcttccatacctactgaaggtcatgaagctctgtacagactgaccattgaaagagttatataatgttcaaaaaatataaagcaaagggtatttctacaaagttaatccaagtacattaaaaaacaaacattaaaaagaatgaagggcttagctatggaatgatatactcgattaggaaatcttatcttacctgttgaattacttctggatatagcatgggtagtctttcagcaataagagccagtccacccattcctgcaaaaacttgtaatggtgactgaattggacaggtttcaagcaaagattcatccagtatcccatccatgcattcatcacctggagtgagagcctcatcttctggacagctagcaagtaagtctccatgatctagacaataaattacaaataactgaataggtaagaaagggtatatttttataatattctttcatttacaaaagcaggtattactgctttcttgctactcaaaaaagagcacaaaacatcatttatttagatatagctgtattatggctagacggtacaatgacctttaaatgacttctgatactgccttctttagtcttgttattggaagaatggttcatggactagtagtattggcatcacctgcaagctagtttgaaatgaagaatctccattttaacagtatgatgctggtcatttgtaagcatactgaagtttgagaagcactgtcctttagggcatactttaacgtatatcctatgttaaaataaataagttctcaaagttctcatagcaaataatatgctctaaagtatcctattaagaaaaattaatgacaaagacttcccttacttaaaacaaaaaattataccatattagtttaactctgaattactcaccaaagaaaaccaaaaggtcacgtaaccagaccctttaaacattaaaacaaaagagagaaataatcgtgctgaaaaactgggcaaagacaatgtaccaaaatttgctgaagaatacaaaagaccaataactaaagactgaattttagtcatgagaaagatggaaagtttaagtaagttcatatcatactcacactatgaaaactacttatatagcatttataggagtaaaaattggaaacaaccacaatgtttcgatgattggggaacaaataaattttcttacatttttatgaaaaaatagccaattcaaaaatggatattcaaaaatatttaatggaatataagggccgggtgcggtggctcatgcctatatcccagcactttgtgaggccgaagcgggcagataagttgaggtcaggagttacagagtagcttggccaacatggtgaaaccttctctctacaaaaaatacaaaaattagccaggcatggtggtgggtgccagtaatcccagcttctcgggaggctgaggcaggaaaatcacttgaactcgggaggcggaggttgcagtgaactaagatcgtgcctctgcactccgacctgggagacagaaaaagactctgtctcaaaaaaaattaatggaatatataagtaaaaaacaaaaatatgtgatcccaattatatgagaaaacatgtttatatg

SEQ ID NO: 1880738 - DNA, 4001 bp, Homo sapiens
ctgccaagaatctttatggttttagtgataacaatctaatttattggaactttaaaaaactgtttattacaggaacctttcaacatacacgaaagtagaaagagtagtgcaatgatgcccatgtacctatcacccagatgcaaggccaacaacacatagcctctcttacttcatcttttcttcctttcatcctttcacccccgcccagattattttgaagcaaacctcatatttcagcagaaaatacctcactataatatattaaagtttcaacaaaatattttaatcatatcagttacagtcttttttaacagacttttatttgtgtaaattataaatatcataggggagcatatatgcacaaactaagtaaccaccaagtagataataaataagaattataagaaagaggggagatattttaggcagaacaatttgataagaggcataaatatacaaacaagcaagatgcatgtgagtgacagggaggacaaaattaacggcagcagcgaaccatttggttgatctgtaagtggataaaaaggtgatgaaatatatttaattcattgaggcatgatagactacattcctgaacacaggaataaagaagatgatactcacatctttttcaaaataataagccacatcagctatgtccacatcattctgagttttttgagaagaattttgaaccagatcaatagtgataacattattctcatactggggaaaaaaattgaataatacaaattaatactaatataatcaaaatcatttgaaaataacattaattgagaatcagaatattcagtgtttgattttctataatctacatgcatcactgttcctttccattagtggataactaagtttatcactaatcaagaaatctttgggaggtctctaaatctatcaaagggaaataagacagccatgcaaccaaacataattacaatgtacaatttttcctaagaggattttcttatattgaaaagatttttaaataagatatgaaagtattttatttggattagaactactttaaaactaaattactaaagaaatgaaaggtaaggccgggtgcagtggctcatgcctgtaatcccagcactttgggaggctgaggtgggcggatcacctgaggtccggagttcaagaccagcctgaccaacatggagaaaccccatctctactaaaaatacaaaattagccaggcgtggtgacacattgcctgtaatcccagctaccagggaagctgaggcaggagaatcgcttgaacctgggaggcaaaagtcgtggtgagccgagatggcgccattgcactccagcctgggcaacaagagcgaaactccgtctcaaaaaaaaaaaaaaaaaaagaaaagaaaaagaaatgcaaggtaaaacgcagcatgcattttccatgttgtttttttgttttgtttttgagacggagtcttgctgtgtcgcccaggctggagtgcagtggcacaatctcagctgactgcaagctccgcctctcaggttcacgccatactcctgcctcaagcctcccgagtagctgggactacaggtgcccaccaccacattcggctattttgtatgtttttagtagagacagggtttcactgtgttagccacgatggtctcgatctcctgatcttgtgatccacctgcctcggcctcccaaagtgctgggattacaggcgtgagccaccgtgcccggccatcattttgtttttaaagagtaaaaaaagtacattctttctaaagactcttgaataaattcatactacctttaaagagttccgtcacactattcaagcttctttttattttttaaaccagagtttaaagagttaagtaagggctaactagttaaggactagttccttaaagcagagaagatgggagctccagtaacatcctaaagtaaatatgcaccaaaactgtatttaccaaaagtaattttggtgcatatttactttaagatgttactggagctcatccacagggacaggttctccaggataagaaaactcaaatgttttagggatactaagagatactacgttttctttaggagtaaaactaggcttttcaaaggctatggaaggaaaacaacgataaccaaaaacaatgggccgggcgtggtggctcacacctgtaatcccaacactttgagaggctgaggcagacagatcacttgaggccaggagttcgagaccagcctggccaacatagcaaaaccccgccgacactaaaaatacaaaaattagctgggcatggtgacatgtgcctgtagtcccagctcctcgggaggctgaggcatgagaattgcttgaaccttggaagcagaggttacattgagccgagatcttgccatgacactccagcctggggaagagagcaatagtctgtcttaaagaaacaaacaaacaaaaaaaaacagtaacaggaaattcacattaagtacccagatccgaaactgttgctccagtaagtgcatttaaccaccacttaaatcactggctgtccttatactcaaaacatactgtctcaccaactgtctgctaaagctcacttattaaaaaatcataccaaaatactcgtgataaattttggatccagttgataacgcgttgtgatctccttctgaagtgcactgtaaagaatttaaaatctgtattaaaaaaaaatgtttgtaccacacaacagtaagaagcactactctttaagcagacagctcagggtctaaaactgtcattaaagttaaaatttttctgccattttgcaactatcataataataattgattcaggctggaatcatccattgatattcaaactgctgggtaccagtttaattagaaaaagaacatttacttagtatccaagtatctgcccatagattatttatggattacaaagggagaatggtaacttcacagtggaaaaacctggtggataccactttaaccaaagtttactttactagtaaagggacaagctgacatcatgcaactcctaatgtgaagtattataaaggacacaagatcgcttaagtagttttcctgtcaaaaatgcataacctgcttttagttaagagggaacatcaaggctcgggtgaggtggctcatgcctgtaatcccagcactttgggatgctgaggtgggcagatcacctgaggttgggagttcgagaccagcctgaccaacgtggagaaaccccgtgtctactaaaaatacaaaaaaaattagccaggcatggtggcgcacgcctgtaatcccagctactcaggaggctgaggcaggagaatcgcttgaatccgggaagcagaggttgcggtgagccgtgattgcaccattgcactccagcctgggcaacaaaagggaaaactccaactcaaaaaaaaaaaaaaaaaaggaggaaatatcagacaaatcaaaatttgagggacattatatataatgacttgcccatgctctttaaaaatagcaagttcatggaagacaaagaaaggccaagaaactgttcgatattaagagactaaagagtcatgacaactaaatgtgatacatggatcttggactgggtcctgaatcagaggggaaaaattactacaaaggacaatattgggaaaatgggcacaacgtgatataacgttaaatttcctggccgggcgcggaagctcacacctgtaattgcagcactttgggaggcagaggcgggaggatcacaagttcaggagttcgagaccagcctggccaatatggtgaaaccctgtttctactaaaactacaaaaattagcagggcgtagtggcaggcacctgtagtcccagctacttggaaggctgaggcaggagaatcgcttgaaaccggcaggcgcaggttgcagtgagctgagatcacgccactgcacgccagcctgggtgacagagcgagactccgtctaaaaaaaaaaaaaaaaatttttcctaaatttgatcgttgtatagtggttt

SEQ ID NO: 1880739 - DNA, 4001 bp, Homo sapiens
ttaactgcttccatttccaaccctgatgtgtcagtgggaatgttctgtgtatgatgcaccgagacaaactacagaaagaaattggatcttaagtgttattaagcaggcaattgtcattcttagttttgtgatttccagtttttactattttaattgattttataataagtaaatactatacatttgaactaatttttaaaaataataaaatgccatttttatctttttcatgatatagcattctattttaaaacagggtataactcatatgaaacattttgaatccacactctaaaagcattgtagtggaaggccctgtccctcccacagtgaagctggaacagcctgtcctggcagagaaaagggggtcagaagttaccatcacataaagttgtcagcaaactttaagggcagacattgcttttacatcagatgctaacattggtagcacttctcatcgtacctttttggtccatttctctaatacgaacttctggatcccagcaattctctcgcaccactctgaagactttcccatctttcaacaactttgcttctccctggggcagaaaacccacattactaaaatgcaacctaagaccacttggactaatctttcctcatgtgctttagaacgtatttcttccctaatatttgaaaagatttttacttaatccttgtggaagtagaaatcagtaatttaacaaaaatcagctttctttcctcatgcttttctttggcctagagttgaaggggtgtgctctgtgggcgtcaatggctggacacagagatagcaaggttgaggttatgtttctctgggctgcctgactgagaatggctgatcaccttgctgatctgaacccctggctactagatacaagaggatggcccagcgtctggaaaatggtagttctataacatttagaattgaaaagaacctttgagatagaccacctagtccaaccctctcattttatggagaagcaatatatggataatggcagtgtatgatttgtcaaacagagcagggcccactagtgtcaatacctgtgggaggaggtgggcaaagaagtcagtctggtagcaagcacaaaatttggtactgagctacttcttccaccaggcatcatgcttgcctgggtacacagcaataatttttatacattttaaatgacaaataaaaattgcatatatttatgctgtacaacattatcttttgatatatgtgtgcattgtggaatggctaaatcaagctaattaaaatgtccattacttcacatacttattttttttgaggtgatgacacttaaaatctattcttttagcaattttcaagtatacaatacatttttattaactatagtcaccatattgtgcaatagatatgaacttattcctcctgtctaactgaaatttcatatcctctgaccttctcaatctctccccaccccttcagcctgtggtaaccaccatttttcttgatgcttctgtgagttagacttttttagattctacatataagtacagtatttgtctttttatgtctggcttatttcacttaacataatatccttcagtgttattcatgttgttgtaaatgatagaatttcctttttataaaggctgaatagtattccattatgtatatatgccacattttctttatccattcatccactgatggacacttagattgattccatatcttggctattttgaatgatgctacattgaacatgggaatgcagatatttcttcaacatactggtttcatttcctctgcatatatagccagaagtagaattgctggatcatatagtagttctatttttactttttctcaggaaaacatatgatcatatcaatagatacagacaaatttctacatccttttatgactttaaaaaacctcaataaattaggtatagaaggaataaagctgtgggattgccatacatgaactttattgttgatcaacacaataaagtctatgtatggcaatcccacagctaacatcatacttgatggtgaaaatgatgaaaagttgaaaactttttctctaagatcaggaacatgacaagggggctcattttgccacttctcaacatcataaaggaagttctagccagagcaatgaagcaagaaaaagaaacaaaagtcacctaaatcagaatgaaagaagttaaattgtttttgtttgcagacaacatggttttatacatagaaaaccctaaatattccaccaaaaaactgttaaactaataaattgggtaacgttgcagaatacaaaattgatatataaaagcccatagcatttctgtatgttaacaatctgcaaaagatatcaggcaatcccattatttatttatttatttctcgagatagagtcttgttctgttgcccagactggagtggagtgcagtggtatgatctcggctcactgcagcctctgcctcccaggttcaagcaattctcctgcctttgcctcccaagtagctgggattacagacatgcgccaccacgcccggctaatttttgtgtttttagtagagacggggtttcaccatgttggccaggctggtcttgaacttctgacctcatgatccaccggcctcagcctcccaaagtgctgggattacaggcataagccactgctcccagcattaggcaatcccatttaaaatagtatttaaaaatacttaggaatgaatctaaccaaaaaggtgaaagatctgaaaactataatacattgatgaaaaaattaaagaagacacagacgaatggaaaaacatcccatgttcgtggattgaaaaattgatattgtttaaatgtccatactacctaaaacaatctatagatttaataaaatgccccccaaaattccaatgacatttttacagaaatagaaaaaaaaaccatacatttcatgtaaaccacaaaagatctcaaatagtcaaagcaatttggagcaaacagaacaaagctggaggaactaaaaaccttttgcacagtaaaggaaacgatcaacagagtagagagacagtttatggaacaggagaaaatatttgtgaaccatatatctgataaggagttaccatccaaactatataaggaactcaaagaactcaatggcaagaaaacaaataactgggtgaaaaaaggggcaaaggacctgaaaagacatttctcagaatagatatacaaatggccaataggtataagaaaaaatgttcaacttcactaatcattgagaaatgagatatcatctcatacttgttaggatggctgttatcaaaaagacaaaagataatgtgttgataaggatgcggagaaaaaggaacccttgtatgctcttatttggtaactggtacagccattatggaatacacaactttttaatactcagagcaggggaccaaactaaatggttgtgcagaacatggcagtggcatctacgttgggcctccagtttgtgattcctaaagaaaaggggaagaactagggtaggccctggaaataaaattgcctgaattcaaattcttgttctgccacttactatgtggtcttgagcaagttaaacaatatcttcaagcttcagtttgtttatctttaaaatagggatgataatgacttaccttaaaaaattaatgtgacttacattaaagggatcatgtcagcatgaaataagataatccatataaagcgcttagtggagtatctgacacataagtgttattatggttatttgttattaatgttgtataactaggggctagacagtgttcctctgctttgagggcacaccacctttggtggtgcttcagggcctcaaggttacctttgggccccatagaatgtccaagtgggtgtgcaatgatcaaaggctttgagctctgcttggtggagtcctctgctctcctcctcctcctcttggcttgatcatgaattgcatccaaggcttcatccttctactccatagacaagacatccttctactccat

SEQ ID NO: 1880740 - DNA, 4001 bp, Homo sapiens
taagtgaatggaaaatcactgaataaagacaaaatctcattgaataagaaagtcccaaagaaagattcattacattgtaggatacagtaaattcctcttcaaagaaccaatatgttagtatattgagcttccctgttctttgttttccatttgaaagtttaacttcctcgttctttacatctccttgtccctagctttagtaaacaaccccctcctagcctctatcacctgctctgtccttagtcatccttagtcacctgctccctccttagtcacctgctctgtccttagtcatccttagtcacctgctccctccttagtcacctgctctgtccttagtcatccttggtcacctgctctgtaaccgtccttcccaccaaagcttctcaccccgccactccagctcatacccctgctgtctttaaaatagccagttggaattatcttagactgtgcggtccaaccctacccaataggggaaaaacaagcagtagggactagctgcattaatagtaagatccccttctcctcccttgtctggtgtgctcttgccattgctccatccgtgagaggcacccttttatagaagtaaattgccttgctgagcaaacttttgcctgagtgctatattcacttggcagcaccgagcatttacttccaacaacatcaagtctaaaatgttgttctctaaaacctcatctgtactactctagaaaattttatttttccaaattgatcatgaatttcctagtctgcttaatgtaatcagctaaacctatgataactcagattttacaaatttagtagttcttcctttaaaatgactaaagacattagcaatatgagacctcttactgatttactgctaagaagcttaaaggtttttctcctacatatccagtcatggtgatgcattaaaacagaaaaaataattcataaaaatttaaagcaatagccattgttactctaaaacaatgctattttataaatctaaaataccaatagacttttgccatttcatattgcatttacgtaatttcaaataaaatttgtttactcaaatgtgactccttaaaaattctctcaaactatattctgagatactacaatccataaacaccctctaattatatttaattaacatattcagcatagagataaattgctttgaaattaattcagttatgcaattgttctttctaatcagccaaactttctctgtatttatttgcactactagtaaagttcagtgtttatgttattggacatctttatgactataataacacacatcatcaaggaagtaaaaggagagtttgatcatcaaccaaagtcctttattactacacagttcctcaaagcagacaaaaataaaataaattacagagcataacatgtagtttgaccttcaaagatactttacaaaatactgtttcttaaaactctcattagtacttataaccctatgttttaattcacctaggttgaaatctgggtaaatgaacctatttgctattaaaattttacttaaaacatggtatctcttgatggttataaatggctatgaaaaaaattgagaagctaaaatcacatttattctcttatttcaattttttatcccaaatttgcacgtttgctaccatactacaaatgttctgtttgattttttttggctaaaattatatttaaaattgatattatctaatttaaatacaaaccaaatgagaacaatagttatcacctcatgaaatattatacagctataaacaggcaaatcattaatgattcagtcagtagattatgtatgctctgaaatgattgtctttatttctataagagggtagactgaagactgagcccacagtattcagtctcctctcttatagaaataaggatagccatccatggttcccccaggaacttcaaggatcttaaactttgcctttgtagctctggcaaagtttaagatccttgatgttcctggaggactggtggatgaagtttcaagaaatggatcaactgtaacacctaatattaagaaaaagctgtaccataccaggaaaacactacatttgtataaaattctcacttcacaatacctgataaacttatcagtagtatctaacttctaagtagtgaatttaccttcttacagtagttaactgtacatgtgcttgtgttctacttaagaagagtagaaagggcttccatgagtatgccatcattagagcctacaacaaagaatgtaggtagaagatcttgccaactatttttctcttctttcggaggtataaatagaagtctaaaaacacttttagaatttggaaaaaagaaaaaaaaaaggatttctaggatttctagcaatacttatctgggaaacatttttaattagttgttaaaattgggctcaaaaatatcaattaactgaagctatttttccctacagaaaaactatagcacaaatagagaaacatcaaagaatatatatgtatcataagtatgcacacacagaaagggagaaagaaatggagacagagagagagacagacaaagagagagagaacgacagagacagagagacagagagaaagtagtcccccaaaatatggaagtttctaaggtctattctgaacttcttcatcaggaggtatatgatacagctgatgtataggtacatttatataatgttaatagcaaaaaacaaacatgaaataaaggcaggtattgatatctagatgcactctcttagttgcatcctagaaaatacatacaaggctattcaaaacttcctttaaaaagccatattaatctttgcaatttagcacaaaatatactgaaaatcttaatttctatataagttaacttacttattcatattatgtgtgcaaattagggcagccttttcaaaactatttttaagtatactacactgaaagacaaaactaatttcaaattcgccataactataccatttcaatgtaaacagaaaattgacacttactatcccacacaatatttgagtcaattaactgtcctctgatgacaatcatgcatggtaagcatcattagagtggctgaaaacatttcttaggcataaaacaaacaaaaaactcgcaaataacaagggcctgaaaacagtataagcattgttttctaagtcttactctggaacaatgacttttagccattctctttaaaaataaaggcctgatttcaatttcatatccccagtatttgaaagtgaagcgatttctccattcaaagttataccattttttcctcttccaatctgagtatattttatgctcttatgggaaaaagcttaagtttcctgatctctaaatgcattaaggcaaacaatattagatccaccagcctctaatacgtttagggaccagggctcatggcagttatgcagttagcttctgtaactatctttgaattcattattatactgaaataaaataactttttttattctttagaggttttagaaaacaaattgcaatatcgcgaattgaatcacaaatacatcactctgctaagtaaaatttaaattaaaatcacctaccattcatcaatggaaataagaattttaaggatttctaatttaaaatgaaaggtaaaatttgacattttatattaaaattaccctaatatatcctcaaacagccacttgttcaaggatacccatagtgtaagtttcaacccaactactatatcccatatacacgtgctttttacagattcactattaattataatataaagtctaaaaataaaagctatgactaggtattttagcaaaagactttatcctttaaacaatttatctatacttattctgttttctctaataagttgatctgttcacccgaaaaagagttaagttaaacatccatgactgtagcacagtacaatgaaccataaaaatatgtagtatattttactaattgacatgtcacactaaaaagtaaatatttcacaatgatcataatgaa

SEQ ID NO: 1880741 - DNA, 4001 bp, Homo sapiens
aatacaggaaattccatggtatccacgaaaaacagagctaacaattttttttttttttttttttttttgaggtggagtctcactctgttaccctggctggagtgcagtggcgtgatctctgctcactgctgcctccacctcccaggttcaagcgattctcctgcctcagcctcctgagtagctgggattacaggcacctgccaccaagcctggctaatttttgtatttttaatagagacggggtttcactatgttacccaggctggtctcaaactcctgatctcaagtgatccaccagccttggcctcccaaagtgctgagattacaggcatgagccaccatgcccggccaacaaatgatttttgtaaggttgcaggataccagatatatatataaatataaaatgtatttctaaacattagcaataaataatttggaaatgaaattaagaaaacaatttcatttacaacagcatcaaaaagaataaatatgtaggattaaatttaacaaagaagccttgtatactgaaaactacaaaacatcattgaaagaaattaaagacctaattaatggacagacatcccatgttcataggttggaagacttaacagtgttaagatggaaatgctccccaaactgatctacagactcagagcaattcttatgaaaatcctgagtgcctcctgaaattgacaagctgatcctaaaatatatatggcaatgcaaagaacccagaatagtagaaaaatctgaaagaaaaaaaagcaaagttggaagaatcacacttctcaatttcaaaacttactacaaagttacaataatttagacagtgtggtactggcataaagacaaatatacagatcaatggaacagaattgagagtccagaaataaaccaatacatttatggtcaaataatttttgacaagaaatgccaagacaatttcatgaagaaagaatcatcttgtcaacaagtttttcttatggtgctgaaacaactggttatccacaagcaaaaaaatgaagtttgacccatacctcacaccatttacaaagattaactaaaaatggatcataaatataacaactaacagtataaagttcatagaagaaaacttatgttggccaggcacggtggctcatgcctatgatcccagcactttgggaggctgaggctggtggatcacttgaggtcaggagttggagaccagcctgcccagcatagcaaaaccccatctctataaaaacacaaaaaaattggcagggtgtggtgatgggtgcctgcactcccagctacttgggaggctgaggcaggagaatcgcttgaaccagggaggcagaggttgcagctgagctcgcactactgcactccagcctggataacagagacgccatctcaaaacaaacaaacaaaaagaaaacatatgtctaactctttgtgatcttcgccaatggtttttatagatatgacaccaaaaacacaagcaaccaaagaaaaaacagactaaacgggtcttcatcaaattttgaaactttgtgcttctaagaacaccatcaagaaagtgcaagatagccagcccacaagtaggagaaaatatctgcaaatcatatatctgataaatgaccagtgtttggaatacagaaactacacttatagctcaacaatagaaaggcaatccattttaaaaatggcaaaggatctgaatagatactatctgagtagatttttcttcaaagaaaatatacaaatgaccaataagcacatcaaaatacattcagtctcattagtcatgacagaaatgcaaatcaaaaccacaatgagatactaccccacacctacaatgatggctataatcacaaatacagataacaagtgttaggatatggagcaactgagaccctcatacattgccacagggagtgcaaatggtacagctactttgaaaaacagtttcacaattactctaaaagtagactgaccatatgacctagcaatttcactcctaggtgtatacccaaaataactgaatgtccacaccaaaacctgtacacaaatattcatagcagcattattcataatagtcaagctggggaatcaacccaaatgtccatcaactaatgaataaacaaaatgtgaaatatccatacaacagaatattattcagctataaaatggaattacgttctgatatatttaacaacatggatgaaccttgaaaacattatgtcaagtaaaccacgtcagctaccaaaggcaacttgctgtatgactccatttatatgaaatgttcagaacagggaaatccacagagactgaaaactgatgagtagttgtgagaagctggggggagagggaatgaggagtgactgctaatggaattgatttttggggtgacaaaaatgttctggaattagatagtggtgatggttcaacaaatctaccaatatacgagaaaccactgaatttaaaatgattaattttgtggtatttgaatatctcaatataaaaaacagactttgccaccctgacatttagttatctctatactccagtttattccaaatcttagaccatctataccacaaaatgaaatttttaaatatcattatagtataatttccaaacagattttatttagaagatgtagaaattatctttcccatgcactcatatttctacagtgctataaaaatatttctagggaataaattcaaatattgtcttttgccagtaggcatttttcctcctggttcagacaaaaatctattgatctttgagtatttgtcttttctgagagtggtgctatttatcaacatgaattttatgggctgatgaagtactaaatacttacaattaagaaggtccagttgtgtatctactttagggcccattcatcctggttactatctatgcatttcttgtaatttcacagtgagttgggatttacatgaaaggaatactactgccaggagtttcaaatgacaatgacagcttccccatttgatgccaaacaatttaatcttgcttccctccagctaagggaagaaggggttcccttggccatcgaagaactgagatttaaagcacaacccttgaatttcctgcgtaattatctttcctgggtggtccatggtggggcacagttgatagttatttgtcagataaatgcggcagacaatcactgatgggataccattttctttcaaatccaagaatgagacagctctaaataactcagaaaagacatttcaaatacagagtcatgctctgttagagctagaggggtttgaaatacctagttcagaaagttgcaaaatgtattctaaggaatactagttccacaagataatccatgagaagaaactctaagaaatctattaacacactgttttccaaaaatacttgcccacagatcctttttctgcatgacacctattcatgacctagtaacatgttttgaaaaatcctaatctggtcaaaaatccatttcacaaaagataaaattgctcacggctctccacttccccagatttaactggtttgcctaaaatcacctagctaggccctggggagaactaggactaacttccagcgctccttcaatgctaccacactgtcttaccaggggaaccttcttctaaaggcaatttaatcatattggacttcctgatgaacagcaagatcattagtcatttaatgttagttatgtttgaaagctttcccacaaaagggttgacctgaaagaggttagtattatatgactctcctttcaagttgctatttcaaggttggttttacctggagtgacaggaaatttctgtctctttggaacagctccatcttgaagatttttcaatatttcttaccacaaccccctttctgtgcttagtatttttagctcattgttttctattttggcagccgagaagctgcagtttgtaattttacctccagcttcatatttcttcttaaaagtgaatacaatgtcctgtttataataa

SEQ ID NO: 1880742 - DNA, 4001 bp, Homo sapiens
gtaaaacagatgatgccaaccaatctgaagacccccacagaggaacagaatcatcatgagaatacaatttcttcagctccctatcccatgattttaccctgcactcttcaaccaatcaatgatctccacactttagcccactccaaaactcttacgaaccctagtcccaaactcctctgggagatggatttgaggtttctcccatctcctcgttcagcagctctacaattaaacctctctctgctgcaatctggtgtatcagtgtgttgactcaccatgtgtttcaggcaatagacctattatggttacagatcattgttgaatctaagttacaagtgcataacgtttcattatactgttctctctacttttgaaagtatctgaaagtttctacaataaagtgattaaaagaaatgataatgacaactctcgccccctttctctccctccccccaccaaagagtgagggggaaggcttgttagtttttcttctggggcaatacggaagggaaagggaaattaacgagactgggtggcccctggcagccagtgtagggaaagaaggtcctggaagtttgaggtagtggtggcaacttttgatcagggaaaaccaactgaggcctggagctagtaataaaaaataaagaccaaggaactgtgctaaacttaagagctcaacagctgcaaggtctgttcctattagcctgccggactttgctcaacaagcctgtaaccaatcctgagtactcaactctggcacagtaaaaacaaaaaacaaaaaaaacctattctgcctatttcagaaattatcaattacacatacatcactgtgctagttgaggtaggctcatgaaaagaccgaggacacaatcccagcccttgcaaagttcacaacattaaaagaaggcccaaaacttggaaagcagtattgctggtacagcatgaatgtacaaacgtaatacatacaagcaacatggacaactggaggagcacccaagtttgcccatagttacccaagacgggtttcaccaaaaaaatagcttttgagttaacacttgaagactaacttagtgtttgctggaacaagagccaggagcaggtcatgggagaaagaagtaaatgaatttgcaagacctaacatgaaactgcaaggacacgtttttgggaacttcagtatttgttttgctggagcataaagggtggcggtggaggcgttcctaaaacccgttctcagcctgcatagaccacgataatttaagcctgaggccctttgggccttttaaaattcagtttcctgatgggaaaggagaggagatccatcttcatggaaaacttacgggttgtgggtcagactgcattttggagcacagagacagcaacaaagaggaaatggagagggtttaaggaccaacaaaaaacacgtggtgcaggccggtcgcacagcctcacgcctgtaatcccagcactttgggaggctgtggtcaggagctcaagaccagcctggccaacatggcgaaaccctgtttctactaaaaatacaaaaattagctgggtggtgcacgcctgtaatcccagctactccggagcttgaggcaggagaatcgcttgaacctgggaggcagaagttgcagttagccaagatcgcgccactgcactccagcctgggcgacagagcaagactccgtcaaaacaaaacaaaacaaaaaacacgtgatgcaggcagtaacaacctacttcccacagttatagacccttaacgcaggaagatgagtctatcagaaatcaatgttctgaacttcctttctgaaagcagtaggcttttgtactcaatagtaattttatatggattctctatcactgggtattgatgtccaaacaataaatccttttcccttttttattgacatgaaacgtaagtgctcatttaggtagtctgacgcctaaatgagcacttacattgtatgtcatcagtagtaggcatcagactacttaaatgagcacttatgttgtatgcttatgcctatttcaaaattatagattatgcataaaatactataacaaaaagggctgttgtaaatatacttaagctgtaaggaatcaattagcatcataatattagtagcaaaaggcagttggataatgtgtgcgtagctttggatttttttttttttttttcacaaaatgtatttggattttttttttttcttaattgacagggtttcgcttagtcgcccaggctgaagtggagtggtgatctcggctcactgcagcctcgacctccggggctcaggtggtcctcccacctcgacctcccgagtgggaactctagttgggcgccaccaggcttggctaattaactttgaaacgacttagacaaggcctctgccatgtgccttgcacaataaactctccacaaacatctgttcagcgattttacagaactgcggtcccacacctgctttcagggaagcttcccgtttctctggagttacttcccttcactttgggggtgctagacgtcctattgcgcaaacttggcccctggccacagggtccgccgtggcgcaagctgtggtacaggctgcgcgccccgcctcggcccacaggcgcctgagatcccgggacggatcgcggtccgaggctccgcggagcttacgcctgcgcacaacgcggccggtcggacgggggcggagccagggccgatcacgcccttcgtccactccgccaggtgcgcgtgcgcagcggccccgaccccgcctcagtcttccagggcggcggtgggtgtccgcttctctctgctcttcgactgcaccgcactcgcgcgtgaccctgactccccctagtcagctcagcggtgctgccatggcgtggcggcggcgcgaagccagcgtcggggctcgcggcgtgttggctctggcgttgctcgccctggccctgtgcgtgcccggggcccggggccgggctctcgagtggttctcggccgtggtaaacatcgagtacgtggacccgcagaccaacctgacggtgtggagcgtctcggagagtggccgcttcggcgacagctcgcccaaggagggcgcgcatggcctggtgggcgtcccgtgggcgcccggcggagacctcgagggctgcgcgcccgacacgcgcttcttcgtgcccgagcccggcggccgaggggccgcgccctgggtcgccctggtggctcgtgggggctgcaccttcaaggacaaggtgctggtggcggcgcggaggaacgcctcggccgtcgtcctctacaatgaggagcgctacgggaacatcaccttgcccatgtctcacgcgggtgagcaggccggggcgcgaggacgggagggggacttcgcggcagccgaggctggggtcttcagggttggccctgaaccgcaggccgcgaagcgggcctggcacggctctcaggcctctggctgttggaactttcagggaagccctcgtttgctcggtgcggctccccgatcgctgttgggagggaggtaagtctgcggacaagatgtgatcttcgcctttgatcgatgaggtgaagggagtactaaagacgttaaaatccacagaaggaggcttgtggttctaacaggtgaggaaatctcatgattcctaatcatgggcctcttttccattcaccgcttcccaaagtcggaggggtgagtaggaatccaaactcttcccccagcgcgccccacgatcggttgtcccttcaccaacataaagtgatggctcgttggcactctggtttcttcactttcttgaatcatgtctgaatattctaaactgagtcagaaaacctgcatctgactgagtcagtaagccttgacctgtgctttctgacttgctaaatttagggttataacactggctgtactgccagtcagatttcctgagtcttgagttacgatcaaaattttaaaattactgtattcattcaagaaaagaccttggggccgggcacagtggctcacgcctgtaat

SEQ ID NO: 1880743 - DNA, 4001 bp, Homo sapiens
aaataactgtaaaaatacaggtagaaaacataaaatatttattaaatacccaccaattattatgcttggcattttaaatcacttttctcctaattctcacaaaattttcatatttattaaccccattttgatgaagaggaaactgtcagttcatggactcacatagctattaatagtaagagcaaagctgggattcatacccagttccagtcaaagtacttgcagtttctactttttgcatacctgtagccttttatttaaatgattctctattgtaattataaaataagaaagagttctattttaataaatactgtgttaaccttacaacttggctcaaaaacaaaatggaacacaatgtgcaaaaataaaatcattaatgctatttaaagctttgtgaaactaattcatctatcacagaatttaaatttttattacttttcatgtgggggccaaagaattttagttacttcttatttcatgggcttctcatagtgcaatcgctgatggtagggaccttgtttttaccctaaactctatattaaactcggattaaactaaagttgtcaacacacagtaagtgctcaataattattggtgaatgaatgcaatcttacgtatgcctggtgctttgaaacttacaaatcactttcactcattattgattgtgactacgacaagaaggctgtgtatgagttagtgacaatcattgttagcatcactttagagataagaaaattgaaatgtagaataagttgagtaacctgctcaaagcctcttggatttgactgtaaatcaaggtctcttgagtacaaagaacaaagtttttgtcctactacaaacactcccccattaaggaatatcaatttttgttaatgtttgacaaaactatgcctcttatttaaataaaacactgaaatgaacagacccgcatgataccaaactgcatgttagagtttgaggtcaccagtttatttgaattgcttgaatgtgcttttatcatactgaccatcttacaaggtagatcagctgttgccaaccatgatattgggtcagcagagtattgatgcatctgagatcaacacatgagaaaggagaggatttggagctggaaattgcagaattatccatgcagcaacttggtatgagcggccattaccaacaggaaggatagccattaacggcatccatgggggagaaggtgaggaactagtgaactagaatgattatcaaaatgccaaaacaaagaaaagataaataatggaggtgatgaatatcccgattatcctgatttgatcattacacattatacacatatatcaaacaacaaaaacaaatggagtgatgaatatcacatgtatcaaaatcacatatatcccaaaatatgtactactatagattattttttataaaggcccaaacagtgagaattgcatttacttggttaactatgtgttgacatggccttttttgagattttatatttagatcattttgataaaattgcatcatttttaagaaaaacttttatgtgcttatgtaacatcaagtttgcaaaactacagtcatagtaaaagcaatacaagccaaaaactaaatgtatgagtgtgtgtatgtgcagctcttataatatggagtacattgaaattaaaatatttaaagggattcatttccactggagctatccccatgtgtgaaaataaacacattttcttctcaattacccatggtattattggctctccacaaacacttgaagagcttgactaagccaagttatgtactactcaatgctttttagcagtctctcttaaactttttttacttccatctaatccctggtcatagcctctgggaaattcaacactatggagaaagggccatttgctttgtggtcttacataaaagaagttatcacccaaaagtcatgggatatgttgctgactcaacctacagaaggatttcaggttggatcagcaacatatcccaggagttgaggccgccaaacctcctcttaaggccaagtcacagcaagtttactgagacaactggagagatacctgtaatgactgctggaactcactccaaaaccaacatctataaaaagaaacttctcttgaatctccggtccaaatcatcaaacctatgtgttttcctaacaggaaacagagaagaaaccacttttcctcttcactctggcctctattgagaaagaatccaacttctgaatattcaggaaaagaaagtgctttttggtgtgacaacgtaagcaactctctaagtccctaaggagcaggaaatgtgtagagaatagccacctgtgtgtatattacctctttccagccactcttttttgttagccagcagccaggttgcaagtacatagtctgtacttatctgtgcaccatttgaggaccaccagataattaagtcacactcacattgagatatttctcctctgtctccatcctcagttcccctacatcagcctgggtgtaaaaatatcaccacaaaatagcagtggccctatctccttgactgtcacctcctctcatatatctctagccccactgaaaatcctatctactcattagtaagagtgttcccaggggtgacctcaggtgcaccagaaaccatccaattccctctgtcctgtccttactgcagctatttcctaccgtctttccatgaggcctctctgaactgtgaggctttggacagggcctcattgccagccctgctctgggccccacaacaagaaaattgcgctcccggccaaagtgtgtgttctctgtgggggtcctgaggctatacggtggcttcagccacttccactgccagctccacctaccaggcaccgcccgacacaatggtcacaggaatccctggattcagtgccaaagtgagaagaatagtgactgtagtagtctagtagtcaggattctccagagaaacagagaaaataggaaagagagagagatgagaaatgtgtgagtgtgtgtgcatgtatagtgtgtgtgtgtatatatattcagagaaacagaaccaatagagtgtgtgtgtctgtgtttgtgtgtgtctgtgtgtgtattatatatgtgtgtgtatgtatatatatatatatatatatatattcagagaaacagaatcaatagcgagagagaaatagaaagagagtgtatgtctgtgtttgtgtgtgtctgtgtgtgtattttatacatatatatatattcagagaaacagaaccaatagcgagagagagacagaaagggaaagtgtgtgtgtgtgtgtgtgtgtgtgtgtgtgtataaagaaagtggggtctggtgtgcaattttagggaatttgggtaagtccccaatctgcagagtaggccggcaggctggagacccagggaagagatgacactgcagagttcggaggcagtctattggcagaattctgtcttctgtggggaggtcagtctttgttttttttaaggccttctactgggtaaatgagacccatccatattatggagggcaatttgctttactcagcacttactcatttaaacgttaatctcatttaaaaaatattttcgaggaaacatccaaatgtttaaccaaatttctgggtactgtgtcccagacaagcagatacataaaattacccatcgccttttttgtttgacattttagtaactctcctttggggtcccacctcccttttggtgggcttacagcccaaaccagtcattctcaactccaaaggacatttgtggcagtcacagctgggggaaaactacttgcatctagtgggtagaggccaggaatgctgcaaaatgtcgtctaatacacagcctggttcccaacaacagaattttccagtcccaaatgccaatagtagcattgcagctgagaaaccctgctccaaatgaccagttcacttcctgtctctaaccctgttcattattgcttcatcctctctggcctcctttcaggtcacagagcatgccaatt

SEQ ID NO: 1880744 - DNA, 4001 bp, Homo sapiens
tccttgatatcacctagctctgtgattctgtagtaattcgagaatattattaactggcaacttctcagagtgtctccctggccacacagcctaaaagtaaccatgagcactctcctatcaaacaattttcatgttcagcatagtacttgcccaagacatttttcttacttttgcatccccactggactgtaagaaccaagagaacaagactttgctatatttactggcacaccccagggccttacacaacctaataggcaccaaaaaaaatgtctgctgaagaaataacactcatgtaatactaataatgcctctttgcccaactttaaaaagcaaatagtacatactagacatgttctgcattttctaagttttaagaaatcaattttcccacataaagtattatgtgctttgtattaatcttacaagcaaaggttttaaaaatacttagtaactgccacgttgttagtaactttaaatacaagataataatataaaagcattttatcaattccaaaaccacctgcaaattttccgaatgaaattgcacggcaataaaaatctttatcaaaataaagcttaatgaagcaaagaacaacaaacacaaatcatcccagtaactcaggacggtagtgtctttctgaaatcatggtgacttgctagctctcctcatttctgtgtacagccagggcactcgggtattgatagcgagatacagataaatctcacagataactccatcatatttagaatcacacagctcctagtgggtaccttattgccattaaaactttcccccaactcctcaacactctcttcggaccataaaactaaaatcccacagcttcaaatctgctcctctgcctccccctcccgcaattaatcctttcgaacttttcccaggggattcacatctgccatcaagatgctttcatcctgctactattcctaagtgcctgcttcctcccagttacgtaggtactctcgacccagaaaaaaggcacgggcgaggcaggcgtccctccctcccaccccagcttctccccgacccccagcaggagcgcccagcaggtgcctcgctccgcaccgcggctcccgggccgctgagaggcggggcacacaaaggacccgcatggacctcccccccggcctcctagcgtcttcccccaccccccacagcccggcgccccgggtagctggagagcgagggcggcggccgcaggctcgacggagaccagggacgctcgccccggtcgccccctccctgaccccaaccccgcccacgtcccacccacgaaggctgcccagaacgtaaaccctcgcccggcaaaaccgaaaacgcatccccagcccggctgcccgggccctgcgcatccagcccgcagcctcccacgccgcgcccgccagccggcgcccaacggccgcccccgaccgcctcccacggcacccggctctttcccagccccggaagggtcccggtcccgccgcccgctcccccacctcccgggaagggcccgacacccgcccggccgccccgcactcacaggctgccggagcaggaggtacacacgaaggagccgaccgtcatgttaacgtaggtggggccgcgctggtcgcagtcgaagcactttcggttgtgcgggaggccggtcatgtcccgcagcatcttcaggtgcttctcctcctgcttccgcttcgcgctggccgccatggccgcggcgccaagggaggaggccggcagggccgggagccgggcagcgctgcgccgggggcccgcggtcccacgggccgccctggccgcggccgccgccctccgtctgcgcgcgccgcccgcgccggacccggccgcagcggcttggctgtactgggctcgacgcggcccgggcgctgtggtacgcgggctgacgggccacaccaaccggcacagccgggacaaccgccgccgccgccgccaccttcccgacttctcctgaggggaaaagacgaggaaggggacggcaagaggaggcccgccctgggcggccggtagccaagtgtccgctggcgccctctgctggccaggaggagtcactgcggcctcgctgaggcatgggccgggtctggagccaagtagggtagacacaatggtgataataatattaataatagacagtatttattgagcgcttatatatgcaaagcgtttcacatgggttaccttccccttctgtttaaaactcttcaagggctttccactgctttgagtataattccaaattcctcaccgtgccgtaaaaagtgctccatagtctagcccagtctacctcattcttcgtcgtcctcactcagccacactggattttgagttttctgaacacagcaagctcctttctgactcctgcaggacctttgcccttgctcttctctctttatctttgggccagctaatttgggggggcttggggtgtcctgtgcactgtaggatactgggcggcgttcctagcctatacccactagatacaagaacaaaccccccaattcccattgctggcaaccaaaaatccccagacattgccaaaagtggagggaactttagggcggtgcagtcacctggcttgagaactgctgcgtgtggaaacccggatcatccatagctgacatcctctaagtcaggtggggctcagatgtcacctcccccgccagactgtcccagatcagccgagttaatgttgcagctcacctttctcgaagttgctctccatcaaattgctgcgttgtattttcgtctcagttctagctatttgaaatactgcatcttatttcgtgtttaccatgggtgatctggactctccctttaggcgctaaacagcctggcccccgtattttctgtgccactccaccccattcccctcgcagagctggagactaggtgttcaatgttgacggaatgaatacatgaaatcgttcatgtaatcttcacaacaacccttcgaggtgagcgttattgttatttacattttacaaaacaggaagatgaaaccctgagggattaagtaaatttacccaagggtacctatggcgaagctcaattccaacccagacagccagactgcaggacccaaatccccactgcaacaatcaacttcgtctctcgttttccaaaggagtacagggagacccagagagctgaagttctcaaatcactgggctgttgaatggattagaatctacgtttcctaacagccaagaccaacctccacatctctcatgaaagggattgggtgaatcaacaaagtgagacttcatattaatataatactactaataataattaatgtttttaatattaaaagaaatggacagatagattggccaatgaatgtttttaaacttttctattatggaaaatatcaaactaccatgagcccatggaccactttcagcaatgattaagcccatggctaatcttgctttataaatacctcaaccctccatcccctctcctattattttaaagcaaattctaggtttcgtaccattcatctaaatggtacatagttccatttgtatccctaaaaaataaaaactttatctctttcaaacttagccatgataccgttagcatatctaaaaagttaacaataggctgggcacgatggcgcacacctgtaatcccagcactgtgggaggccaaggcaggtggattacctgaggtcaggagttcaggaccagcctggcctacatggcgaaaccgggtctctactaaaaatatgaaaattagccaggcatggtggcatgcacttgtagtcccagctacttgggaagctgaggcaggagaatcacttgaacctgggaggcagaggtggcagtgagccaagattgtgccactgcactccaacctgggcaatagagcaagactccgcctcaaaaaaaaaaaagttaataactcctaaagatcatcaaatatcgcactagtgtttaagttggcaattatcaatattttaatgagatttttacagttt

SEQ ID NO: 1880745 - DNA, 4001 bp, Homo sapiens
ccagcctgggcaacaaagtgagactccgtctctacaaaagataaaaaaaaactagccaggtgtggtggcatgagcctgtggtcccaggtatacaggaggctgattggggagaatcacctgagcttgggaggctgaggtggcagtgagccttgtttgcaccactgcatttcaacctgggcaacagagcaagactctgtctaaaaaaaataaaaaataaataaaaataaaaataaaaaagatgaggaaactgaggcttggagaggttaagtatcctgctcagggccccccagctgactctggggccaagatgaaccccagtaagaatcaagagcagcattcagaggcaaacacgaagccccatttctagcccacatactggtgtacttaacagtgaaaggcaaactaatactgtggtttttgaaaaactctcctcccatgccatatctgctctttttttcaccttttagttttaaaataacatttgaaatctgccctttttaggaaagaccaatttaaaaaaaaagtcaggatttcaaccccattggaggtttattcctccctgcatgtagaaggctgtatcaaaattgcttaaatacaaaaaatgtataatttgaaatagtggaaaatggttaagtaggtaaagtgggcatcatagactgacaataaatgtaaaaggtaaaataacttaaaggcagataaaatcatttttttaaatgccccaaagtggtaaaattaccctgcagtgcacagaagtgatcaggataggaaaacaattagaattttttttttttaaactggaaacgaacaaaagcataaaggttgctaaattgttccagggttcataacaattaccacaacttccctgaaagtatagatagacccatttacaaaaatgctcaatgttacatttgaagtaggagaaacatcttgcaatatataaagccacagtgagtaaaatgcctgtgaccaaaagtagctatgattgagtcaaccagtatttatttgttgttgttgttgttgttgttttgagacagagtctccagagtctccctctgacacccaggttggagtgcagtggcataatctcagctcactgcaacctttgcctcctgggttcaagagatcctcccacctcagcctctcaagtagctgggattacaagcatgcgccaccacacccagctaatttttgtatttttagtagagatggggttttgccatgttggccagactggtctcgaactcctgacctcaacagatcctcctgctttggcctcccaaagtgctgggattacaggcgtgacgcctggcccagcatttactgagatactgctgtgtgttagatactgttttgggcattggagctacaacagcaaacaaaacaggccacgtccctgccctcgtggagctggcattctgactataaacaagtgaacagataaaaagatgatttctgcttgtgataaatgctcccactttgccacactgaccaaatcaccttgctctgattcagcacgtcagagcagctgagagggacctgtgaggcctcctcatctagtcattctcaaggttaatcttagcagcagaacctgttgtttaaaggacatcttcggatgggcacggtggctcaggcctataatcccagcactctgggaggccaaggagggtggatcatctgaggttggaagttcaagaccagcctggccatggtgaaaccccgtctctactaaaaatacaaaaaattagccgggtgtggtggcgcacgcctgtaatcccagctactcgggaggctgaggcaggagaatcacttgaacctgggaggcggaggttgcagtgagccgagatcgtgccattgcgctccagcctgggcaacaagagtgaaactccgtctcaaaaaaaataaataaataaaataaagggcatcttctgtggtggcgggggttctgaggacagtaagctagggagtaagccggacccagagccttggccggcagcagaaacacaaaaacccacaaagggccagtgctgcggggaatgtaagcctctcgcactgtgcccctcacatgggacacaggatgttgccaggctttccatgaaaggggttctgtggtgtggtggtcacagcgcggatgcttgctattctccatatttgcaattatgcacccccacatgcaccccccgccccccacacacagccacttatgaagaggtatcattggcatctttgtcttctatccctcggccagagctgattggtccaggggaataaatcagacctaggctagaccaatgggcgtcctccactgggtcttggggattggcatgctgggagaccaggccagtcagtagtcagggaggaaggcggatacctgcaagtggctgttattagcaggcgtctagagggcagggccacagactgcccctgctgacctttgcaagccctttgctacctatcctgagaccttccccctggtctctgtgaaatgcccttttgtaactttaagtgagcttccctttcctggagggttgaagtgagtttctgctcctcacaatgcagtagcaattacacggtcaaatcagttgggaaggctggctgcagtggctcacacctgtaagtttgggaggctgaggcgaggggattgcttgcatctgggatttcaagaccagcctgggcaacatagtgaggccttgtctctataaaaaataaaataaaaaattagccaggcatggtggtgcatgcctgtagtcccagctccttgggaggctgaggctggaggatcgcttgagcctagaaggtcaaggctatgctgagccatgattgcaaccactacactcagcctaaataacagagtgagaccctgtttcaaaaaaaaaaagtcagttgggaaactgggtcattaaagccacacaaatttgtttactgcaggacttttcggagcctttgacatgctaatacatacagtgactttccaagtgggaccaaggtatgtggtatttcccaaactcatggaatgcctcacctagctggtgttcacagaacaccttttgggcaatgctaatctgcctcccctcccctcactgtacaagtgacggaatgaaggcacagagcgggagagtgagttacccaaggtcacacagctgctgaattgcagagaaagtcctggcacctgaggcctcctagtgttcttcccattacatcccagttgtcataagacttccttggatggatgatgtatgtgctgagattcttggaccgaggtggtggtggtccagtgtagacgccaggaaaagggtgaggtcgagaattgaaggtcaggccttggtgagagaaacccctgtctcctttaatcctggatggtagctgtggcttcagcggggactaagagccaacagacggcttggggctggccccaggctgccctgaccgcctttacagcatgcccaggaggacggctccagccaacccagcctccccttcttcctcaggccacgggcaggctgaacaagagaaaaaccttttctgcccatggcagggcccgcccaggcagccagcgccgggatgacgcgagctgtaaatcaccccgtggaccacagacccagtgccatccccacgggtttcctttccgcttcttaatcctcctcctcagactcggtaacacaaagcagattcctgctggggccagccatgcacagtgggcttggagaatgtgagcctgggatttaccacatcaagatgctcccgcctctcacttttccttttctccctcctgagccactattagctggagagcactccctccctctggcccggctccctcgccctccttggaccccacttcagccttgccccagacttgcgtcttggctggctgccccggcccacggggctcaccagggcctgtggttagcaggccctccacgtcgtggtttggctccatcctggctccccaagcctctgtctcagtgagagcagcctctgtgtggtagaatgaacactgccga

SEQ ID NO: 1880746 - DNA, 4001 bp, Homo sapiens
tatgaatgtcttcttcaaaatacactattaaaagagtgaataaaataagccacagagtgggctgggcacagtggctcacgcctgtaatcccagcactttgggaggccgaagcaggcagatcacaaggtcaggagattgagaccatcctggctcacatggtgaaaccccgtctctactaaaaatacaaaaaattagctgggcatggtggcgggcacctgtagtcccagctacttgggaggctgaggcaggagaatggcgtgaacccgggaggaggagcttgcagtgagccgagatcacgccactgcactccagcctgggtgacagagcaagactccatctcaaaaaaaaaaaacaaaaaacaaaaagccacatagtggcaaaagatattatcaatacatatacccgacaaaggactcatatccagaataaaggactataaaaacaagaaaaggcagacaagcccatagaaaatcacacaaaacacatgaataggcatttcacagaagagggtacccaaatggccaataaacaattaaaaaggtgtttatttgatatcagaaaaatgaaaacaacaatgagattcaatacactgcattagtctttgaagagaatggctaaaatttaaaagatggaaaagatcaagttttgatgaagatgtgaaaaactgttgggcagtactactcaagctgaaccccatgcatcagagaaattacacttttatatatccaactgaaatatgtgtgtgtgtgtgtgttcaccaatgttcacagtggcactagttgcagtaatctcaaattggaaacaacccaaatgtccatctttggtagaacgtataaattgtgttatattcatacaatggaatactacacagcaatgaaaatgaagatactattattactctcaacatgaatgaatctcacaaatagttgagtaggaaaagccagtaataaaataatacacactgtatcattccattttgtctaatgtttaaaaataggccaaattggtctagggtattagaagccaagattacagtcaatttgagggaggataatgcctagaaaagataatgaagggagcttctggtatggtagtagtttctgcctcccaatctgggtgctagcaatatgtaggtgtgtttactttatgaaaattcatcaagctctctgattataatttgtgcatttttctgtctgtatgctatacttcaataaagatagatttatactgagttaggaacaaagctcaataactataattctaggctgagctgctaataggatttgttaaacaatttaaactgtgccagtcagatataatgatgcgaaattagaaaggtaaaaggaagagagaggctatttcccctgcctattagttttccttccttccttccttcctcccttttctttctcttctttctccttccttctttctctttctccttccttccttccttccttttctttctcttctccttccttccttccttcctcttctttcccttccttcctttctctctctctctttttaccttcctccttccctccctccttctctctctctatttatttattttttgagaaagattcttgttctgtccaggctggagtacagtggcacaatcacaactcactgcagcctagacctcctgggctcaaggatcctcccacctcagtgtcccaaatgtttgggacttcaggcatgcaccaacatgcctggctgcctattagttttcactggtagttgttgatgtacgtgcaacattaaatgtggtttttaatgaccagactttctgtgcctctgcattgccactaacttcatctgtgagaaatgactgtgatgccagcagtggactttatagcttcctgacctctagattgtagctgtgtggactgaactgcgagcccaacagcatccctcttaatgctcctaccattagaagggctggaagaaggcatctccctcagccttcttccagctcttctaatggtaagagcatataatttttaagcatataattcttagcattcagtacctagagaagtgtctgcactgaaccccaactgatatatcagttaataacacaactgataggttatctagtaggtttatggttggttgtaagaatctttgggaaagaaaattaccattggcaatcctaccacctaggatcatcattatcatgggaaagttctgctttagaggcaacctaaatctattttgaggtcctgaaaatgcatttacttcacaggatatgctggtttctgctgccattcaaaaattattcttaaggcattctttgttctcttttcactagctaaataatgccgtgcttttaacttttctttatgtgttcagcagcttttcccagttgtggatatttgaaaaaagtattcatataaatactgcctgttctggtaggattagctgtccctttcttttggttatattcccaagttcattcttgcttatctaaccaaagccctacattgctgactcaagtttagtttatggtccaagcccagtatcatgttactattagccaagatttcccatgggttgaggcagacttgtagaagattgaaaaataaaacttactggccataagtaagactttttatctggccttccagtacagaacattctctaatatagcagcttataaacaatgagaatcagaagcctaaaaaaattagttaatagccaaacagtgactgaatcatggaattgtacagttagaatggaccttagaagcagtctatataagccaggtatagtggctcatgcctgtaatctcagcactttgggaggccaaggcaggaggatctcttgagccctggagtttgagaccagcctggccaaaatggtgagaccccatctctactaatttttttaaaaagtctatatacataccagaacacagagctcagatatgtatgcaggattccagtccgtgctgaatactcttccagtatgagtactcttcctactcctcaaggtgtgtggccctcaaagcagcagcatcagcacttacctgggagcttgttagaaagccagaatctcaggctccaacacccactgaagcagaatttgcatgtaacacccccaccccttcttgatttgtatgcatgttgaaatttgtggagttagagacaaaagcaccacaggtgcatgtcttactatttaaagtcttgcctaattatataacatagaaacctgatcccttctggacaaggcctgtattattacaggtcctggtctaatagagtatttgaatagctgggttaaagaaaaagaaaactctctttaataatctttggaaaaagaggacatttatttgagctatgctagtttttaatgtacctattcagattttaatccattagaaaaattaatagcctatttggtagtagcatgtcctgaaaaaataagctgaataaattgaaagtatttaaatggatatttaaactctgcagccatcggtgatttagttttcaattacataaaggtaattacactagaatccacctcattcaccctgccgtgagaaaatgctggagtgttgtaataagccaatgctttcaggcagtgactggtctccactcctttttggctgggacctgaattcatttgctttaagcagtttagggtgtatgctaggaatataaattatagaaacaccctttgtgaccctttttacaaatgaagttgcatcactatgaagggtgtatgtgaggctataggcccagcctctcagattgggaatagctgacactgcatgcagatttggcctgctaggtaaaggcgggacggtggtttaggacagtgccccagctgggctcttcctagaccagtggttcttaaagtgtgcctgcagaggaggcttcgggggtgctggtaatgttctgtttcttgatctgggtgctggttacatgggtgtgttcagtttaggaaaagccactgagctgttcacttacaataaatacacctttctatatgta

SEQ ID NO: 1880747 - DNA, 4001 bp, Homo sapiens
ctggattggtttgcaactcttaaactgactgcctgtgtgatggggagaaagttactcagcctctttgagcctcgggttcttcctatttgttaactggctaaaatgctacctgtcttgcagggttactataagagtgacagctagttagctcctaaacacacatggtcctttgtatacacctgaacagtagctgtcatcgtcatcctcctcctcatttcttgtaagtttccattcagctgctataaaggaatccttctttccaaaatactcggcccccatcccaatccctgtcacccctctcactgtgttaagtctctgggactcacctgggtccctggcagcaggcaaggatcaggtaggtgacaacgaagacagcactagggacaaagagatggggaagcagttcaggcccaaatctgccccgcttggcagcacacaccaggccagtgatttggggcccaaatagccgtttggaagtctgaggggaagcaactcaacaggaagcaagaacgagattacccccagccagggtcactgagatgctctgaagcaccaggctccggccaggaaggaggtctggggaggctgcagctgacgggctgagaggacatgggggctgcagcgcagcgtgcacgccaccaccagcaggtcccactcttgctctcgagttctaggggtctgctactcatctgggcacgcacacccacaccctctggcacgggaaactggcaccaacttgggggccctctcaaaaagcattttgatcctgccctgagcaaagctggtcacctagaaacagaagctgccacccctgcctccctgcccaaccacagaggagcacacactcactaggacacgtagtagacagccacatttctcctcacaaaggcgctgacaggttccctgtggggcacaggaggacaggagtagtcaccctgaggcttgtctgccccacccaggccagccaggcagccctggcttcaccttctctaattgcccatggtcaccctgagagcagggcccaccgccacccacacccccagcaggtgaccctgaacccccagggcagtaggagtgggtggcaaagcctagagacttacacaaaggtgaagatagcaatgatggccacagtgatgagcagctgcacggagatgatggagtaaacctggacacagacggccgggcatgggtcaccatccggcacccctggcctgccccaggaagctgccagcccccagtactttcctcccactcaagaaccctccctagctgcagcctggcccagaggcgaccccagtgagatgcctggctcagaggcaatgtgcacttcttcctcagccccgctcccatgctccctgccatctcccctcctgtccaacaccagcctcggtgactactgacttgccctgcctggccaccatactctaccagtatggcctctgcactcccagcagctcagtctgcacgctctatgcagctgtgagatggagagggtgggttacaagcgagtaggatcatttctggctccaagctgcctatagtctaaagggagaaagatgtctggggaaggcgggcgctgtggcagaacccacctaggagattctcccagactgaatgtgtcctcccaaaacatggtcaagaagagaggtgcaaaaagagagggaaccctggggttagagaagccaggtgcccctctgagaagcagacaaggctagagaagacaggcagccagtgtatttcatggaattgatgccctggggctactgtggcctacccacttcccattcccacagcctgaggggccccaggtacacccacctcccagcgcgtatcttacctttcggataaaagtgtgtcgcactttccggtcatcccactctccaggcccgaagctatcactcactgctctctcctccccatcatagccatggcctgggcctagggacagatgacacttgactcagctggggacctgagacatgtggcgtcaatcccaaagcctccctgacaatctcaaagtctcagggatctccagccaaaagacaagtgttataacaggaactcttctcccaagctggggtcttctagacaccctcagagtgacccagagccggcctgtcacgagggggcttaggtgggaaacgttcctcacgtgcatctgtggagggctcctgtgtgcccagcccacgccactgggggttcactggggggtcacgatgtagtggggaagccaggcaggagcaggtatgggcatccactggggcagccagccagggcagaacaggggatggggacagagggtaggagaaaaggagggcggcagagcgcagtttgtgcagcagcagggatagaggtgaagacagggatctgcatcagcctcacagaggcaggtgtgcaaagggtgtgcgtgactgtgcaggacccatgcgcagatccgcaccagcgcacatgtccaggtgagagctggctgacacccctctggggttcagagatgctgcagggctgcaaacattccctgaatgcctgaatgcctgaatgcctctttgggaactacttttaaaatccacgcttgagccacccaggaagactcactgcactctaacttcacctcatttcctttttttttttttttttttttttgagatggagtttcggtcttgttgcccaagctggagtgcaaaggcgtgatctcggctcaccgcaacctccacctcccgggttcaagcaattctcctgccttagcctcctgagtagctgggattacagacgcatgccaccacgcccggctcattttttgtatttttggtagagacagggtttcaccatgttggccaggctggtctcaaactcgtgatccgcccatctcagcctcccaaagtgttgagattacaggcatgagccaccgtacccggcctctttttttgttttgttttgttttttgttttttttttggttttttttttgagacagagtcttgctctgttgctcaggctgaagtgcagtagtgcgatcctggctcactgcaacctccacctcctgggattgcaagcgattctcctgcctcagcctcctgagtagctgggattacaggtgcacgccaccacacccggctaagtttttgtatttttagtggagatggggttttgccatgttggccaggctggtctcgaattcctgacctcaggtgatctgctcgcctcagcctcccagagtgctgggattacaggcgtgagccaccgcggccggcctcacctcatttctgaccaaacacaagcatgtccctgccatgatgtttaccaaacttggctccaaatgtcttttgcaaaagtcagatttcactttaaaggatgaggaaagtggttcaggttcccaaaggagttcctaaggaagtcgacaggtctgggaggtggcagcagcttgttggccgcttgttgggaaacagagctggtgccctgaggtaacccctcaggagtcattacttggcccagccccattctcctgtggtgtgtacgttctgggacatgcctcatggatctccttgaacaaagggggcagcaagtggctgggggccagttgctgaggcaaaaagtggagggtaacaaagacagaaacagagggagagatctcaacagagaagatgagaaagggatttaagggaaactagaagagaaaaggggcaggaggcggtggcctcatctgctccaagtgctgtccctcccacccaccttccatctgcccttccaggactcaccgtagttcatgggcatcgggtgggtggggggcatgggctgtgggtagccagcagggtgaccgtagccaggctgcgggtagccagggtaggcaggataccctcctggcaggacagatggctgcccatagcccccagggggcggagggcctgggtacagggggttgcggtcttcatatggtggtggggcgctggggttggacatggctgctcacgggctgagggggaaccccagctgctgggacctgaaatg

SEQ ID NO: 1880748 - DNA, 4001 bp, Homo sapiens
cagcgggtcatgggaataacaccgccacatcgccagttggcatcgtttatggtcggaattacaacggtatctgatcgtcttcgaacctccgactttcgttcttgattaatgaaaacattcttggcaaatgctttcgctctggtctaaactgccagtccaagaatttcacctctagcggtgcaatatgaatgcccccggccgtccctcttaatcatggcctcagttccgaaaaccaacaaaatagaactgtggtcctattccattattccaagctgcagtatccaggcggcttgggcctgctttgaacactctaattttttcaaagtaagtgcttcgggccacaggacactcagctaagagcatccagggggcaccgagaggcaagaagcagggacgggctgtggctcgctagcccacccgctcccaagattcaactacgagctttttaactgcaacaactttaatatacgctattggagctggaattaccacggctgctggcaccagacttgccctccaattgatcctcattaaaagatttaaagtgcactcattccaattacagggcctagaaagagtcctgtattgttatttttcgtcactacctccccgtgtcaggagtgggtaatttgagtgtctgctgccttccttgaatgtggtagccatttctcaggctccttctccagaattgaaccctgattccctgtcacccgtggtcaccatgataggcacagcgactaccatagaaagttgatagggcagacattcgaatgggtcatcgctgccacggggggcgtgcgattggcccgaggttatccagaagcaccaaagctggcggcacccgaccccccggccggggacggagaggggctgactgggttggttttgatctgataaatgcacgcatcttccctgtgaagggggtcagtgcccttcagcatgtaatagctctagaattaccacagttttccaagtaggagaggagccagcgaccaaaagaaccataactgatttaatgagccattcgcagttttactgtaccagccctgcgtacttagacatgtatggcttaatctttgagacaagcatatggttctgataggatcaaccaggtaggtagaaagcggcctctgggactcgcgaggatgagcccggcgtcccagttgcgagattgggcgcggcagggcgggcgatggggcgtgggggagggagggagcagcttggggtggtgggaggggggtggtggggcggcgaaccggacatcccatccacccacaggacacaaaaccccccgacgggctcaccactcccgacccttcgtgcccatgtgcgaggaggccgaccgcccgacccgtgtgcggcagccgcgagggaccggcggccactcatgcgcggagggcgcggggcggccccgacgtttgggcagcgaaggagaggcggaccgcggtgcctggggtctcaccgccagtggcctcggggcatgaaggcggcccctcgcggcacctggagcggccgactggccttcggcgggcctgcggcttccccaccgccgccactgtcgcggccagccccctgaaccctcttccctgcacacactgctggccgaccccaaaccctccgggtgtccaccaggcccactcggggtgccgccgacctggtcccgaaggcgcacgcccggggacacggacaacgggccaaccagtggctagcggcggcgccccaccaggcagagccgggtttggtcccagacggggccaccacagcctaaggcggtgagccgctcggggagagaggatccgcgggcagggtggggggcacagacaggcaaggccagggaccgcgagggcaagggcacctgggagcccgcagaggggcggctcggggagaaacctcaggcacggccgggccaccaggaaaacacggccacgggatcccaccgccacagacaggagggaggtaccgcagcgacccgcctaggatgccggacggccctcggcaccaccgagacccgcctcatgagccccaggtcccgccatcaggaccccgaggtgacctcagccacaaacctaacgccagggccacgttgctcgtttctcatccatcctccaacccggtcaagctccaggagaccggcatgccccccacttgggacgcttcccagggccaggcggcccaaccccgtgccacgcaaacacggtcgtcggcaccggtcgctgctctgcaggggagcgggcagagagccggctcacagcggaacgggtcacaagccggactgaacgccaggcacagccaccgctcacgcagcctcccaaccgctaggacgccggcccggcccggcgggattctcccctgactcggaaggggaaggcgcgggccacacagtaggcgacgagcttccctgggtccccaccgcggaggctggcggaacccttgctttcccccactcacctcatcaagggggaagtggaggagggtcctctgcaagccagtcgccacggcagcgctaccataacgcaaagagaggcggcaggccgggggatccggtaccccaaaggcacacctctcagatcgctagagaaggctttctcaccgagggtgggtcacactccccacacgccagtcgcccctcgtcgggcccgcagaggcgctcagggacgcctggggaagggagggggcctgcggtaccaggaaaaatctgcgtgcggcaaccttgagccttcgcggtctgggcagggggcctggccgctgcgcgtgcgcgcaatccccgaagggccccctagtccaccagcctcctttctcccaggcaaagcacctccaagtaaacccacacacaacctgtcggaggcagaacggtagcccctcggcggccggccggcgcacgcgtcatctgccccagcccaccgcaatagctcacacggcccgtgcgcagccgccagaggggagcacgggacctgcgctcgccagatcaggcggcacccttccccgcgtgggaggggcgcgtctcactcaaccgcctcgacccccacaccaacgagctccctcaggacccactggtggacatcgcggcggtgaccggaggagggggcgctgggggtgggaaccacacaccaccactcgacctcgggcacctgagggataagctggggggtgaaggggaggagccgggcgtggtaggctcacgcctgtcatccccgcactttgggaggcgagggaaggtggatccctcgatccaggccttggcaacatggtgaaacctcgtctctaaaaaaatacaaaaactaactgttttcataaactggactcaaagttaataaatagataagtaggccgggagcggtggcttactcctgtaatcccagcactttgggaggccgaggcgggcggatcacgacggtcaggagatcgagaccatcctggctaccacagtgaaaccccgtctctactcaaaataccaaaaattagccaggcgccgtggcgggtgccagtagtccccgctacttgggaggctgagacaggaggatggcgtgaacccgggaggcagagcttgcagtgagccgacatcatgccactgcactccagtctgggcaacacagtgagactccatctcaaaaaaaaaataataataaatagattaaaattgaaaatttataaaaaacatagctggcgggtctcaaatgctcatgcctgtcatcccagcactttgggaggccgaggtgggcagatcacctgaggtggccagttcgagacccgcctgacccacatggagaaatgccgtctctactaacaatacaaaatcagccgggtgtggtgacacatgcctgtaatcccagctactcaggagtctgaggcaggagaatcgcttgaacacgggaggtggaggttgcggtgagccgagatggtgccattgcactccagcatgggcaacaacagtgaaactccgtctcaaaaaaaaaaaaaaaaaaaattaagcactgtattctgttatttttacttcctaccca

SEQ ID NO: 1880749 - DNA, 4001 bp, Homo sapiens
ctgcctgccagagctgcttcttggcagcagcctccctgatttctaagggcccagaaaacaagagggcacagagcccttgttgctgcagtggcgggcagccgccagcaccatgcgtttcccggagaggtggggaggcccctgggctggccatcctctccactgggcactgggtgaggaagggaggggctcgcatctttacatctctcccaacttttcttccagaggaagggtccaggatgcccacttgggaagcccacctcttgcttctagaagcacctcccccatccctccagctttttccccaatcattgacctcctagtgtctcgcttccccctctatcaaatgcaggcagcactgacatttcattctgctaacctttcaccacagcgggataaagtggagagtggagggcagcgaaaggaataccactggggtatttaaaagtgatgagggctctctggcactagacagaacaagcccccagatgctgagaagccatgaggaatccagacctccaccagggttcaatcccagtccaggtggggtgtggagatggggcagccaaggatgaggcatggcaggacctctctgttgggatgacaggggcctgagtgggactggggaccagcacccagaggtaaggagcccggtttgagtttgactctgagtcccagctacttcttgtccctatggaaagcttctcattgcagctgtgggggagaagtttctatctcaagccaactgcctacccaaggacagttcttgtaggtggtgaccagtctgggacaagaagccacacgcacacatacctgcaagcaagtgggtgtgagggcggggagcctcagctaacttgcagcatcccctcctccccatcctccaaaacccctctctgttctggctccaaggaagaaactagaatgtcagaaaaactcgcaagacaagctcctgtgatttcagcctctccctcagcacaggaaggggagcaagaggggccgtgctggtgagggccatgagtcagacgtggcccatctggggcactgacccgcccctgtctacaggctggatcccaggaaggacgcaaatgcagaacagtgccaccagccggacagcctcagcatcacactctgcatccacctgcccaggtctaagggaaggaggggatcctctaaggagccacctccagtctgtggacagctggcagctgggccagaaacttccaggggcttcaactctactgcagggctggcatccccaatcatctcaggagcctcagtgggtgaaggtgaggcagagagggcaaaacaaactctctggatcgccaggacacaaagtcccttgtgcatccccttcccccggcccctgccagcccagccagatagggaacttccctttcataaatgactctgcccagtcagaatcctgtctgcagagaggaagagatccagcacaggcctcaatgctcatcagccctaaacgcaaatccaagtgctgcctcttggtggctgtgtgacctttacaagtcacctcatctctctgaaatgctgctctaccaaagggaataaaatacgtaccttgcggggttgttgcaaggactagatgagctcatgcaggtaaataaagactcagctcaagggctggctaagagctcaaaacacaactgttgccaacggcatccgcacgcatcctctcctgtgcctttcacgtttgcccacactccccacccgtggctttatggctgcagtccgggggacccagaggcaagacttaacagggacacccacagtgacccccctgcttgcactcccgccccctgcccccacgggccaggcatacctgatgggctggaggtggggctggacactcggggtgaccctggtggagccctgggaaggagagaagagaagcagcattatgcaggggtgggcaggatggcaggaggagcacaccagagagctgtccacgggggcaaacatgatcctcttctttccttgccaacattctggccctgccaccctaacccctgcaaaaacacagcctgcccgaagccaaagccatcaacactgattccacgtgagtgtgcctgcctgtgtgcaagccccagagggacaaaaggaagaatcccgaatgctgaggagtgcaccccactgggctggtgccatccacactgagggcacactcaacagttactgaatcaatggaaacacacttcactttgatacactcgccaacacaagagaaaccccaggaggagaatacgactgccaccacaaaaggagcgatgagagtaatggcgcccctctgtcttgccaccatcaccccacacttctctgcttgaaagctgtaacatcaagtcattcaattgagtttagagaccagaacaggcaggtggagcatgcaggaaccaagacgaggcctaagacagtgagccatgctcctgagggcccactccccactgtctgtggcagacagtaaccatctcacccactccccttttcacagctgtcgagtggtacaaacttaagcaaatgggcccaatccatcccagggcagcaggatggcatggcgggtgtgaaagcacagggtcagaggcccacagaccacagagtttggattccaggatcctgctgggcagccctgccagttacttaacccctctgagcctcttgtaatgtcacatgtaaaatgggacaaccttcaggctggcagtgaggatccaaaggagttatgcatataaggcacttcgcatcatgcctggtatttaccagatgacagctgttgtttttgttgttacttttgtatcaagaaaaatgaaaagggtagttacaaccaaacattcacctctatagaaaaccaacaccctgcatcgcctctacccatccttccagtcacctcacaggatgcagaattgggaaggccagtttctagattctcagacctcctgagcccattgacaccttccaaacacccatgtgcctctcagaaaatggtcttttcctaccgccaagttgcagcctcttctttaaagagacaggaccacaatctgccaagaaaggaagaaactgaggcacagaataacttaccctcaagtccctgggaagttgacggccaggcaggattcacactccaacctggggcttgaccacggggtctccaagaagaggagcccctgcacccctctcctggctccgcagtgcctacgaggcaggataggtgggttccgaggtccagctcccagctgagccccaagttagagcagctctgctaagagggggaccctccatccagctgtccggaagaaggctctgcccagagtcccagctgcctcggaccaatgagcagctcctcagcagtgaaggagggaagagccaagtggggctactggggggaagtttctaagtctcacagctcttctggccctgaggactccagtttgcatgagtcaagcttgggggtggggggattagacaggggtggagctgggagtcaacgagtgactgtgtttggttttcaagacccaaaccaggctgttccaaaactgccccctcagaggaacacagaaacccaacagttcacccatctccatttcactggtccctaatgaggagtccctgaatctccccaggccctaggccctgctccaggccccagggccaccctgctataaatagccccttgagtttcatctgttgctgatccgtagccacttttggaggaagccaccacagctgctttgaacaactggaagccacaacggtagccaagacgtgaggtgtggccaggagcatgggaccagacccagggagctggagaaagacaatgggccatattgatatgggcttggcagggggaactggggaaccaaggggggccgggagcctgcaaaggtgcaggggtaagcaggacaagcaggacaggagacctggctcccctttccccaccgccctcttccaaacattacaacactccacattcctcagcctccccaccccaaaaaaagcca

SEQ ID NO: 1880750 - DNA, 4001 bp, Homo sapiens
ataagcaaaggctattttctgttctgggctaaggctatgaacaattagacatctctctggaatgccctggggcctgcaaggctcccaagaggctgaaggctgactggcaggggaaggtagtgtgagaagcagaggtggtacggagccagcactccaggaagaagggaggccagaactctgtccctacccctagaggtggagctgtgtcgcttctgggccaggaactgggctggcctgctttctaggggagtgagggggtgggaaggcccttgtcccaggctgagcgtggggctggaggatggggagtagtaagggggtgtctcaccaggccacagaagggtgtcatcccctagccccagcacagtgtccagtgagctcagcatggtctctgcattgccctcaaaggtccgccctgggtgggggttggagggtatgtcacaaggtgccaggataacacaatatggcataaggcacacccagacaggtgggaaccagcttgtaatgctctggctggccgtcagccctgactgtgcactttccagacccaccccaggcatctattccctcctcactgggaactgggcccaactggtcaccccctgaccaagcccatccgaggcctccgttgcacacagtgacacctgaagggaggggctgtggaatcttcgggctgcaggccccaggcttggtagacgcagggctgctctttcccacggaacacttcttcgcctaggctgccctttgggatttcatgcagcctgggacttgtgatcctcacccacccactcacctagctgttcttaacttttcataacctagtcctgccagtcactgtatcagagaaccagtctccacccaggggaaactaattccctgcagggctttactcagctacagacattctcccattctgtcccgcagctggcagaagtcttttttatttttgagacagagtctcattgttgcccaggctgcagtgcagtggcacaatcatagctcactgcaaccttgaattcctgggctcaccaccacactggctaatttttgtattttttgtagagacggggtttcaccatgttgcccaagctggtcttgaactcctgggctcaagcaatccacttgctttggcctcccagagttctgggattacaggcctgagtcactgctcctggcctatattatttatattatttaaatttttttttctgttttgtgacagagtctcactctgtcttccaggttggagtgcagtggcgcgatctcagctcgctgcaacctctacctctcgggttcaagcagttctcctgtctcagcctccctagtagctgggattacaggcatgcaccaccatgcccggctaatttctgtatttttagtagagacggggtttcaccatgttgaccaggctggtcttgaactcctgacctcaggtgatcctcccacctcagcctcccaaagtgctgggattacaggcatgagccaccacgcctggcctattttaaaatttttttgtagagacagtcttgctattttgcccagtctggtctccaactcctagcctcaagtgatcctcctgcctcagcctcccaaggtgccccaagggaagtctcaaggattaaaaccaatctgagtaacacagatggaagtaactgccacggcaacatctgtgctaaaactaaggcttcagtgctctccatgggactgtggctgccctggcttctgtctctccctcctctcccagctcctctctctttcggggaaactcaccacagccagagaggaagagcaggtcccctgagaagaggcaggagggacccttgtagggctccccatccagtaggtagaccagatggccttgtgtgtggccaggtgtagccagggcccggatctgaagccgtcccacgctgaccacatcttgatgacacaggggactggggaacaagggagcaggggacagaaggtattggatctgtgccatgctgatccctgtccccatcccaggcccaaggggctgggtgattcacaagagagtgggcttccatacaaaagaagtcaccccagtgcctcgggtctcaggtccgaaccctccccctttcctcttttggggactatggctggatcagttgggggatgggcagtgccagtcttcagataggctgggattgggccaggaagggcactggcaaagatccacctgctgatacccctgaaacacttcactgaaggctgggggtgggggaaagggcccatggaagggccatcccttgcctaggtcagggacttactgggtgaggtaggggatgccgtcctgagggctcccgtacacccgacagtcccggtgccgccggctgaggtcacggttccctccactgtggtccctgcaggacagcagagacaggcagggggcttcgaggggcaactgtacctaagcccccttctttaccacagcatctccaggcctttaagtgctggggctgtggcttctggactaagccaagttgtccacacctctaggcctttgttcaagctgttcccttgcccagaacatcgcccccaacaactcaagctggccaatgccagccgagcttcctgaaccctcagctcaggtcatcatctttcaattctccaagtggatctgatcacaccgtgcctgggcctcccatccctgttccctgtgccaactgttacctaaatatcacatacttcttttttgaagacaaggtctcactatgttgcccaggttgggcttgaactcccaaccctcttgcctccgctgttatatactttgatacagggctacctcccctattggtcttagaatttccttgatggaagagtcataacttttgtccatgcccagtgtgcagtaggtatctaatacatgcccatgaaatgaaagagaaatgactgccctgccctctggggcttcagaagcttgatcaatggagtggtgggagactgtcccctctcctccctccctgctggtgtccaggtgacttcacgaggaaggcgggtgccggcccgtactgacttcttgatctctggccccggccgtcctcaatgggcccagtcctggcaagcccagctgggacaagggtgggccagggaagacgggagccccttaccagtgcttgtgagtacacagaatggcgaccaaggtgaccccttccttttcaatggaagcctgcgagagagaggaggtttggagactggggagcaggatgcaagaggcacttgaagcagcaagagccaggagtgtgggcgctggtggagaggagaggagagcatggagagatgaagcagaggaaagggatggagctggaggggagagatccaggaatgtgaagcacggggcacatggaggcagagggacacttgtacatagagagaggcagacacagagagataaggaatgggagggaaagacagagagacccagatactgacagacagaggtgacagaaagaaagggggtctgaagggggccaatgggagtgaaagccagcctggaaactcactagacccagagtcctgggccaacacccccagccctctggctctgcatcccccactcctgctctccccttctgcccagccatgccctgtaccccccttccccaggctatgtgtgcgcatgtgcacgtgtgaacatggagcatatgggacacatcccacgggcagacggacaagggtcagccctctctagcaaggcgaaactgccagtccccaaggtgactccaggcaccccctgctccctgccctcccctcacctgcacagcccgagggtctgaagggtccacagccacagccagctgggcctgggtgtcgatgatgaggtagctgtagttgtccgagaggacagggatgggaagcaccttcactcctggggacagagatgggctgtgggcggggtaacaggcagggagcccaggggctggggtatgtgaaggggagcaggcggggagggtgggggcacagaatgggggatgctggccggggca

SEQ ID NO: 1880751 - DNA, 4001 bp, Homo sapiens
cctcctggccccttggtggtgatgattttgaagtcagcaggttctggtgggccgtgtgaactccagcagctctgggctgagctgtggaaacactgcgtcctttgaaataatacagcttcctgagcccaccccagtccctaaagactgcctctggggttgagattctgagatgcttgacagcatggcttttcccggtgttatgtgtcgtttctatccttaagcctgttaggggtggactggaggctggaccaagctccactggctgcaggaggacccttctgtgggctccaggctggccgtgtgcgtgtggggaggtgggatttgctgctaggcttcatgatcactgtgaagaagcagcccccaagaatagggtgataggccctccccatgtcaccggccgttcctagtcacatctgttgttgcagcatgttatcagtagagcctccttttactcttaaaaatgccctggtttggatgattgatcatacctgcccccatccccaccccaccacccaaaaagtgcagccaccctgtggtgtgcggtgtactgctccagcggtgcctctccgtggcctctgtcctaaattaaacgatgggctaagatgccttgaaatgcctgcagcaggcccggcgagagcttgaatgctcaaaggtgtctatgccaacttctgcttcttcaatcaaacttgaggctttaagagacaggcacgaataaggtgtctctccagaaggaaggcctgggggagacgcctgggctggggcatggtgaggacgccccaatccagaagcacagcctctgccctggacgtgcccagctgccggagccaggcgctgcctcgtggccctggagaaactcgccttggtcttgcagatggagtcatccaggacactgagaccccagacacctggcttggtggcggctgtcccacccgaatgcttggccgggcttagtggcagaagccttggactccaggtaacagggacaaggtgagctttctcaaaaacactgatgggttagctcccttcaaactcaaatgcaaaagaccccccggcatcctcccaccctctccctgaaaagatctcttccaaatgccttatgggggatcttacaggcgaacacattgtttagtttaagcctactgcctggatttcaaattcatcatgaaataaatacttggattcaaaagatgaaaacaactgaattacaacagatttctctaaatcttgataatcaccagattcatgtgaaatgtttgttgaaaagagagagcctaggccccaaaccagatgtcccagggaagaagggcttggaaaacatgtagtattaacaagcaccctggtgattcaatcagcagctgggtttcagaaacttggctttgagttctcaacttactttgaagatttgaaaacaatataatttcaaatattggcaacttcagcagcacccaggacttctgaggtgctcagaccaggccagtgggatgcagaggtttgcacctcacataaaaaggagccaatttcacagggcacagtggctcacacttataaccccagcacttcgggaggctgaggtgggtggattgcttgagcccaggagttcgaggccagtctgggaaacatggtgagatgcctgtctctacaaaaattaaaaaaaaaaaaaaaaagcagccagaagcaggaattcacagagaggcatgtgcatgcacacacatgtgcacacacacatgcacacacacacgtacacacacacatgcacactccaaaggaacctgctttaatattcctaaaatgcctgggaacaaaaagccgttcttactctccactccttacctccaccctgcagccgcccgtggagggaccggatgaccttggcacttccgaacctcttgaagcgggctttcacatgctcatagtaccactccagtgagccgatcttcacgactctgcagggacaagcacaggctcatggcactgcctgagtgctgtacacaggcctgcataaatctcacacacacacacacacacacacacgagtgtgtgcatgtgtgcgtccacccttcttcagctagccccatggaagggacacgccagatccagaaactatcaaggtcattttacctcaaggcctgggctcacctggccagatggcaggggtcacagatccagccctgctcctccgggtggacgcggccacagcttttgcaggtgaagaggccacattccaggcactgccttttgctattcacaagcagctggtagggctgcaggcagcgggcgcagtgggtctcgttcagatgggcagtgtcggaaagcagctccctcttggagctttccttcttaatcttgcccttcaacgcccttgggaaaatatcagaaacaagaaatatattgggcatcttgtttttgcaacaggctttaagtgtgtacacgtacatacacacacacacagacacagacacatacacacacacagtaactgtctcctatgcagaaaacagtgacccaacgttgggcaaagccacacaggcatctttgttttgagggctgagctcaaacgggcaattttggtggctggaatggaatggaaacacgttaatttcatagaaatgatattgcatttaagcatttctgtggctgtttacaattgtaccaattttggttggcaggtcactgcgccctccccagggcagtcacagaatcctgggggcaaagccagatggtgtttcctgatcaagcattgttttggtctccttcagcaggggggcaagagttgagctaacgccccaggtttgctcctctagagcgcagctgaaatggctcggtgagtttccagagcaggaatcatctagcacccggaagtctacagttctcctagaccatccgagtttaaataacacagcttcctggtgaacctgccaagttgaactgattggaaagtgtatccttagatgataatgaacacatttcttttgttctagatttcagagaatgtctgccaaacgtaatattttcagtttcagatgagataaaattaatccattcttagtgacaaaaacaagaaggacactaggtgccattgtcttctgagaactctgaagcacactgatttggaggcggacacccagagtgcagcaaaggtgaagagagtggaggagtcccaccaggcagggggaggccacctccggtttcaagtgcaattggctgaacttcacgattttcctctctccactatttacaaaaatgttcactgagatggacacgaaatcaggctcttgtcatagcttcaaaaaccaagagaaaaagggtcaagcagttgtaggaatctagggggataccgccatccacagactacagtttagataaagctgcattgacaaggtaaagtctttgtcccaaacagaggagcacaagtccctggagccagatgggaagggcctcactccctccatttccacccttgccagctctgcaccaaccagaaaacctggaggccaccccttcgctggacagggcttgttagcctctgtcccagggagaacctcttcttctgtatccaggcagaacggtaccctgagggccagcacagcaggaagaaagacaaggacatgtgtactgccctgcattccaggctggaggagtcctcttaaataagagcccagaagtgtcctggggcagcagctggaggctgatatatttcagaggctgaaattaggggaaaggagaactgtactgtgctttagattctttaaaacataacttcccttcttcatagccagagaccaggaagggagggcagagaagactccatttggggagaccaaatgacatctgccagccactccaggacgtatcaacaagacccggagcttccgatcctgaggagtgaatggggccagagcactccatgcactctgctaattgggttgaccagaagtcactcctcaacaggcaagagcccggcacgtggctccaatttaaagttagcttcaggaataaaagac

SEQ ID NO: 1880752 - DNA, 4001 bp, Homo sapiens
ctcaacttctggatttaatgaaaacaggaaaacaggaagggagctggggatatgcgaggcaatacgatcatgaggaccagaagaggcttggccagggtggccatagggcagcatcagcattcccactaagtacactggaagctcacacaagcacaattgttttaaaatgtgtccttcctgactatgatgtaggatatgactggatctcccggccaagggaagttgggccaaaggccacacctagctcctgttctcctctcctttctgttgtcagctgagaaaagaactgcaacctaaatcctcctgaggccacagcttgcggctggccaccagtcctatgagatggtacaacaaaaccactggctggatgggactccagtgggccagcggggcccaggctggccccatcctggcctggccacaggagacaacatggttagagactgctggcatgccactgcaactaaaatccatctaccaagtaatcatcccagagcaagtcactttaatttaccaaagtggcaaactgcaattattgttcaaaatgacattcattcctgtatgacaacatttaatacactctaaaaaaagttccttaattgcatgcataatttaaaattactgtaatttgttcaagatcctgtgaaaaccgttttccccccttgaaagataaaagaaacagaaggataatgaaaagacttaagattctataaccacattatagaaataatttcggagatggtgtagatgtaggtgacactggagttttacaaaacaaagtaaaaatgattaactcttaaaatcgcacatacgttaaagagcaaagtttataatctcaggagggccatgctcattacactattatgcagtacctttaaatttactgtcttaaaaacttgtactcaacagatgtttcccatttacttatttccatattaaaataaattctatgcccagaaattcattaacatatgaaaacatattgccatttttattctcatctttcttatgattatagaattttattagttatggagaagccgagagatacactcttagctgaaatgaaagatgaaacaatgtgagtgattcggggggaagacctggctccctaaactgacccagggcttccacaggcagccgggtacatcagggcctgaagctgaaaggcctggacactgtctctgtggccttaacaggctgcttggcctctgtgtgcttcagattcccaggctacatgaaatcaggaagaaaaatctaccttaaaaagctgagtggaacatcatgacatgaaagccactgaccaagaagtgaagaagctcttggctccacagaaggccatgctgataccctttccataggcagaaatatggatacatgaaacctcgatgtttgtttttctgtgtacttatctctatgcatcacccatccatgcttaatttcccatgaactctgaagagatggtccagattagtaacgcaggacacttaaaaaatccgttttccctagaaatctctctgatctttgatttcttttgtaaattgcttccttatcacatctgctgtgaaacagtcaccacatgtgctcagagcagccctgaccacccacatcttcctgccaaagaaaagctaaacttctggaagaacgagtaatacagcacccaagcccgtgtgatcagggaagcacatctttagaagctcctctgcgtcctctcaccaccacccagggcagagggaaacagggctgttggaggaacggccagcagccggccagggctgggtctccggctctctgtgcagaaggttgctcaccttcacgttgggagtatagagattcctgagagaggccagggcggcggacagcccctcggtgctgtagccgatccacagggcttggagatggcttgaagaaattcccgtcttcttactgaggccctggaaacaatcgagacagatcttggaaacaatcagagacagatctgcctgagcatctccttcccacctgcagggtcactctgaaagtgggtctgccgcagagggtgcagatacctgcagaaggcacggggtcacacacaaagaatgcctggacatgcgagctttcactacctgaaaccaagggtcaaggaaccagcctgccttcactaggttaactttgtgccttgggagagagatggcagatgagagtttctctttgagtcagagtcttgctgtgtcgcccaggctggaagtgcagtggtgcaatctcaactcacttcaacctccacctcccaggctcaagtgattctcatccctcagcctctcaagtacctgggattacagatacatgccaccactcccagctaatttttgtatttttagtagagacaaggttttaccatgttggaagtaaattagaggaagaataaatgacagaattagaatatcaccatctgagccctgcaaggtggagcgtgcctatagtcccagttacttgggaggctgaggcgggaggatggcttgagtccagtaagctatgatcccaccactgctctccagcctgggcaaacacagtcagaaagtccaggtggtacaaaatcacacaggtcaagaaactcaggttctcgaacaaatcaataataaggaaacaaaaagtaatgaacaaagtggaacctttagataaaaagaaacttatcagagatttaaaggtggaaagaagtaaaacttaagcacagcactctgatatacacttgagcaatcaactatagcaaaatgcaaggaaatgcccaggctgagtcagaacagcggttacttttggagaggggaggcaggaggaggttgcatttgggctgaggtgcatggagcgtttcttggatggctgacagagctgtctaaaatctccaaagcaaaacctcaaaatgacaacaaagaaacccttccccaagttggtgtgcatctcaccttgaaaatgtgcgccttcaggatgtggtggccaagctccatggtctgctggcggttcaacttgccctcctgacgcgagaacatgaatgccaagagcgcgtgcccgttcctaggggaaggaatacaaaggctcacagcagaagagcccattccaccacaccgcagacccaccctcaattcaccacccattgccttagtcactgatttatgcccgtgacaaagatgtaaactccgggaggctaagggtctcatctgagtcataatgcctagcaaagtgctgagcacttggtgaacactcaaatgtgtttctggaatgcatgcatgaatagacacagagcacagaaccatccctgggcctagccttcaggtcccctcaggatcaccaccactaggggtagacaaaggacaaggtctcacgtgggaaggagagaaaagccaggccgtgctaggtgacagctcatgatcaagaaagcagagaattctaggcttggatggcacacaagtccttgtggtgagaagaaggctaaggcatctaagtgggtttgctgtggctggcacatggtggacatccagccaacagcacccatttcccttttgtgaaggtaccatcctgcctattttcctgcccatttcccttttgtgaaagggccatcctgcccatttgccctccatgtccataggactcactctgtcttcctgtggatcccatgcctttgagccaattagtttctaaatgacacacagagttgcttattccaataggagtgacttctatgcaatgtaaattactttcatttctatcatcctgtcaactttgagctgtttggttggggaaaagcaggtagttgtggagggaggaaaagataaacattatatatgttttaaaacgcatcctcctagtagttgctaatctagatgattaaaagcatgcattatttaaactgcatttgtctttccaggtgcatgcctgcttctcaaataggttataaaccgtgttagagatgaggaaatcaaggcagatggaggccaaggaatcagtttttatactacaggggagggcatgac

SEQ ID NO: 1880753 - DNA, 4001 bp, Homo sapiens
gtaatactttaatttgcaagactaaccaagctgaaccatcactgaaatgtatgtggacttaaatcaaaggaattgtgtaagaaataaacactattaagcctactgcaatatcattcctatcttactggataggaatatcagttaccctggatagctgaggccttcaaaatagcaaaattttgattttggccttttcttttttttaagctctttgtttttttcattttattcagagcatcctttttataatttgtcttttagtttatttactcgtatactcatttcttcagtgaattttgctgaacatagcaatgcatcagactttgggtatattgcttttggagatacaaagatgaaaaacaaattgcctttctttagatgttattattcctacaaaagaggaaatgaggcaacttatgattaattatatagttatcattcatgtttatacaaatgtgtatgtgtgtagtgaatgtagttacacaattttaaacttggtttattttttaaatttcataattcaaggggggatttacaagaattaacgttttaactcctcaaaatgcatcctatgaggcataaactattagtcatattctacagcagaaattaaggtgtagaaggattaagaaatgtcctcggcttactaaacaacaggtcttatatctaagtttcaaattcatgtctaaacaatctaagtttattaatttctcccacatcatactgcttcctgaaaagcagtatgttctattttactaccaagactgcctccatgtctaaaatattcaagatgtggcaccatcttcttatgtatatgaatgtgttataaaatatatatcaaatggctgatcttagagttggaaaataattttaagtctagcccaaaatgtcaaatctgagattcaaaaagattaaaataattgctcaagatcacacagtttttttgaaccagtccaacactgaaacaatgttatctaacactaattttagttttcttttcacttatttcttattctcacttagacacctatatttggcaatgtcatatattcatataaactttattatatactctgtgatcacatctacacattatcattaaagacaataaaatttagacaacacaatcaaccatctttattttcataatctttatttcccttaggtggaaaatcagtgatttcaatgtctttggcctgcagctcatgccatatcatgtgtgtttaataagtctttaataagtcttattcctgtttaaattcattggcaatgcaagggccttgttttacagacttatagaacataaatcagcttagatctttaaaagtgtctttaaaaaaactcaaatagatgtttccctttttttctattctgaatgtctaaaaatctatgagcacactaacttatgctcctagaaaaatggactagacagacatttcttgatccttatgtacaacttaaaactctagaaattatacataaaacaaacataaggtgactataaaagtagagagaaaaagcaacccagctgggtatcttgggaccaagaaattccatggaagtgtgtttcctaagtgtcattttgtctcatatatctcagactcaaatcgtataagctggcaacccagaaatggcaacatacacagaaaaaataaaaataataatctgctctctctagctaaaagaccaggaaagaaacaacctagcaagcacagcagaaaactttactatagccagccaccacaggaaaaaggctgtgacacacccacaccagcaaaggccaagtggggatcctgggcttccacacacccctgatggtaatgaagtgtccaccccttctctgctgaggtggtgtcagaagcagctcactggagggtcaggacttccaccatcatcctctaggtgacactgtagaggccatctaggtagcctgaactcccactcttcatccagtagcacagaggagtcccaatttcatctctggtgccaatgaatgctgaatgggggacctgctactccgatagggtagcacccctcactttcccctcctagaccgatgtcagggaaagacagttaaaaacagaagggttgaaaatacggagatacatgcagtagaacatgttcaagttcaaacaaaattactcatcataccgagaactaggaagatttcaaagagactgaaaaaatcacaactaatagatgccaacaccaagatgacaggggtgtaaaaattatctgaaaaagatttaaaagtagctataataaaatttttttaaaaataaaggctttaggaaagaaatggaaaatctcagtaaaaaaaatagaagaaagaaaccggaacaaaatggaaattttagaactgaacgtaaaataacttaaataaaaagttcagtgaataaactcaacagcagaatggaggaaatggaagatgtgtcagtaaactaaaaagtagaataatagaaaatagccagtcacaacaacaaagaaaaagcagaaagaaagaaaactgaacgaagctccagtgacctgtgagactatagtaaaagacctaacattcatgtcaaagagtcctacaaggagaggagaaagcgtggggctaaaaaggacttgaaaaatgtcaaggctgaaaaccaccaatctggcaagagacatatacctacagattcgagaagcagactaaagctcagagactataaacccaagacgcatcataatttaacttctgaaattgtgatttgtgacaacatgggtgaacttggagtacattatgctaaatgaaatgagccagacacagaaagacaaatacttcatgagctcacacgtggtatctaaaaagtcagactcttattagtagagagtagaatagtagctaccaaaggctggagtgaagatgggatggggaataagatgttggtcaaaggatacaaatttccagttagacacgagaaattaactttggagataaatagcacaaaaattagtaagtacatgggtgttatgattaacatgttaattagcctgaagaatcattccacaatacatacatatatcaaaacatcaccttgtactcctgagatatacacaattattatttgctgattaaaaataaaaataaacttctgaaaactagagacaagaagcaaatcttaatagcagcgagggggaaatgacatgttacatagaagaaaacaattttaataataatagatatctcatcagaaatcacagagaacagaaagaagtggcccaatatttctcaaatatgaaatgaaaactgtcaacccagtgacctatgccaagtgaaaatatcagaaataaagagaacatcaaaacagtctcagatgaaaggaaattaagataatatgccacaacagatggcaaagaatggacaaaaggaattttcgaaagcaatagggaagtaagcaattaaagaagaagcctgtgaacatcaagaaaaaagaaagaacactgtgagcaaaaatacgggtacataaaagtaggctttccttatactgagttttctaagttgtttgatggttgaagcaaaaaaaatctaacactgttgtgtgcagagtaaatcttgaagataattatattacaaacaggggaggctaaagaaacataaagggatgtaaagtttctatgcttcgctttactgggtaaatggtgatgcttgtagactgataagtaatgaatatatactgcagtacctaaagcaactgctaaaaaagttagacagagaatatacctgacgacactatagatatatgaaagacattttgtagatgtggatagattattctaaaacttatgcaaaatggcaaagaaaataaaataactaaaataactttgaaaatcaaggctgtgtgttattgacagagtggcaaactcattaaataaatggaaaagaacagggaaccccaatatagacacctacaattatgcccaaatgatttttgaaaaaagtatacaagcaattagagaaaagatggacatccagc

SEQ ID NO: 1880754 - DNA, 4001 bp, Homo sapiens
gtagatcattaccataccagtcatttttcaaagatcctcgttagcacaggactagtgaacacaataaacgatgtgacaggagatggctagagaaatgctgcagagaatgagctcatgtaagtcagccagctcatagaggaaaccccctatctttctactggcaccataataaaatccaccatgcacactgggctatttccactgcagtgcataagacaagagaaatgggtcactattgtgctcctgctggtttcctctccaccaatgcagcttgttccctcacatagtaaggtgatgtccacaatgcctggctagaacagaaaagatctgacaacaccgatgtccacacctgaagtgcctgaaaatagcaccttcctatgaacatttaagttggcaatccatccatttgggaggtacatgtgtactgtgaacctacccagaaccaggcactttgctaaggcattgagattcaaggtcaagggaggcacagtccccatggaccttgcagccggggacacagctaatggacaggagacattcatagtccaactcacttgctttatttcagtgactttattttccattttgttattaccttctttttcaagtctcctgttggaatttggattatgttactttattttttcctttaaaatgctttttgaatgatcaaaggcccattttaatccctctattgtctgcagctccttagaggtgaattctccttttacagagtctgtttgccctcaaggtgatgagtctccacaggtgctgggggcacaccttccttaggaatcattctcccatggagtctcagaaatgccttgagctctgcaggcatcttcactggagcaatgatttttatgctgggcttgagacttttgggttgcaagctgttccacatcagcttttaccttaaattcttgctcagattttccaaacagcaaagacagtgtgaatggaggccccttacaccagccacagttggcgttctgactcctctgtgtgactcctatcccacaccaggcccagtcccagcattagcttttgtgatgcattccttggtacagaaggctaagcatcgctaatttctattcagagacacagggactctacccttgttcctggctttataaagctgctcagttctaatgtgcactgcacacaacagctgccagggccacaaacacccccaagcagacgttaggctctcaacccctaagatacagttttcctctcaatagctcataagactctgccctctgacgtgagaaaatagaattctgttgtgctttttaagtatgcctatggcatcttttaaaatataccatatatgatccagtatttctttgtgtttggagtgtgaatctgcaggtgaaagagtgtgttctacacgtgcccgatccatcctcattacacaaattcaccctctactttaaaacagggaatttgggcctttgacaggaaagaagccggacagtcatggggccaaactggaatcaaatgtaaatatttaatttcctcctgttaaaagcagagtggacccacagtccctcccaaagtaaaatgcacaataatgtgtcaagagccctggacttattgcttctcggacgttagcaaagatcaagcgcagaccactggctttggggtctgataccccaggagagtcccggtttcgtgctcatgtgttatgtgacccttgacccctcgttcaattctcacgtgcttcactctcctaagccatgcaaaagggacataaggatatctcctgaaagcagagtcggctggaaggctggaaggcttatgtgaagcagttgcatatcacttagcacttagaatgggcaaataaaaaatggtttagcttctcctttgtgggaacagagactgggatggtttgtatcctggctctcctgaaactgcgctgccgagctgggcccaatctctagttcagctcgcttcagaaagccaaaggcagaaggctgcaggaccagagattgagcctggccacacagccccttcttcctgatgccacatggctggtgatcctggtcacagcctgcctgagctggtggaacacagctttgtcggactgttgaagataaccctacagaaaaatcacctggtgaagggcaaatgcgcatgttttgtcataagaccaactgggtttcctaaatcagccaagccgtttatcctgtggtcttggcaacaggctgaccttccttttacagaggagatggtgatgcctggtcccagaggagcgctgtgagcacccaggcatggattacagtgcttagcacaaagtaacattaaatgtgaatctctcttctaaaactatgttacaaaaagcagtaattcattccaagcaagactgtcagtttaggtgaatcaagtaatcataatttctctaaaaccttttttctactgtaaaagctttaatttttgtctttatttttattgatacatcttagatgtgcatattttgggagtacatatgataattcaacacattcatataatcaaatcagcataattgggatatttgtcaccttaaatattgatcttttcttgatgctatgagcattaggttaatgggtacaaatgtacagttagataaaaagaataagacctggtcttcaatacatcatggtggctatagttaacattaaccattgtacatttcaaaatgctagaagagaataattccaacacgttttttgtttgcttacttttttctgaattctaatagactgatacatcagtccctgctgtagcgaaaataatgacttcctcaaaatgcacttcaagaatgtgacctcaatggatgtaacagaaagaacctgctcttggtgtttgggaaagaaaaggtgttaggcccgccacaattccttctcctcccaggtgattcagagtcctggaggacagaataccttgggaacttgagtgaactcctttcaccagcccagccttgactcagattccagctcatatagctcacaagctccactgcccaggccaaacccctcaaatgcttaggttttgtttgtttatttgaaagagttttgctcttgttgcccaggctggagtgcaatggcgcaatcttggctcactgcaacctccgcctcctgggttcaagcgattctcctgcattagcctcccgggtagctgagattacaagtacccaccaccacgcccggctaattttttgtgtgtttttagtagagacggggtctcaccatggtggccaggctggtctcaaactcctgacctcaggtgatccgcctgcctcggcctcccaaagtgttgggattacaggcgtgagccaccacgctcggtctaatggtcaggtttttattcctgtatatgtcaagtaaggacaataagaattacttcaaagtgttgttaggagctaatgcatgtaaagcatttataagaatttttggcacccagcagatgctcagaaacttttagctcataatattagcattgctataaaaataacattaataaaaaccaacaacattactaccgtgagaaagtcataataatatacatcaaaggatattaataatatacaatgactttcccatatgccatttgtatggccagaaagccagacacaactcctgacttcctcctgcgattcagacgacattgcttggatgcaaacttacctgaaagaaccacttaataggtttgtcactctaagcaaatactagtgttcaagaaatgttctcaggtgatctaaaacacagtccagaatacctgcttatggcttttcaaatgtttgcaatacaaggcctgcctctgtgctcagctcccagagagaatttttctaatagatgcagtttttcctattagcaatggaacatacacatttgaaacccagctggcagcctctatgattgtaggctaaatctcgtaaacaaaacttaaatgtaaagaagtgtttgtactagctgcaaatgggctactggtttgatgccacaggggaagttgttagc

SEQ ID NO: 1880755 - DNA, 4001 bp, Homo sapiens
tacaatttctaagaaacgaataggcttctactgacattagtgagtggcataagcctgaatgaaatagactatgactcttgactggctgaatatacaataaaagcataaaacacaaaatgcttttccaacatagatgctagaaatgagagtaaagctaaaattccccagccatacaccccatgtgggctccagcactctacgtttagctgcccagatatcagcacacatggctgtgatggagccaggaggtgggtgcttcagtcttgacttccccactttctatcttgtgtcccaccatctaacttgttttgggcaagtcagtttttttgagcctacctttcctcctctatggtgtgtgggtagtaacaccagtcagacttaacctgaaagttgtgtgaatgaaaagcataatctgtatgtcaaccctgaagatatacgtatgtcagaaattactataaagagatcatcagctgggcacggtggctcacacctgtaatcctagcactttgggaggccgaggcgggcagatcacctgaggtcaggagttcgagaccagcctggccaacaagatgaaaccctgtctctactaaaaatacaaaaattagctgggcgtggtggcggacacctgtaatcccagctactcgggaggctgaggtaggagaattgcttgaacccaggaggcggaggttgtggtgagccgagatggcagcattgcactccagcctggggaacaagagcaagacttcatctggaaaaaaaaaaaaaaagaaaaaaaaagagatcatcattaatttcctttcatctcatgatgtagaaacatttagatgttgggatccttccacatacttatctaagaaaatctctggctttttttttttttttttttttttttgagatggagtctcgctcttgatgcccaggctggcgtgcagtggcaccatctgggctcattgcaacctctgcctcccgggtttgagaaattctcctgcctcagtctcctgagtatctgggattacaggcacccgccaccacgcctggctaattttttaaatatttttagtagagacagggtttcaccatgttgaccaagctagcctcaaactcctgacctcaggtgatctacccaccttggcttcacaaagtgctgggattacaggcatgggccacttttctatttgtttatttttgtgttggtttttctatttttggtgtttctggatcatggactttgaaaaacttcctggcttagcaaattagtgtccttgtttcagtagcttctgcttgaagatttctgctgtaggcaatgagccaactggccagaaaatatccagttatgctctgcaggttcatggtggatggggactttcactgttgtttagagaaaccattgagtggataacgttccaaacagcaaaatcaaatggggattctgtacactcgggagtgtcggctctggacaaattaggttgcacttgattgtaagaagccaggctttattaaaatagaatataaatattaacagaaacggactgcttctaatccccactaccgttggccagggaggcctctcttcaggttttctgaatggaactaaataaggagcccatgttaccgcggaaagggcactgtgattaggagcctttcatgagcttccatgaacgtctagggcttggaaacttcattttcaaaataaggctgttggattagatgattttcccaacccctaaccctctgtgttaatgaatggactgactctataatcatgttccttggacatttctatggaaacactgagccatcataagggaggccttcattctgatgtaacaaagccagctgtgtccacatgagaacattggcaagagtggggacatggaagctgtgttcaggccggtccacgctgggtgacccatgtgacctgctgcttagcaattccttgtcaccatcttcccttctcagcctcttttttcatgctaacaggcataaatgaaatgataaaagtttgagctcttctcgtggaattctcgtgatacagatatgtgctacatgttcatcatctcgttggtcttcaccatgataactgtggagtaagaattataagcaggtcacagattagggacttgagattgacagtttggcttccctgttctgggtggcaaagcctgtggagtactcacctacctgctgcatgaaggcagcatggagggactgtggtggattatctgcaaagatggccaaaattctctcatccctgcaggcacatacaaggtaagaacacctttaccagtggaatgtgatgaaaatgctgcccagacaattctagacagggccttaagaggtctagatgcttccacatttgctttcttgggagctctgagttatcatgtgagaaccaccagtctccccaacctgcaccctaagctcattatccacaaggctgtgcaaaataataaatcactgttgttaggacgcaaagtttggtagtggtttgttatgtagtcgtggataactgcagcagggatctcagcaacttttcttctctgaactaatgtttaaagtcaggatgtaacatattgtctccatgtgactttgttgaactaaataaagaatgctaataccagatgcggaccctgcctcttctgttctctaagactaggcattgctctctgatcagaagagtcaatcctggtgagtttaacttgagcctcagaatcctactcaacacaaagttccagagagaagcgattatcaatgccaataccttagagatggtactggctgtggaatctgtcatcccttgactaggtggtctctaagttcctttccaattttaatgttttctgttctgatttatcttttggcattgtgcaggtgtcaggagaaaaaaataatgccaatgtgtctctttaattcctttatcattaagtcataacctttcccaactcccaatccagttttcttacgtcaatactttggtttttgctttgtgaagatgccagaatcagtcaaaactaagctcactgtccttgctaatattctgccccagagaagaactgaagctcagctcttcaccctacagaaagcctgaattttgtaaatgttctgcttagaatgaggaagaaagatgaagaatgaggaggaagaaggaaggaacgagagagaggtaaagccaacaagcagaacagacctacatttgcagcatctccaagtttctgcaacagcattatgttgttgttatgttttgttttaataaaagcacataccattttttttgttactcttatattcttttcataacagctcagctaaagacagataatgctggagtcagctttttctaagaattagtctcttcaaactggccatagagatttggtagaagtcatgggttttaattgaatttctcctaatggtctcccagggatggaaatatgactgatacaggcttactttccctctcccctcggtgaagctgtattgcctcccacagaacagaccgttctttatgttctaaccgggcttttcataactccactggagagctgtacaaaccctagacttggcaacggcttttttgttttctgaagccagaccaattctggacccagttcctgctttctaggaagaaatagcacatgcaaccagcctcttcactgatgaaaaaatacctcactcctttttagacagcttctcgtattgataattttatagaaatgtactgtataagtgaaagtcagcatttccattacacaacagcctgctagagctgcttccaaggggcagagactcctgtcggctgtttgtccgaggtgatcttcctcccttaatctgtcagtctagaccttaacaatgttcctcaaataccggctcaagtccttccttctcccaataacttttctatggtctctggacctccttagtcttcagtgccgctcctcctaagtttctgcaccacctgccttcaacacctagtctgtgctgtaagcatgagttttcttgtg

SEQ ID NO: 1880756 - DNA, 4001 bp, Homo sapiens
aacattgttaaggtctagactgacagattaagggaggaagatcacctcggacaaacagccgacaggagtctctgccccttggaagcagctctagcaggctgttgtgtaatggaaatgctgactttcacttatacagtacatttctataaaattatcaatacgagaagctgtctaaaaaggagtgaggtattttttcatcagtgaagaggctggttgcatgtgctatttcttcctagaaagcaggaactgggtccagaattggtctggcttcagaaaacaaaaaagccgttgccaagtctagggtttgtacagctctccagtggagttatgaaaagcccggttagaacataaagaacggtctgttctgtgggaggcaatacagcttcaccgaggggagagggaaagtaagcctgtatcagtcatatttccatccctgggagaccattaggagaaattcaattaaaacccatgacttctaccaaatctctatggccagtttgaagagactaattcttagaaaaagctgactccagcattatctgtctttagctgagctgttatgaaaagaatataagagtaacaaaaaaaatggtatgtgcttttattaaaacaaaacataacaacaacataatgctgttgcagaaacttggagatgctgcaaatgtaggtctgttctgcttgttggctttacctctctctcgttccttccttcttcctcctcattcttcatctttcttcctcattctaagcagaacatttacaaaattcaggctttctgtagggtgaagagctgagcttcagttcttctctggggcagaatattagcaaggacagtgagcttagttttgactgattctggcatcttcacaaagcaaaaaccaaagtattgacgtaagaaaactggattgggagttgggaaaggttatgacttaatgataaaggaattaaagagacacattggcattatttttttctcctgacacctgcacaatgccaaaagataaatcagaacagaaaacattaaaattggaaaggaacttagagaccacctagtcaagggatgacagattccacagccagtaccatctctaaggtattggcattgataatcgcttctctctggaactttgtgttgagtaggattctgaggctcaagttaaactcaccaggattgactcttctgatcagagagcaatgcctagtcttagagaacagaagaggcagggtccgcatctggtattagcattctttatttagttcaacaaagtcacatggagacaatatgttacatcctgactttaaacattagttcagagaagaaaagttgctgagatccctgctgcagttatccacgactacataacaaaccactaccaaactttgcgtcctaacaacagtgatttattattttgcacagccttgtggataatgagcttagggtgcaggttggggagactggtggttctcacatgataactcagagctcccaagaaagcaaatgtggaagcatctagacctcttaaggccctgtctagaattgtctgggcagcattttcatcacattccactggtaaaggtgttcttaccttgtatgtgcctgcagggatgagagaattttggccatctttgcagataatccaccacagtccctccatgctgccttcatgcagcaggtaggtgagtactccacaggctttgccacccagaacagggaagccaaactgtcaatctcaagtccctaatctgtgacctgcttataattcttactccacagttatcatggtgaagaccaacgagatgatgaacatgtagcacatatctgtatcacgagaattccacgagaagagctcaaacttttatcatttcatttatgcctgttagcatgaaaaaagaggctgagaagggaagatggtgacaaggaattgctaagcagcaggtcacatgggtcacccagcgtggaccggcctgaacacagcttccatgtccccactcttgccaatgttctcatgtggacacagctggctttgttacatcagaatgaaggcctcccttatgatggctcagtgtttccatagaaatgtccaaggaacatgattatagagtcagtccattcattaacacagagggttaggggttgggaaaatcatctaatccaacagccttattttgaaaatgaagtttccaagccctagacgttcatggaagctcatgaaaggctcctaatcacagtgccctttccgcggtaacatgggctccttatttagttccattcagaaaacctgaagagaggcctccctggccaacggtagtggggattagaagcagtccgtttctgttaatatttatattctattttaataaagcctggcttcttacaatcaagtgcaacctaatttgtccagagccgacactcccgagtgtacagaatccccatttgattttgctgtttggaacgttatccactcaatggtttctctaaacaacagtgaaagtccccatccaccatgaacctgcagagcataactggatattttctggccagttggctcattgcctacagcagaaatcttcaagcagaagctactgaaacaaggacactaatttgctaagccaggaagtttttcaaagtccatgatccagaaacaccaaaaatagaaaaaccaacacaaaaataaacaaatagaaaagtggcccatgcctgtaatcccagcactttgtgaagccaaggtgggtagatcacctgaggtcaggagtttgaggctagcttggtcaacatggtgaaaccctgtctctactaaaaatatttaaaaaattagccaggcgtggtggcgggtgcctgtaatcccagatactcaggagactgaggcaggagaatttctcaaacccgggaggcagaggttgcaatgagcccagatggtgccactgcacgccagcctgggcatcaagagcgagactccatctcaaaaaaaaaaaaaaaaaaaaaaaaagccagagattttcttagataagtatgtggaaggatcccaacatctaaatgtttctacatcatgagatgaaaggaaattaatgatgatctctttttttttctttttttttttttttccagatgaagtcttgctcttgttccccaggctggagtgcaatgctgccatctcggctcaccacaacctccgcctcctgggttcaagcaattctcctacctcagcctcccgagtagctgggattacaggtgtccgccaccacgcccagctaatttttgtatttttagtagagacagggtttcatcttgttggccaggctggtctcgaactcctgacctcaggtgatctgcccgcctcggcctcccaaagtgctaggattacaggtgtgagccaccgtgcccagctgatgatctctttatagtaatttctgacatacgtatatcttcagggttgacatacagattatgcttttcattcacacaactttcaggttaagtctgactggtgttactacccacacaccatagaggaggaaaggtaggctcaaaaaaactgacttgcccaaaacaagttagatggtgggacacaagatagaaagtggggaagtcaagactgaagcacccacctcctggctccatcacagccatgtgtgctgatatctgggcagctaaacgtagagtgctggagcccacatggggtgtatggctggggaattttagctttactctcatttctagcatctatgttggaaaagcattttgtgttttatgcttttattgtatattcagccagtcaagagtcatagtctatttcattcaggcttatgccactcactaatgtcagtagaagcctattcgtttcttagaaattgtagtggaagatgtagaaagtacacttgtcaaatttgggcatgattcatctgtgagaggaaccttgtgcatgcaaactcagtaacagcgttcacaaaaatctggacaggcttgaaagacaggctgaaaataacattgcagcaggaggaaa

SEQ ID NO: 1880757 - DNA, 4001 bp, Homo sapiens
taaggtcattgcaagcaaatctttttaaaaaatatacatactgtatatatttacattcaagtttgaataatatttgtcaagatatagttcagattctactctttacccattctgtggatttgttcatctagtaactaaacagcgattgtatcatcactcaggcacatagagaggtagaaaccgcttttttaaagaaaaaaaaactggagtgcaaatgtgaagatcactgaagcagcttagctacatcaaggagaccctaactagctttggtcatctcaaaaagctgaatatatgtagccttgtcctttaaattaaaaccagaaaaactttgggcaggtgctcttctgagcacatcagagtgctgacagaactcagcaactaatggtctgccactctgcaacgcgaattgcacatgactaagtgaggcaaagatagcagcggagctgggctggcagctgggcaccttttccctgataagacacaaatcataaccaaacaagtggcttacaagacagtcaattaatatctggacatatagtctggaactcggaagccaactaaagtacttcatttcccaagtgaaatccctattcatttttgttctcccacctccatcccaaactgagctcctaagtctagatagggatgggggtcgcctgggacttctgcaggccacagtttttcggccccaagtaccggcctcacgaaggctcttgggactgagaagggctgccggggttcttgataaacttagtgggggttgttccagagaggggaagttggaggggagccacaggaatggccgtggccagaagcccttctcgttcccttttcttctgtttcatcctgcggttctggaaccagattttgacttgcgtgtcattcaggtgcaagcagttggctatctcgatgcgccgggctcgagttaagtacttattgaaatgaaactctttttccagttctgtcagttgcttggtgctgaaattcgtgcggatcgcgctggaggggctagcggccccatactcggcgagtttgcctgcaacgtaaagacagggcgtcagccaggcctgaggccggggacagaatgtgggtgagcagtggagctagttagaatcaaagtcccagcgcagccctcctgggtccctaggaacagaatttgtaccaggagaagttccacggagagctccttcctgaaattttctcaatgcctggcacattttccgaatctgtactcgaggcagactccatggaattcgcccgggaacgcgtctcctccacaaaacccaaaccgctgtctggaaaggcagcgacaccacgctcccagcgcatttccgcgggggaggctccgtccccaaccccaggtggccccatccaaggcccgcggacttacctttcttagaggcattcctcttcactttcatccactcgaacgtgctgaaggcggcagggaggccggaggcgggagagacggacttggggtaggtgcctggggccggggatgcggtctggaaagcaccagggtggccgtcggctgacgctttgagacaagccggaaaagggccgggttcgccgaaggccgcgtaatccacctggccgctgaggaggaaagagccgccgcccgagaagacggccgaggtggcgtagtggacgtgagacccgccgtcgtcggccgcccgccccagcacgcccgggaagtcgtacgccggcccggaccccaggaagccgtagtccgcgcccccagctgccgcggcaggtgcggcaccaggttcgtaggccccctccagggtgcactgcgcgtactggggcgcggccggaggcggtacggacggccgcgcgggggcggccgggggcgaaggcgagggtcgggcggcggccaggggcagacagctgacgaaggcgccgtcgccgttgcccagagggaaggcgggctgcagagccacgggccgggcgtcggagcggcagaacttgggtgccaagctgagcacgtcgccgccgaccccgccgctgctgctgcatgacacgtactccaggtaggagctcatggttcgggccccacctttctgagggcgcaggccggggccggagtacggagccgggcagaggctgagcaggactgccgccgtctgcgccgctccgccagccctctctacccgagctgccctctccaacccatggcgagtgagccggaggtaaatagtggcctaatataccggcgggggcggccacgtggcgctggccggccaatgggcggcctctccgctcggcccggtcggcgcgccgctcctcgcgcctgccccgcagccaagttagccaaagcagcccagggccgccgcccagcgcccccgagccccgaggagagccgtcgcgaccgggggctgcctgggcaagggcggggcgagagggcagaacgcctgctctcggacaggtattgggcgaggtggggggagaaaggcaggactggacgcttgggtgagggcccgtggatgcagcggggcgagccgcttctgctctggatcgtggggggggctagtccctcgagggcggagtgtgggcgtcgcggcatggaaaaggttaaatgggagcgtgacgcgcggccggtggagactgctcttcgcccacctccaggacagataaagttattcctcttcccctcttctgagtcctctgcgctttcggtttgcttggcgctgatgttatccctcttctaaacctagagcagatgtttggttttttcctttcttccccctttcctaggactcatggaactacatcttatgctgtgagtgctgtgtgcctagggcgggacaaaattttcactttttgactaggcttccttttaacgtgactttgcagctttcttctatccctcgcaatttgtggcggcgtgatgagggccagtgttgtagtgccagattttgataaagtttctgccttgtggggtggtttagcagattttcccctccggctgggttgttggaataaagaatccagagtggtggtggaacactccttatgctcctttctgggagactggcacaggcaccggtgcggcgcttgctttcactgaggagcttgtctggagggcgcaagggcttaccggggacgggtgagatctcagaggtttagatggacttgtacctcgaagcaattagagcttctgctccatcagataagtgctgcatcgtctcttgtgagtgaaatctgagggctcacaatgttaatgggctcacgtctttcccttgataatatggttttgtttactgagtgtagagagacgggaaataaaagtgcaattgccacaggaaatgaagagtagaaaggttacaaagaccagctttacattgacaaactttccaacttcctttagtatttcttttaatgttcccttttgaggggactgtaggaaaattacaaattagataaatagaggttatttacacacagtagttatgaaagagggtggtttcctaaaaccctgtgtgaataaagactctaaagagtctactcagagcttatatcaagtgcccttgaaaagttaatctattacagcctctaagttatggtaaccgaggttttatcattgttttactgattgacttgtcataaaagagcgattgagctgttgttgcctaaatttccactctgaggaagtctttagaataggcgccatcacagcccagggagccagttccttccagggttgtggacttgtgaataaacaaagccctaccaaaatgtggactactgatggacccgaagttgctgcaggatgggggagggatgtccccaggttgaggggagccagtagagggtggatgcctaggaatcagcacaaagttaaagaggtctgtggttcctgcactgctggagttcttgagtttgattggaaatggaatacctgtgctgaaaatagcccttcaatcttgattttgctatttcagttgtgctatagccagtcagataaggtcctaaataatttttatttatttatttatttaatt

SEQ ID NO: 1880758 - DNA, 4001 bp, Homo sapiens
tccataaagttggggatactttggggctgtccttaagattaaatgagacattgcatataaagtgtttatgcgcatacggcacattcgaagtgcttaataaatgggaactattatttgtaaaatcttcaaactcacgttaaccgatatgtcctattttattcaaaaattgttataatgtaacacacacaaaataagttcacttgagtctcaagtaccaaattatatggttggtcttgcctcaccttttgcctctagttttctatacccaagttcctttccttcccctattattcatgaacatgttttttgccctagtgtttctcaatggttcctgcccatccccccagttgaaatagcatgggggtcaggggagagcatggagaaggggagaccttgtaacaaactagcaaggggtttctacctttcctctatctccaagattctattaatagtatattctcctaaaggtcctattagtttacatagctcaagtggggagacaatgatagctaatatttagtattcacctaatagtgtcagatactatgctaggtgagttaccaaagatattttgactcttcataacaactagacaacgcggatcccactatttctgtttctgagatgggtagatacaagttctgacccagtaattcgctcaaagtcgtgcagctagttagctggcagcgtccttgcacatctaattgcagatgcatctgcatctacattagagtaaatgttccaattatactcatacaatgaatgctatgaatctggccaacagaattccagacactaacaagtaaataaatcaggctttcctcaatcccagtaattcatgtttaatattccttggcaaatactgaatttcaatctgtgcttatttcatagagtagaatctttcaaatgttgtgttatcgagtcctacatagtcaaagggaggggaaagacaaggagggtgattaaggtgaagcgtttcttccattactggtagaacgaagtttctcatctcttaagcaccgaattctgcaatcattccaaaagtggaagctcagctcacagcgcattttggggaagcttaaaccacactaaccatttaaggtcaagcaaacaattggccaaccctaacgtgaattgtgcagggttttcatctcagatgtaacagatctctctatgtctacatcccaactccagaaaacgagaaatcgagttcctcctctcaccatcgaagctctgcagacacctcgctggagaccccatggtgagcctcatcacgtaaaggccccctcgcaagctgccggctccagcttgcgccccacgtctacctaggctccctctagcctctttaacgcacagtcgagcaacaggccccttgcaatcaactctagccgccggactcccgaccaggtctctcgctcggggtcagaaggaggcgcgggagggagggcggcggcggcggcgcccgcggggcggggcggggactgtgcgcaagcggggggcgggcgcaggccgcggtctcgctccgctcccctttgttctctcccattgtgtggcacttcctcctcaggcgcttcttctctgcaccctggcagcccgtggggagttcgggaaggggccctggatgccttttctgcttgtttttgagtacgtgaggacctccccggcaccgcctcgcgcgggtccctgccccgtgcccaggcggaggcggggtggccactgtccttccttcccgctccgcgccctcggcggcttccccgcggccccctgcgccgcgccccctccaggaggcgtcctgaccccgcactccggcctttcacctcccgaccgtcagcctcagggccgccgcggcgacgcgcgaccccttccctctgaggggcgcgggctccggacgcgccgggctctgccaggcatctagtggagggtcggaggtcggcgaccagcccgagcccagccgtcccgggagctggcgcgagtgtcgccacgaccctccctgtcccttgcgctcgcgctgcccggccgccgggcggccgcctcagcccccttatatagccctctaaaaatagctcgcctcgcaccgccttgtaaggcagcagggagatccgcagcgtgccaatccgcgcccgccgccagggccaagccccgccccaggctctgctccgggctccccattggtcctcagtgacttcatgagccccctgtttaccttacatggtcacacgcggcctaatggacgccctcctcgagatcccacggctgcgcggagaaccgaacggagggagggagtttggggagggggaagagcaggaggaggagaaaagggagggggaagactacaaactagcaaggatggggtggggggtggggagggaagggaaggggggggaagagaagcgatcgcgagagaaaaaaatgcaacctcccaaaataaagagcaaagattgcattaggagcgaacagcgctgcagaaatagatggcagcttcgtgtcagtgagtttgcatcccccttcctgatccacgagctggagtgattagagccctggaagggaattgttactcccgtggagaagtccccttttcctggcagtcgtctgcactgtacacgctggatgcctctctccatccaccccactcactcgctcctctctcacctcctctctccctctcctgcattgatttttttttttcctttttagttgactgaaacaaaacaaaacaaaagggccactggatgtctgccttcttggggggtgagccagacagactgacaaacaaacagccccaactgtgttcgggggagggtttcgcctcccgttttgcccggcagcagcagcatggacgtgttggctagttatagtatattccaggagctacaacttgtccacgacaccggctacttctcagctttaccatccctggaggagacctggcagcaggtgaatgatttaaattacttgtgtaaatcgtgtggtggcggcggagacgcaggggctgcgttggtgtgggctctgggttgaaatttttgtttgtttgtttgacttttttttcttcctttttggctgtctgttgttgaaaatgttttctgaaacagtcatctgcgcttacctctccacccacccctaacctcgtagagtgccgagctgagcagccggtgcgagctgcctgcgtttcagtcgccaacacacatccctgcgcacacgttgtcgggtttgctgtcccctatcagagacctgccgaacttctggggttcggaggagccgggtgggaaggtggtttggggtgttaggagcgattgctgacagggaccacgttctcgcatgcatgagctctacccacttgatacctgaaatcaggttcatctgtttcaactggtgcttatgaccatcggatggggggcgggggagggtgggcaggagcaaagcggagtgtttttcagtaattagcgagtgtcaataaagaataggagcttgattttgagattagaaggtaggcaaaagagagaagagcccactgacaaaagatactcaaggaggacgggaagatgtagctgaggctgacaatgaattgtaggttttcccagtgtgatccctccagaaagagaacaccctctatgcgtgtccttgtttctcttttttgtttagggtccttctctagttaggcagcacaacctcggacaaaggctgatgtgtgcttccatgcctttgactttgtcttagaggactagttaagaaactcccaggatgctgaagggcaccgatgccaagttggctagccgtcccagggaggatgaagtggggctggtgacaagttcactgggctttgtgaagtggaataaagaaagtgctggtcagtggaaagtgctggctctgctgcggaaacagtggtttttttcagcagcgattaggagctgctgaggggacattctgcaggaaagatggtgggtgggggcggggggacacgggtatttaaaaattgtacagtgtgcaccatggaaagtccaaga

SEQ ID NO: 1880759 - DNA, 4001 bp, Homo sapiens
tctaggccaatgaatgaatgaaaagctggctaagacaatggcagtgtttattgtgaaaaagaggtagattttacagatactcaggatatagaggcacagtgaatagaacttggagaccaatcatatggggcaaggctttagaaactcaccctttctgaaaaatcaatgcagcatagctcagaaattgagtatgggctctggagcaaactacctgggctcaaatccaggctcctacacttacttgctgtgagacttctgacaggttatacaactcctctcctccgatttcagtctctaccggataagcatagggaataagaaaaccatcaaattcaaagaactgttttttgggactaaataagatagacgtaagccatttagaacactatcttgtatatcagaagaactcaatgacactggtgtcatttttttttgtacaaactgaaaataactttggaaatatataataaactaaattgttgtgctttgtataacacacttatacacacatttgtataacacacattgatgcgctttaagcatcaatgacactagcatgtaatcattctttgcttctgatgaaatcatttttttcttcccttgttgacaaggaaagacacaatttaatcaagaagaccaacttaactttatggggcagaaatataaagtatgataatgctgagacaccaatggccataccagagtatctgattaaataagtacaatagttagatggcgggtcttacatgcattcattctttcatgcatttggccaactcctatttccaagatagttatttttaaatttcactgtaaaagtagactgtaacaagagatttacatatgatccattaaatagttttgtcagtgtcacttaaaatccagtcaacttaggtaacaatagtaaaccctggaatggggtcagtctgtccaaacagaaatgataatcataacagcaacgatttctagtaatggtatagccagcaattttctacagggaaccagaacacacagtgcaggcagggatgtatcagactcctcaattccacactatcccatccccagatgccgaccttatggtagactctgcataaatatttaatgaataaatgaattatagggctgctttatttatttatttgtttatttattttgagacggagtctcgcactgtcgcccaggctggagtgcagtggcgcgatctcggctcactgcaagctccgcctcccgggttcatgccattctggtgcctcagcctcctgagtagctgggactataggcacccaccaccacgcctggctaattttttgtatttttagtagagactgagtttcactgtgttagccaggatggtctcgaaatcctgacctcgtgatccgcccgcctcggcctcccgaagtgctgggattacaggcgtgagccaccgcggccagcctgcttttttatgttgaagtaagtaagtacagtttcaaccaggaaaattagacactgatttaatgactatctcaaacaatatgacacagttctagactaaataataggagtagacaggcttgctttaggaatggtggtacaggctattttgaacaggcctgcgaaaaggccaagattttaagagttgtaagtgacaagttctgaaaagaatttcttaacccactaaattgggaataaattttagtgtcttctctagaagtgtcagtcttttcagctttatctatgcactggttataaatattaaggacaaaaatacgtggtttagcaaagagttctggctttggtgtttataagcccagcctggtcagcgggagaagaatgcctggctgtaatgtccaagatcatgagggcatttttaatgggaaagggtatgacagctgcctctgagggatccctttatgtcagctcattagaaatcatttcccaatccaggacataagtgtcttccaaacctcccccttatcaaagggctcagccgttgacaccagtgtccttcttagagccatcactaggcagcccactgcctgtattctctctgcagctttctttctagttctgccagagcccctgtcatccacagactttccaagagtaagataaaaacctttatcttcaaaattattaaggcatttttcccccatgcagcaagttggtgtctctatttaatgagcccctaattcttgccatacattttgctaagcaaatgtatgattttgctaatatgtatgatttgatattttgcatttcttatctcctttaattcccacaaaatctgtgcatagtgtgtagacattattatcctcattttattaatgaagacgtgaggattggagaagttaaatagcttgccctggatcacagagcttgccaatgacatcgttggggttcaaatccagaccaatctgacctcatagccctcctcacacagttgtacttaacattcttcatggtggggcccagacaggtgtatcttggttaaagtgtcccagggttttcttctgtatcttctgctctttgttcaactcgcagtcctgaactcctccatgaacagtaaatgtttgagagcaaggtatttgtttgggccataggagtcactttcctttctctagctgcccagaaaggacaaaagatccttgactgttcaaaatccttgactgttcaaaaataaagacttaatttttatattaattttgaattgtcaatattgtctgttcactaaacttattttttcttctttttctacgtcccttcaatattctatctatctgtctatctatcaatcatccatcaatcatctatctaatctatctgtctatctatcctatccatccatccatctccatctctcatctatctactagtagtgtgtgcccataatccagactttagttccatttcctttatttctgtgggaccttggacagattctgccccgtgattctttgtgagaacttttagacttcttagatccttctggattcaaactctgcatgtaacttaagtttacctttacacggaaagaccccattcttggtgtttctttggaaaaatattttattgaattataagaaattaaaactggcatctagattcttcagagaaaaccactgagaaaataagttatgtgtaacaccgtaaaataagtattccaaattggtctgattaacagcctatgagaagcctgttttatatatattagaaaacaaatccagaatttagctccctctgagataattattgtgctcttccctggaaccagtttttatgtcccaagaagagatttacatctcaaataagcagcaggaacaaattagctgccaagaactgtcctttcaaagatgctgttgatagccaagttaagatgattataaatctattagaatgtacaacaccattgattttggtgttttaaagatctgaggtacgagattctctttaaactataacaatgttttaaaagtgcctttccataccataaaatgtaatttgacttgggtgcctaaaaaacctgacacatggcagttcctttttcaactgtacttcctttttcacatgagcactattagagcctagataggaattgggaatgactaacattgaggatttacatcatcgtttcatatttttataattagggaaaaaaagaagacgcatgctttccatagaagatgagaatggaaacttaaatttcccaatccaggacataaacgttatgtggcatctagattaacctccccccaacccctgccaccagtatcattccaaataacttcctttgcttgctacaactctttccttactaaaatgagttagcctatttggtaaattgaatggtattacatatctctgggacaaaaggcttgatgatattcattattactggtttagatacgtattctcttcctttgctcagtgcacttgataaggaagtgaaattagccacctttgtgattgcgtcaagcctcaattaagttcagatctgagttaatataatctatggttatttt

SEQ ID NO: 1880760 - DNA, 4001 bp, Homo sapiens
cccaggttggagtgcagtggcgccatctcggctcactgcaacctccgcctcccaggttcaacagattctccgcctcagcctctcgagtaggtgggactacaggagccaacacacccagctaatttttggtatttttagtagagacggggtttcaccgtgttagctaggatggtctcgatctcctcacctcatgatccgccccactcggcctcacgaagtgctggcattacaggcatgagccaccgcgcacgcccagcctctactattatcttagcttaaaaacaaaaaacgccaaagaaaaaagtgcaggaattcctgggttacatatttaactaataaaaatacagtgccccaaatacgaaataaacattcggataagatattttaaaaaggattttcaggaaatgcacccggagctatagaaggtattatgtacactacacatacaaaaaaaagtccctgaaagctccttcctgacaattaaaatacataacaactaagttctaaatttccacgatattacattttaaatcagttcttaaaacttaatggcagtagcattctctcaaagcaagattaaacgtcttaggaaggcaacatacacatcatggtaaatttggaagattctcagaaactcttttacacatcacggtaaatttggaagattcctagaaattattttacaaagacgaggattcttaactattacgcaactactgatggccttaaagatccatgaactttcttaatctgcagaggggaatctgtatatttaaaacgtattttacaaggatgttcctaacatttttgaaacaaagtttttacggtggattcctcaagtaaggaaaaaaaaattaatacatgataaaactgcttctgtgtttgtactttaagacacttaaacctgtaggtttgactttttaacaagcttttataaataaagctttaccttcataattttgattcaagagaccaaagctatatggctatttaaagatcagaacggctgttactcacaatgataacgccagtggtcatgtttcttcaaataggacaaaaagtgtgctcaaagaaagtcagtttttgttctgattttaaatgtatatcttaaatgcatgcattgtgaccgtctccataatttaaaacctctaagaaatttaaactttcacattataatttagggattagtcaatcccttagtaccagttaaataatagccaggaaagcattagaaaacctgaaggtacatgtaaagaaatgctttacatcactatttaaaataggtgttgaattttaagagaaacatttctttcactaaaatttctgatgcctaaggtccatcaggagtaatctcttttactccatgatattcacagtagttttgctcttggcctcaccagttttaagactctccattaaagaaagccaattttatactacctaggggcacaaaaatagttcccagctcctcctctctttttcctcctaggttcggttaaacgagcgaacatagaaaacacgtacacacactccctttcggccctggtccctagggcattgatgaaaagcaaattatttctttacatacgctctgctgtccacccagagatttaaaaaaaaaaaaataagggaaaataccagaatcagtctgcacccacacctaagccccgccccaccgggaaaaagctgggggtagcgggattgtgagggtggcggaaaggacggaaaaggccgagacttccagctcctaggttctccacaccattctttccttcaagctgcaccgcagccagggaccctgattctattttcagccgcgcctcccgatcctcctccccgccaccatcaccaatacacggtcctcaatcgcttgaatactgggtggggagaccagagtgggccctctccccgcccaacccaaggactgtgggtgggagaggtctccctgcgcacacggctgactcgacgcgcgccccgaggacctctgaactgacccaagtagggtgaagataattcggagggaggggtctaagagggagccgttattcctttttcctctgccttaggaaagcgcgcgagagggaggggccggaacaacgaacgctggttacctaacggtccggcccagccagtcaggttcccaaagcccacaccgcgcgggccgccgaggtggcagcacagccacaatcgccccaagggctaaggagcacgtcaggagcacccgaggtgatgggaaacggggggtggggactgtgctgagcgacgtcgccatgttagcgccttctttctccgtatccctacagtctccagccctgctgacctctgcccatcgttactcacctttccaggtcactagttcatgatcctttcggtcacccgcgagccctgagcacagccgtgtttacaaagcacccctggaggaaaaggctgaacggcactttaaaggccacgggctcccacaggcttccgtcctctctcgcgagatcggactgacaacccccgcccgctcgccccgctcccggcatccccaccttccttctggcgcccctccccttcacccacacgccccttcttgccttccttctgagggagcgcctccgagtcaggtgattccgtcaggcttaaggagaagaaggcgggtcttcggcagggcgggtagaggggacgggcatcaaagagcactcgggcgctcatgattggacaaggagcccgaagggcgggaagcagttctggagggggcgggaccagagggcccaaggagcgttacttctgtaaacccggagctgtggaagactgtgattggctgtcggctggaggagggcgcgggtgcaggcggcggtgaagggctaggcagggctttggcggtgtgaggggaggaaaggtggtgagctccggaaaggctgctagagggaaagcaggatgggtcctccgagcccagccccaggagccgggtgtctccgtttccgtcacttcccagcactaggtagggaggtgggtaaaagtaggctgcgttcctcagcccaccccttggctccccgggagcctgaggcggggagcttcgggttaggtgaggtttgggggaggcggagtttgctggtaattgcccatccctcccctccaaaaaaccccacacaacttaaagattttaatattaactgtaaggatgttggttattcaataaataggcacaagttgaaaagtatgatcagaggcctctgtgagaatttacattattcaataaaagattttcagtgtcttattttttccatttattaaatactgatttctagtctggaacaaaattatgaactagtttatatattaacataaaatacactctcaaaattgttgaaaggttttgggggatagtatgagagttaatgagcctgaagttcaagaatgatatctggcataaaagtgaaattgtaatggcattgacattttaacaggtaggtctctggaccgcatacatgtgtataagccaactcagtcctcttttaaaactaattttagttaagaaacattaagccaaattattaacactttcctacttaaaatgaaagtaccgtccccatatagtaacagtaatgtagtagtgccattgtagtgtaacactaattatgtcagcaaaacctcacagttcagattactcatgatggaaatggtggacaaaatgtttgattgacatcacaattgttaggtctagaacgcattgattaaatagatgcttctctctccatctcccaaaacaactaatgtgagaaaaagaactgcaaatgttacgacatttcaaaagaagtttgggtcaattagaatagatttttttaaaaaaattgtttttccatttgaaattttttccagtgttgattcaattgggcagtagctttggttttaaatttctcattgctacttctccagtctgttgtcaagcagttagttatctacatgatgcattcgagaaacacattattttaaagaaagtctttcagttctttttagac

SEQ ID NO: 1880761 - DNA, 4001 bp, Homo sapiens
gaatgtatttttcatagttgatgtgttcaaaacaggatccaattgaagtccatggtttacattcgtgtcttttgttccttaaatctctttaaatctataacagctccattccccctaaattgttatgacgtgggtgagttgaaaagcctgggtcagttgtcctataggataccccacatccagatttgtctgtttgctttctagagctggcctttactttgttctctattcctgggtttcctgtaaactgaaattatatctaaaggcttgaagagatttgggcaataaattcgaggctagactattttgtaggtggtgccatgttactcacactgcatttcctcaggatgctcaatgtcaggctgtctcactctgggatgctaagtttgatccttgggttctggtagtggcaccctgatgcaaatagccctaggccctctacacagcaccccggttctgaccggagcctcttccctgtctttctccccccaccccccacaaccaccctctgcaggtcaggtcgtgggcctctattcccgctttgatgtgattgtaagtgtcgctggaaaggtgggatgctgcagggaggctaagggtgtggggatgggtggggggcctctgtggaccagggggaccttgacaagtatgcaggggttgacatctgtagggtaggagcccaggcaagggggtgactaggagccatacttctctctctgccccagcacctggctgcccagcaaacctacaaccacctggacatgagtgtgggagaagccctgaggcagaggacactatgtctggagggagtcctttcctgccagccccacgagagcttgggggaagtgatcgacaggattgctcgggagcaggtaccgtgtgccctccattcatgcccccaacacatatagcccagtccttctcatgcacggctccagccatccctgaacatcgggcacctggcctatccttccatttcatgaccaactcctggtgcccacactggcctgcacctggtcctgtccatggggcccttatgccaggggtcactgccaactgatcaccttaggccggtcacaccatccctaactggtttctaggagacgctctctccctcagtcatgttgggttgtttcccctgattcttggcaccaacctcagtagctgctgtagccccatggctctgccccctcactgaacattgcggacccacaggtacacaggctggtgctagtggacgagacccagcatctcttgggcgtggtctccctctccgacatccttcaggcactggtgctcagccctgctggcatcgatgccctcggggcctgagaagatctgagtcctcaatcccaagccacctgcacacctggaagccaatgaagggaactggagaactcagccttcatcttcccccacccccatttgctggttcagctatgattcaggtaggctctgccctgggccatgacaccagcctcttagtcttcctgatttcctggatctcagattgggacaccctgaggatgggagtggccaagctcaaagctgagcagccctgtgaaaactgcaagtgtaaggactcacaggtccccactttgtcccattttcagctgaggtcatggagactgtcctagaagggagggacaaagccccggctaaaagctaaggctgcgatgtgacttcagacactctgggaagatttacttgttccctcacaattcaatttccacctgctggaaatccccttagaaggaagcaagctatatcaacatttgttggatggaatttccatccccagtaagaactaaagcttaaaggaaggagcttctacctacgtgctcatctcaggaaatgtgacatgatctcagactctttcctggtcacacgtttgctaggggcttgcagaggatgggcacagattccatctactcaccatggctggcaagggtcccctgttggaaaggccgctgtccctcctatgtggtcaccatcttcccttttcttttccccacaggcttcttcagccctcccaaattgcccttgccctacctgtgctcccagaagccctcgggcatgcccagtgcaccatgggatgatgaaattaaggagaacagctgagtcaagcttggaggtccctgaaccagaggcactaggattaccccagggccatctgtgctccatgcccgcccatccccttgccgcctgactgggtcggatggccccagtgggtttagtcagggcttctggattcctcggtttctgggctacctatggcttcagccttcagctcctgggagtcccagctgttgttcccagcaacgtcgccactgccctcctactctccaggctttgtcatttcaaggctgctgaaatgctgcatttcaggggccaccatggagcagccgttatttatagaactgcctgttggaggtggggagtcctccctccattcttgtccagaaaactccttagctctcgcagtgagccatgttcttagtctccagggatggatggccttgtatatggacccctgagaatgagcaattgagaaaacaaaacaaaaggaacaatccatgaacttagattttattggtttcactcaaaatgctgcagtcatttgacctgaacttgtggcaagagacttgtgctttctaaattcaaagactagaaggaaaatggataaaaatcacaagtgccgtttctcttgcaatgtagcgctattctactgaaatttctttcttctcttttctttacaaaatcataaagaaaaaattaattcattacttatatagtaggtacaactcagcctacaaactctaatctgcaagaagcataactttatttttctaacacagaatgtaatttctattaggaaccccgtttcagcaggtggtagaaattaatctcagtcaattcaaagtctccccctgaccttttcctggggttaagctcggtcgggtgggggtgtggctttaagtcatgtaagactctgttcctcggctatcatcatccgtccatgctcgcacctgcctggacatcccctccccatctggtcatcagttggtcatgcaaggtctgccaggggctccttcacttccacaaagcctatttggggacctgtggcttggagcatgtggaagattctagctcctggccctgcacaccctctggcttcaggaagctcagtaattctgttccaggccaactgctaagatagacagcccagtcccttgttccgctctgtggcttgctgttttcccaggctctacccaggaagcgtgtgggttcttctacccagtgcttgcctacacttatcacctccaaacctatatggagtatttgtcatactttccccctctttagccgcaacctccttctcagggtccttttctcaagaattccagaaatgtcaacattcgccttgctccccaagccctgccaacctatggaatcttgaccagtgggggagagaggaggcttttattctttaacccatcatatattcttccaaatgcactgtaagtgtcctgagttcttgccacccaccttcagaatcaagcttttaaaattccaaagccaaggctcgcttctgctatgtcaccttccctgtggcaacgggcaccacatgtctggctgtccagagaagggggagattactgtctctaaaacatgaccccttccccttacctcacagagcgagaaggcagaggctttgtactgaattggttggaccataaatgaagatgttccctcactagacattttgccaaaacctgagggtcagtgctggctctgctgtggtcccgcccagggaaggtccagggtcttgggctcaagggagaggattggagttgggtgatggttgggtctgggcccagagaggatctctccagtgacagtgttcctggggagcctagggctctgggatcttgtaacaggtcagtcctttgaggctgtgcctctgggtggctctgctctgtgggaccttctctgtaagggca

SEQ ID NO: 1880762 - DNA, 4001 bp, Homo sapiens
gctgaatggctgccggtgttcctgaagggtgtgcactttcaacctgaattaggccattgtgcctattattgggatcatgaattaatgatacttgtcagtcattatcttgagagctttttgttgtccttaaagacagttcattttgcttgctattgtgactgtgacaatttggttctcagtaaaagacagtttacatgcgagtggaaacctttgtgttttgtagtgttctgctatgagttatgttttcctcagccaagttccctgaaagaaaacacccttcctgttctcccctcaatccattatttctaccatgacaggtttctcaagcaaacaggaaaaccatcaaatgtaacaaacctttttctttatgtagcgcttcacagccgagcacagaggctggcccccataacaggcaacattaccaccttagttaaacaccgttatctctgttctacagaggtgaaaagatttccctggtggtattagaaaaatctagagtgctgtccaaattttaatgcagaagaaccaaagtttagtcttttatccagatcattgtggtcccatgtacatcaaccttgcaagactgattccatttatagctatagaaagataaaaatgagcattctattcaacctgcagggccgtaatcagactgtgctaggtcttgctgctacaaaaagacagcacttggcttccctgagtgggaaattagcatgaactccattagtttgtgttttataaagacacgaacatttcccctaatacatatcttaaaagagaatttctcaaaagatagctattctccccagccttgctaccaatcactctgttatagcgggatggatatctcaagttttattaacaaattattttactaaataaagcctagataaaagatacactcgttctgagctccctaaaaagttagtgttctatcagtgctggaaagagcgactgactaaacattgattctagttttttgtttggtttggttttgagaccgagtctcgctctgttgcccacgctggagtacagtggcgtgatctcagctcactgcaaccttcacctccctggttcaagcgattctcatccctcagccttccgagtagttgggactacaggggcctgccaccatgcctggctaatttttgtatttttagtagaatcggggttttgccatgttggccacgctggtctgtaactcctgacctcaaatgagccacccaccttggccttccaaagcgctgggattacaggtgtgaaccaccgcgtccaacctgattccaatttaaaaacaaatgattaagaacaaagacaacaaagaaaagcaatcataaccagcacacacactcttcttaaaattgccattcctgagtttgctgcagcatgtggaaaccaaaacattaccattaatagacaaggaaaggaaaataatcccaatcctttctgcacttccagagtttgacctttaacagagtcagagctgggttgaaggtaaggagaagccaacattagctcagctggttgtcagacccaccactgaaaagtactggctcctttaccatagtgaatagcttctctgacaaaattagggtctttggcaggggtgggggtcactattttatttttatttttatttacttacttatttttgagacagggtttcactctgtcacccaggctggagtgcaatgatgcatttgtgtccggaattggtgggttcttggtctctgcgacttcatgaagccgcggaccctccaggtgttacagttcttaaaggcggcgtgtttggagtttgttccttctgatgttcggcagcgtcttcctcctggcgggctggtggtctcgctggctcagaaatgaacctgcagaccttctccgtgagtgttacagctcacaaaagcagtgcggacccaaagagtgagcagcagcaagatttactgcaaagagtaaaaaacaaaacctccacagcgcggaagcagacccgaccaagttgccactgatggctgagggagggcagcctgcttttattccctcatctggccccacccacgtcctgctgattggtccattttacagagggctgactggtctgttttacagaaagctgattggtccgttttgacagggtgctgtttggtgcgtttacagtccctgagctagacacaaaagttctccaaatccaccctagattagctagacacagagcactgattggtgcatttacaaaccttgagctagacacagggtgctgattggtgtgtttacaaacattgagctagacacagagtgctgattggtgtatttacaataccttagctagatataaagattgtccaagtccccaccagattagatagatatagagtgctgattggtgcatccacaaaccttgagctagatacagagtgctgattggtgcatccacaatcccttagctagacataaaggttctccaaatccctactagactcaggagtccagctggcttcacctagtggatctcgcacaggggccacaggtggagctgcccacagtccggcccgtgcacccgcactccacagcccttgggcagtcgatgggaccaggggctgtggagcagggggcagtgctcgtctgggaggctcgggccgcgtaggagcccacggcagcagggaggctcaggcatggtgggctgcaggtcccgagccctgccccgcgcggaggcagctgaggcccgacaagaattccagcgcagccccggcgggctggcactactgggggacctggcacaccctccgcagctgctggcccgggtgctaagcccctcactgcccggggccggcagcgcggccgactgctccgagtgcggggcccactgagcccacgcccacccagaactcacgctggcccgcaagtgccagccgcagccccagttcccacccacgcctctccctccacacctccccgcaagctcagagagccggcttcggccttggccagcccagagaggggctcccacagtgcagtggtgggctgaagggcccctcaagtgcagccagagtgggcgccaaggcccaggaggcaccgcaagcgaggggtgcaagggctgccagcacactgccacctctcgccttcacagctcactgcagcctcagcctcccgggctcaagcctcagcctcccgggctcaagcctcaacctcctgagctcaagcaatcctgtcacctcagcctgccaagtagctggagctacaggcaggcaccactacgctcagttaatttttgtattttttatagagacacggtttcaccatgttgcccaggcttgtcgcaaattcctgagctcaagcaatctgcccgctttggcctgccaaaatgctgggattacaggcataagccgccatgccaagcttttttttttttttaagtttgttctggtgatattttatcttctccttacctgaggaagaagaatgctcagtaattatttcactatgcttactaattgtttcactaataattcacttagtaattattttagatttgctccaaaataaaagtaagataagtatctttaaaagaataaagtgtatctatgtaaagtgctccattcacctggctcttgtcatcataacatagctgttattatggtatttgctgttgttgttgctagtatattattatatcttaaaattcaaaataaaatggtcaggcctgagacagaaatagtaaggctctaaaccagctttcactagcaaaataagcatttttgctttgctctttttgttaatcatctttgtttaaaccattctccccaacccttttctttgttttgtttttaaattgccttatgcggagcttgcagtgagctgagatcatgccactgcactccaccctgggtgacagagctggactccatctcaaaaaaaaaaaaaattgccttatgggtaataactgtgtttgtagtggatcaatattaaaattccttaaaatattataatctagtaagcttactcccaaa

SEQ ID NO: 1880763 - DNA, 4001 bp, Homo sapiens; identical to SEQ ID NO: 3346

SEQ ID NO: 1880764 - DNA, 4001 bp, Homo sapiens; identical to SEQ ID NO: 3362

SEQ ID NO: 1880765 - DNA, 4001 bp, Homo sapiens
gaggacctcatttatttcattagttcttctcccttcaaagccagcaaacacaggactcccttcctggctaggagtcagagtaggtgaagatgatctgctatgcacaggtgtcttcttttccaggtgcaggaacagcttgggcacactggtggacatgtcctgctgccagcgcttgggctgaggtgaggtgctgctcttagaaagcctgtcacagttggcggtgtggggcgaggaccgcctcagagactgcactgcttgcggctcggctttgcgccttttaggggtggctggttcaccgctggtcgactgactctctgtagactgcggcctggatggattcaacaaacgtaagctgggagagagcttctcctggctcctattagtatttgtggcactttccttaattgcaagaaaaaccttagatgcagtcacctttttatactgagcttgttcatagggatagagtaaaaccaacgggagagtgtaatcaaaggttattcttaatccatccaccatctccttacaaaggtcaatattcttttctgctgggatataaggcacgttcatgctggcatgtggcatagcgtgatggtgacgaggcctctcattggctgaaaaggctgcactgatagcaaaatgcttcacataggattccaaaatcgttatgatgttggtgtggcatggaagttgcactaaccgtttcctccgattaatgtagtaacaatcatcctccagctgcctcttcagaacttcagggatttctagagttactgttctttcttccatttccctttttgtttgaagctccggttcttctttcacttcagtcttttcttcaatatcacattcttcacttattttttcatccttgtcttcactactgtcagaggaactgcttaatgagttttcatcattttcatttttttcttcgatggagaggccttttaaaaaaagacagagtcagcaccaagcaacctggagcggctgcttctttctctcttgctcctcaggtgagctacagcatttcttgccaatttatgctgtaatctacgaatttctttctttctttctttcttttttttgtgacaagagtttcggtattgttgcccaggatggagtgcggtggcgcggtctcagcacactgcaacctccgcctcccgggttcaagtgattctcctgcctcagcctccagagtagctgggattataggcgcccaccaccatgtcctgctaattgttttgtatttttagcagagacggggtttcaccatgttggccaggcgggtctcaaactcctgacctcaagtgatccgcccacctcggcctcctaaagtgctgggattacaggagtgagccaccgcgcccagaccctaatctacgatttttttttttttttttttttgagacagagtctcaccctgccgcccaggctagagtgcaatggcgatctcggctcactgcaacctccgcctcccgggttgaaacgattctcctgcctcagcctcacaaatagctgggattacaggcgcccgccaccacgcccaaccactttttgtatttttagtagagacagagtttcgccatgttggccaggctggtctcaaactcctgacctcgtgatccacccgcctccgcctcccaaaatgctgggaaacaggcgtgaggcaccgcacctggccaatctacgattttcactgggctcacgaagcacatgatcttcggctacccatctatcccagcttcagttccaaccgttacaacggatcagctattctgggatctttctgcctttttcgcctttcccaacaataacattaacaatctaggtcggacggcgtccgacgggagcgtcccacgggagcctacgcggcaccaggctgcacggcaggggagatttaacgcgaagagagaaacccaccgtagttaaaaggcctcctccgtcggcggcttgcgtccgcgtcccgggcgcacacgtagcgccggctgcgcgacagggcgcgcgcgacgctgccgacggcgcatgcgcggtccggcatgccgggcggaagccccatttgatttctaatgctatttatttatgtatcccttgtctctctttaattaattatgttgttgaactttatctgttttactggtcttttaaaggaaccagcgcttaatgtttcttgatcacgtttttgtttttattttctttaatttcttgactgtattattttgttccttttaacttaggttaaactgttctaaaatcgtttcttgaattgaaagcataatgaatttacttccatttacttttgtttgctaataaatgcatttaaggctgtctattctctgagtaccagttcgtgattttccttttgtttccttctttgatacaagcattatttagaagtttttattactatttctacttgcaagataaatttaatattattccctactttaaaaatcctaagtatactaccaagagatattgaatattaaaataattaaaatttatagtcctaacattttgcttaatgataaatactagaagcatttcatttgtcaagaaaaaaatcattttatatttaattttaaaattaaatatgcaatacatacaaaaccttttgtggcatgcataacatataaagaataacaataaaatgtcactcatgttggtgtttgagttcttatgctcttgccaacacttagtattgtgtttttgctaatattcccagtgcaaaattgaagtaaaatttgtatttttctcctttatgataggcacttttggtgtcttatttaagaaatcattttatgttccgtggttataaaacttacctctcacgtttaaacttttaatccactggaactgatttttgtatttgctttaaggtagaaggccaattctcttttccttaatgtggataacaaattgtcttagtaacatttattgaataatttatcctttcctcactgttctataatgccacccctgaactgtatctcttctatgtgtacattggcctgtctctagattctatattgtatttcactggtccttttttttctacctttgcacctaatcacagtgttataataactatctagctgggtaactcttctctccttgttcgttttccttagctgtgttatggctatggttgacctttgatttttccatatacatcttattaccagtttgttagttttacagaaactcttttggcattttcattagaattactttgaatctatagatcaattagggggaataattgatatatttatgctattggatcttctaatctgttaacatggaatatccctcctgtgatttaggtcctctttaatatctttcaaaagatggaataaattatagttttctttatagttataattttagcagtatatattttatgaattataattttatcagatacattttgttggatttttagaagtcttttgtaaattatatgatttaaagttccatttttctactgttgatgtatgaaaatgcaattgacattttaaaattagaatttaatgaaataattacagattcacatgtagttgtaagaaataattcaagatgcctcttttatactttaaatagtttctctgaaggtaacattttgcttgtgttggctttattttgctcttctttttctaattttttgagctaggaatataagttgttgatttatagcatttagtgctataaatttccctcacataattgctttagctgcatcccatatacttcgattatgttttcattttcattcaattctatgtatttttaaaagtttccttttatacttcttctttgatccatggcttattcagaagtacgttgttcaatttttacgtgtttagagattttcttgttgtcttcctgttattgatttctagtttgattctattatcatcaaaagacataatctatattatttcaatacttttaaacttgttgagacttgtttcatggcccagaatactgcctattttggtgtacgt

SEQ ID NO: 1880766 - DNA, 4001 bp, Homo sapiens; identical to SEQ ID NO: 3377

SEQ ID NO: 1880767 - DNA, 4001 bp, Homo sapiens; identical to SEQ ID NO: 3378

SEQ ID NO: 1880768 - DNA, 4001 bp, Homo sapiens; identical to SEQ ID NO: 3381

SEQ ID NO: 1880769 - DNA, 4001 bp, Homo sapiens
ggttctttgcctgactttttttttttttttttttttttgataccgcgaagaacagttgggatgaaagggatccatccattgcttcctttaagatggcctctaggcagtgggttttctgtaagtctggcacaaattctggagccaatctctggcaaggcagagtgctaggcgaggtctagggacccagggtctgcgcttgaagcctcccgctcactggaaattattgacttccagagatacatacattttttttaatttaaaggggaggtgcacagcacaccttcctccactgggagaaagggggcccaattcccactcccccaaacacacacaagtacacactgactaaggcacagctagggcgggggcgggcagaaggccccttgggaggacgtggcgccacagctgcaatgggtgtgggggtgtggagctcatcaccgctggaggtgcttgggggcaggagaagaaaagcctcagggctccccaggaaataggagaagatggtcgggaaataggcagataagaaaaccaacaggaaacctagaaaagaattgagaggaaagaaacaaaagagagagtggaaaaagagaaacgggtgaaaacaggttgtgggcaacagaacaaaacaagaaggaaacagcagaggaaagggaagaacatacatcagagaactgggaaagtgcgatgaattgggaaggaaagaaaaggggaggaggggagatagggaagaggaaaacccaggaaatgaatactcaataaagaaaactcagcgggggcaggatgaagaggttggagaggcaaacggggccctttgggagtcttagaccttgacaaaaaccaggtgggcagagtacaccaggtcgcccacataggccagcaagttgacggccgtcaggttggtcacagccagtcggcggtcccagatacacacaaggtaggggtttctgtcgctgcagctcacatctctcgtctgccagggctggacaccatacttctcgttgaactggtagaggggccagaggacaagggcagtggcatagaggaggacggacagcaaggccagccccaacaggaaactggggaagcggatgggcagcatgttggtgcagtgccccaggctcagcaggatagtgagggccgccaggacgaagcagagggcgtacaccgccacccaccactccagggccggccggttgtggtacacgtaggggctattgatgaacacgaagatgaggcaggccacgaaggtctccagcaccttcagcagccccagctcggaggccatgtagtcagtgatctcgccgggccgggcccgggtccaggttacttcggtggcgtaagccacacaggcgatgccagagaagacgatggcggcgatggcgtggtcgcgggaacggccgtgggacaggaactgcaagtaggtggtggggtagatgatggaggccgagaggcacaagagggccgcatagcaggcaaaggtgatggggaagttgcgccaaaacaaggggaagcgggcctgggagccgcccagctccacgaggaggatgaccagggtcatggcaaagcagaaacactaggtgaacatggaccagttacccataggccccttccaggcgcccacgctggccaccagtgacaaggccacgcaggtggacaccagctgcagcaggcggaggaggcccaggggctggatcagggccctagaggaccctacgacggtgggggaccgcatggtggtcgtgacggttgggtgggtaacagtcaccggcatggcagcagtcctggctgaggaactcacggagaaaaggtctggctgtggaaacggattaagtcacacgcctggaaaaggctgggaacagcgagagacaatgtcagtgtccactgggtctgggcttctccctcccaggacccgccaccccgtggaacaggaacatagcaccgagcagggaagagacctggccttgacccggagaagtcccgcccctctccttccaccagttccactacctgtgtgggctgcggcccaggaaacccagcggaagtgcacaccccgggcaggcgtgggcacgtgtgtgatggtaaccccgctctggcaggggccagggggcaggcggtggtggtggcagggcctggggcagcactgaggggccagcggcccagcaaggcccgactctctctccttataaaggcttcaagtcagcctaaccatttttaattttttaatttttttgagatagggtctcactctgttgcccaggctggagtgcaatggcatgatcagggcttactgcagccttgacctcccgggcttaggtgatcctcccacttcagcctcccaggtagctgggagtactgacaccaggcaccacctgcctggctaattttttgtgtttttagtggaagcggggttttgccatgttgcccaggctggtcttgaactcctgggctcaagtgatccacctgcctcagctttccaaagtgctggggtcagaggcgttggaaccaaagcaacttcatcttgaataggagctgggtaaaataaggctgaaacctactgggctgcattccaagaggttaggcattctaagtcataggatgagacaggaggtcagcacaagatataggtcataaagaccttgctgataaaacagtttgcagtaaagaagccggctgaaacccaccaaaaccaagatggtgatgagagtgtcttggtcatcctcactgccaaactcccaccggcaccatgacagtttacaaacgccatggaaacctcagtaagttaccctgtatggtctaaaaaggggagacatgaagaatccaccccttgtttctcatataatcaggaaataaccataaaaatgggcaaccagcagccctctgggctgctctgtggagtagccattcttttattcctttactttcctaatcaacttgctttctttggagtagccattcttttaactcctttaatttcctaatcaacttgctttcactttactgtatggactgtccttgaattatttcttgatcaagatctaagaactctctcttgaggtccagatcggcacccctttctggtaacaatgggattacaggcaagagtcaccatgcctggctgttgttgttattattgatctatggccaagacttgctccaggaaaatctgcagtcatacattcattctgttgcttgtcattctttgaggtccacacccaaagcctagtctctaggggccacaggctctggggaagtggggggctgagaagccatgcactcaccttcaccctttctttgcatctgctttgtgcagctctactctctcaggccatctgcccttggatgaataagtgccctggctctcttatagaccccagtttcaaagttcttcatattcatgtatttgttcattcattcataaattcattcatttatgtacttcctcattcaaagcgatacttagaaattaaatatactgaaaagtttcctgaggcagaaataattgtattcaagcatataaacacaaccacagtttcattctctgctgttttgagagtgaaagcgtgtttttaaaagaagaaaagacctcagagaaaactgcatgttgattgtgagaggctgtggaagcagtaaagaagccagctaaaacccaccaaaaccaagatggtgatgagagtgtcctggtcgtcctcactgctacactcccacccgtgccatgatagtttacaaatgctatggaaaccctcacagtccaaaccatgtgtgggagcagttgcctcattggggtactaggagataccagcagcacccggactccagagccaagtctctgcccagcacatggcagacacttgctcgtgctacttctcttcactgtatgtttacattaaacgagcatctgtgttcatcacattattgggcaggtagccatgttcagtatacattatttgtttgaaggtgtgaccagcttacatggggtgagaatttcagttgagtcattgggt

SEQ ID NO: 1880770 - DNA, 4001 bp, Homo sapiens
aggccgcctcctcctccgcagtggtgaggacgcgtggacagtcccgcgggggcggcgggagacctgcggagtggccgcactccaggtccgcgccaaggccgggcagctccgctttctgctcagtctccgcgaggtgtcgccttcggccgaagaaaccaccgcggcgccaccctcgtagctcgcacttatttatttatttattttcaaacaaggggggcgcccctcttctttcaatttgaaactggaaacatccagaggtcttgttcctaagggggcgcgtcctctccctgctattttgcaccttcggactagccttctttcgtaattacacaggagcaacctccctgcaaggccttgctcaacgttggcctcgcgctcagctgcacaacacgcagtcaaagcgggggctgggttagaagcatcggtctcccctccccaacacacacccccggagccctccgtaatttttttttcttttaatgacaagcaattgccaggctcgcagggtgggtgctgcattgcaccgctccgcgcgcagctggttctcagagtgcagccggtgcaagcccgggggtccaaaagggcgggaggagcacaccctgggcttcccagctttgcagccttctctctgcaaagaaaagcaagtggcttttggcgcgaaagccttggcgcctcccctgatttttatggaaatcaggagggcggggtaaagccgctttcctctcctttctccctcccccttgtctgcgccacagcccccttctctccccgccccccgggtgtgtcagatttttcagttaataatatcccccgagcttcaaagcgcaggctgtgacagtcatctgtctggacgcgctgggtggatgcggggggctcctgggaactgtgttggagccgagcaagcgctagccaggcgcaagcgcgcacagactgtagccatccgaggacacccccgcccccccggcccacccggagacacccgcgcagaatcgcctccggatcccctgcagtcggcgggaggtaaggagcagggcttgcaaaccgcccggcgcccagggaagcgacgagcgccggggcaaggcaagccctggacgggattgcgacgtgcgcaccgggcgccctaatatgcccgggggactgtttctgcttccgaaacaaaaccatctctgggttttcccagaaaagccagttccagccccgaaggcatcctggctagaggagacccgccctaatccttttgcagcccttaccggggggagtaatggcttctgcgaaaagaaattccctcggctctagaagatctgtctgtgtttgagctgtcggagagccggtgcgtccccaccccaggctggggttcttctccaaagggtgcccctggaggaagaagagggggggattaggcagggcgaggccgccgcggtcgcaatctgggtcacggctgctccagcttggaggagaggcggctctcccggcgaccctcctcgcgcgggcgcccctgccattcccgggaacaggggctcagcctctccctccctggaagaggacgttgtcgtgggtttggaagagcaggggtgggcttagagagcttccaattaagctattggcaggagtatccctgcagcgggtgaatgccgaggggcgtttgctcaaatttggggaggggaaggatttgtggatatgggtgtctgttgttggtctctgtctagagaaaggcttttttttatttgcaaagttttctaaatcccctgctatcatttgcactcctgaggttgcatttttacaaagggggtagaaggtactccaaataccattcccggtagctgggtcggagagcctggggcttcccctgagcagccggccccacaccgctgcgagtgcggttgtctgcgtgctcgtgagagctagaattctgcagccaggaacagccccctcccccaggcagtgccttgtgtgaatgaaatggcagtttccaaagttgcggagcctcgccaccaccccctgcatctgcatgccccctcccaccccctgtcgtagacagcttgtacacaaaaggagggcgggagggagggagcgagaggcacaacttcctccaccttcgggagcagtgggcagagtggggggcttggagggaagattggggaacctggttagagggggcgcccattgcctatcccctcggtctgccccgtttgcccaccctctccggtgtgtctgtcggttgcagtgttggaggtcggcgccggcccccgccttccgcgccccccacgggaaggaagcacccccggtattaaaacgaacggggcggaaagaagccctcagtcgccggccgggaggcgagccgatgccgagctgctccacgtccaccatgccgggcatgatctgcaagaacccagacctcgagtttgactcgctacagccctgcttctacccggacgaagatgacttctacttcggcggccccgactcgacccccccgggggaggacatctggaagaagtttgagctgctgcccacgcccccgctgtcgcccagccgtggcttcgcggagcacagctccgagcccccgagctgggtcacggagatgctgcttgagaacgagctgtggggcagcccggccgaggaggacgcgttcggcctggggggactgggtggcctcacccccaacccggtcatcctccaggactgcatgtggagcggcttctccgcccgcgagaagctggagcgcgccgtgagcgagaagctgcagcacggccgcgggccgccaaccgccggttccaccgcccagtccccgggagccggcgccgccagccctgcgggtcgcgggcacggcggggctgcgggagccggccgcgccggggccgccctgcccgccgagctcgcccacccggccgccgagtgcgtggatcccgccgtggtcttcccctttcccgtgaacaagcgcgagccagcgcccgtgcccgcagccccggccagtgccccggcggcgggccctgcggtcgcctcgggggcgggtattgccgccccagccggggccccgggggtcgcccctccgcgcccaggcggccgccagaccagcggcggcgaccacaaggccctcagtacctccggagaggacaccctgagcgattcaggtaaagaccgaactcgggtccggctgcctccctggggcactggaccccgggtcgcgtcccctttgttagtgctcgtatgtcttggcctggggagcattttggaggcagtgctaggggcagagaggtcctgtttcccccaagtctctcctcggggtaaagagaaggggctgagagaatgccgttgcaaaaggggtgctctccaattctcgccttcactaaagttccttccaccctctcctggggagccctcctctaggccatcacgggccctcacccggtcccccacctctcttttgcagcgcagtctgaggaataaaattggagaaagttggtggctaaaccgggtgggggtttagggggttgctgggtgcactgcctggacagaaacctgttagcgcaggggtgaaagggactctctggcccaggtcaggggagggaaagacatcccgagaagattcaagggctgtgcaaagccctgtttaaggcgcaggaacttataggagggttgcacagatggctagagccgattttctattctttttctttttctttttttttttttttcaaatgtcggtacctttcccttcccccatcctcggtgggtggtgggctatttgctcctggtgcgtggccagcaggcggcgatatgcgaggccagcaggcgggcccgggatctgaaaggctgggggtggtgggggcaccctccctccctccattcagcagctggctgcaagtgcaacagcagttgtgtacattctcagggggcctcctctttccagtgtgcagtggaaactggctgtagttttgtcttccagcctgaattccaggcctaatttgagatgtgagttgtatctgtaacccagtgccctt

SEQ ID NO: 1880771 - DNA, 4001 bp, Homo sapiens
tgcgcccagccaactattaatcttttcttaaaggatggggttcacaagggcaaaagtgcgtcagacccaatgaaatcccagtgcatcctgctctcaactccaagcaccgcgctcctccttctcgatgacctcctccgtccacttccttcctcttttgctcacttttctttttccatccacatttgttgatcacctactgtgtgtgccagttctgaggattcagaaacaaggaggccccactcgctgccccctggatgcttccagcccagaaggcacgaagatgaagacatgcccaactgcagtaccctgtggtcaatgctacataggagcccaggagtgccagagagagagagagagaggcctgctccagccatgcagggtgagagaggcctccccaaagacatgatttatgaaccccaggagacaagcaccccagtgcccctgcagaactcccctcacccaggatgggaaggcacagccctggggatgctttggggtttgacattctcttctcagccctgtcgatgtccacacagctgaacccagcactgtctgagatgggtccccttttccgattttagagggctagtgaggattcactcttcatggtatcaacccgggctgtgagagtgtctgggtccctcgagaggaccagcactactcacctcagaggaggcggcccctggcagtggaaggacctacctccgggggaagcaggtggagggggtgcaggcgaccacagaactcagccagaggcagctgtgtgtgctttggtgctcaagccttcaggggtccaaggctgctggggtggccaccacgctggtgcttagaccttagcaggagggaaggcaggggtgaggacacttgaccagatacgatgctggcttgctaccccagcagctccctgttctgcatcccaaggcagcctcctttatctgtctcctcttctcccctccaccccacccacaccattggccccaaaggctggtcctgccccaagcatttcctatgtgttcacacctctgagcctctccttctccagccgtgatgtgtgacttggcccttgaagccctcaaagttcttcagtgaaagccaagtgtattcctccagctggaattacctgtgactttctctgtagtcccaaaatgtgcacaaaacttataaaggtgtgtggtggcccttagatattttggtataatttaattgcatgcatgtgtcttgctgcctgggtcaatttctttgagatcagtgactacatgtgacctttgccttcccagagaccagcacagacccatcagtgaagcctgttctcaacaaacgcttgtaaatgactcactcctactggggtctagaggacgatggatcccagatcaagttgcttgttgcctcatttgtcaagttctgcctgtacatcggctgttcttccttacgataaatctgaagatcagaaacacggcggaacaacaagcacgcaggacaagtccatcctgcccataacaccctagagcaggctcaaagcaggaaaacagcatgagtcacattcagcaacagacacacggggaaccctgctctcccctctaccctgaggagaaacaacaacaccttccctgcctggggaaactcctactcatgctatccgtctcagacagcagctcctctgcgaagccatcttccactctctcagaaagagtccattgtttcttcctctgcgttctctcttgcctctattaaggtgttcagcagacagtattgaaacgatctccttgcctatttggtattttccagtatggcagacacatatgggaatcagttctgggagcacagtggtttaaaaggatgcagaccaccaaacatcagaagaagagaagtcagggtagggaaggaccaggaaacctgtgccccatgagcggactgagggttgagttggtcccggacgttgctgtgtctcggtgtgattaccaatagcacccaagttcattctcaaaagtgtcctggtttagtccatcacatatataatcaccctccatttgagaaatatgtaaagaagccacagggatttgacccacgggagccttggggagtccatcactgtctttagtcattcagggtgcagccgcatgcgctgcgtggcctcaggggacctgtgggagaggatgatgtaacgaaagcctttcccctagtctctgttttgtttactgttgggcacccaggacttggcaccattcctggaatatattaatctcttgataaatatttgtgggagagaggaaggaagagagggaggaggggggaagagggtacaatctggcaaagagctggttgcattgcaggccttgtcccctcagtgggggcacctgccagaggctgaaggaccccttgctggggatggcacagatggtgtatgggctgaattgcacccccctcccccgaaaaggatatgtccaagtcctgactcccagtgcttcagaatgtgactgtactggaaatctggctgttgcaggtgttagttgagatgaggtcatactggagtaggataggctcctaatccaatatgacaggtgtccttacaaaaagactgtcatgtgcagacagaggcctacagggagaagtccacgtctagacaggcagaggctggcatgatgcatctacaagccagggacttccaagattgccagaataccaccagagtctaggaagagacaaggaaggattgtcccagaggtttcagagggagtctgccaacaccttgatttcagacttctagcctgcagaactgtgagaatacatttctgttgtttaagccatccggtttgtgggggttgtttatgccagccctaggaaactaacacggaaggaattctgccttgggtgggaagatgcatgagatggatgatctctggactcactaggcttccatctcggagccaggcagcagtgatggatttgcctcaggcagccttgcagacccactgtgtgtccatcgaactctgcactggtggtctgcacccagggagccaagcacaagctcatctgagctaactgcagcaccagcatcctgaaacctcccttcaccgtccagccggtcatgggctcagggctctttggctcctggaacttcagagtgatggaaactcacaaagacacccaagtccacccctccctcacaccgccagattccaggcttagaggcgtgggggatacctggactctttccctgctctgtgctctttccgtgttgtcacaagaaataactctgtggtctactcattgttttccagataagccccaaccttcccacctgtaggaatcccctttgccagaaattcctcaccccagcctcctcctctcagcctgccaagacgcactaagataggagaccacttccttcagctgatctcctgtccaggggatctctgcttccctccatccccaaccctgcccgccacgcagaatcctctggcctcactcccaggcagtccacccttacctaccacttgtcatgggctactttgcagggggcgaatgacatcttctttcacctctattcttgttcctggtagtcattcaatcacccacagatatatattgagaacctaccttattgcagaagttaaattgtcaataagaataaaaagactatagtgttgttgggaacatggatacttcagcattcacttacaatacagagtcccaagcagaaaaattggaaaaatacaggctgcccttgaggtcagagctggagagagtggtggggagctgtcaggcaaagtccacaagcctcctcccagacctcacttctcaccactggcccctttctctctgccccagccactctgaatgtcttgcttttttctctgcactccagctttattcccacagaggtttcgcacgtatttcccccaaccttgaacatctgtgtccctcccattcttctttgtatgaccagctcccttacttccgtgctccctgcgtaccatacccaaaacagcaccctgccgctc

SEQ ID NO: 1880772 - DNA, 4001 bp, Homo sapiens; identical to SEQ ID NO: 3390

SEQ ID NO: 1880773 - DNA, 4001 bp, Homo sapiens
aatgcatctgggcaagagcttttcagaatccagtttcctccaggataaatttaatatgtcttgagggccaggcacaggcaaattgattctatctctgcaccagaagaactcatcaacatctgtaagaacacagattttcaacaaccccaggattaggggatgctattttgtaaaatatattccaagcctactcccttcatacctcatgccagcatggcattttttaattaggaagttgattaaaaagggcatggtagaccacggatgtatggtctcctggcatccatccagctgtttgttgtctgggtcgtggaaagcgttgctcatcaccagttgcaggagcgagggggaaatgattataagggatggcaagaatgaaactgttctgctgtatgtgctaatggcagctgattgtggcttcctgtgaaccagcctttcctacagatagacttgctgacttccttcatgagacagagaccacttgtacttggaaataacttggaaatgtagaaactaggtgtattattcagtggttctgatttttcagtgatcaacaggataagtcataatgacttgtattttctgtattcaaacctgtttttggcctcatatcctgtaggctggcgtcaatgatggtagttgttctaacagtgttgtgctgtttctcttcaagagtaactggtttttgcttgtctcccccaccctccaagggaaattcctttctttgctggctttttttttcttttttttttttctaggacttagagtatatttcacagaaataaaattttatgcctaattgtagtgttcctatggctagtgtggtgtgaatgagcaccatgtcatgaatttaaccctgtccatccctctcatcctcttactgtatgagcactttcgcaagacaaagcacactaaagaaagtaggaaaaagacagccatggatgaggcttgacacactgccaacaccaagaccctcatccccagggcagaggctctggggcttttacacgtcactctgggaagacactcagtgctcaagatcaggggactatgtctgcaccccagtgggactttccagccactggggtagcagttctcccttttgttctccttccctctgaacctacttgcacatatattaattatttttagattctgcattttaaagttttcagtgacagacaagctggagttagcaacaatggttggcaggcaggggctctcctcactgtcctcttctagaaagaaaatatcaaagtcaatgctgaagagaaaaggcgagaccccttaaggtcagcacctcccttccctcttagtgccataactgaataattaatacaatgtgcatatattgagtacctactatgtgcagagccaaatgagatagaactgagtaacaaatttctgccccacaaaaagtcaggtaatgtgtgtacttgtgtgtgtgtgtgtgcatatatatatatatatatatgcatatttctgataaagggtaatcataaatacttctaggtttacttttcttgaatgcattttgaaatagattaaagcattcttatgacttaagaagaagagttgagtgaagcctgaggcccctttcctgggtaatcagcacttcaggaatccaggtgaccattccaaaactcagtactcaacagcatggcattgtatcaccatattctctattcaacggcacgtatgatttcagtgtattgacttcttacaaaatcaagagtcacacattcttgaaggttctggatagttagccctcatccatcatggtttctaagtacacgttccctgtccccttccattatgcagagttccaacgcagcaagcctttgcttacctgagaatacatgaaacagtaaacagaatgctgtttggaggaaagtgttggtaactgtcaggggtctgttctgcagtttctgagctgttgataccagagatcaacaacagaacattttggatttggcatggtgaagccctaggttattgactgagggccaaccttccaagcaaacaggaagatcccctgtgtcatattcacttgtctctgccttctctgtgacataagcagtcctgccccagtgcagacagctgaaaggggctgccaacctggttatccaccggctcaccattggctgcagaaacatcaaaacaaggaggagaggagaattcaaattagaaactggtcatgtatttcagacaattccaatgactatttgccacatttcccttgagtcagacctgattgcatatacctgcctatttagaattaagaattttgccattactccctgtaaaagacaagttaggttagaattagcattttatagtctctcagagtatggaaatttaagtagctcaggcatcaaaaagccacatgtctttgcttaaaaatggaattctgagattatataaagtgagaagggttggttgatgctaggttcttgtatataataggaaataaaatcttaataatttgctcagataaatttcagatcaatttcttactcgtcctttgtttaatgtggcacatttggtactgaattaacatgtgaaattttccactgaatttgtattctgaatcttccaagatgttttgcaattcttttcacagtcctgagaacaagaatggagatagttttgctgcccaagtgtttttttagctaatatgctgttcctgggattatattagctcaaaaacaatcctttttcctaagagatccacatccatggtgccagccaagaaatgatgtatctgctctccagggacaagttaacacacctgtttacaaatgggcaaagccacctgttcatctagttttaaagttaatgatcaaaacagtatctgatcctaggggttagtaagagtggaaaggcaaatttgtgagacaacaggtaacatctcatttttattacctaacatttcaatatatgtatattaaatgtggaattagttagaaaatacactaagcctaagatacatattccaaatggtaaatatcaacattccaaggattagatgcagaagttgtgtaaggagtagtagagtcaatgatagtgtaaatttcatgctttacattttcaaaatccaacatgtgcaaattgaatcatgtattttagcctcaaaggcataactgaagtgtgaggcttgctgattgggcagtcagcattgcaaaaacggcctctatcaataaaaaatcagtaaacgattttcacacatctcgtccttcctcctacaagatcgagtctctttcccttcctcctttgactggggagcatgtggcttgggcccttataacaacatggcctccaattttttggcttgcattagagtccctcttggcacctgctcttagatttttaactaagggcacggtcaggaggatgattacaaaatcattttactgattattttggtctcttccaagagtcagagagactttactctgcctggtttggttatatcagctaggttgcacatgtgctataagtttctgactaactctccaaaatattaaaaatgacccatgacacagggaaacttcatttttccattactttccaggaggatatttttacctaatattaaacattttttcattttttatttttattttttgtcttttttaattttctaagtgagattttccacacatagtcaacctagacaatgacataaagtccctatgaaggagccctgcattgagaagaccttcctcctaggtagctctctagagaattcggagatgacttgaaacaaatgattgcagttttctgcctctcggtgcccttgtttaaagtgagggagtcccagttctaacacttgctgactgcgtgtttggcatcttcacatggacagcaatctcaaaggcattactgtgtaacagtagctgtcatgctatcagcaggaccacaccgacgggccccttgtttgtcaccattttgcagagacgtgcaaatgcaaacccaacaccaggaacctgagtatttag

SEQ ID NO: 1880774 - DNA, 4001 bp, Homo sapiens; identical to SEQ ID NO: 3397

SEQ ID NO: 1880775 - DNA, 4001 bp, Homo sapiens
gcaatctattttttaaaaaaaaagttctagtattttttaaagccacctatccgccaactgactcttttggatgaaggtattgtagatgcctttctgccaaacattttctgtgtatccctttggtttttgcgcaacatccaccttacagcagaagacacaagaaatcattttggagaatgagccttccagatactgtaaagtttccctctttttccaagtacaaatttgacatatcacagaatatgctaaatcctttacctataattttcatttatgtccacatttctaaataacatatgtaaaatactggccaggatttcaagtcattaaaaatggagaaggggtgggaaacaactgagtggcaactacactagagaaaacaacttataaaaaagaaaaaatatggactataccagtctcctaaaaagactcactgactcagaatagaactaaaaatctatgccgggcgtggtggctcacgcctgtaatcccagcactttgggaggttggggcgcgcggatcacttgaggtcaggagttggagaccagcctgggcaacactctgaaaccccgtctctgctaaaaatacaaaacttagctgggcgtggtggcacacgcctgtagtcccagctacttgggaggctgaggcacgagaatctcttgaacccgcgaggcggaggctgcagtgaggagagatcacgccactgcactccagcttggcgacagagcgagactcggtcccaaaaaataataataattaaaaatctacttaacctgtaaaccggggtagaggcgcggatttcccagctgaaaccgactgcctttcactgcaaaggtctgttacatcccagcgctgcccaccacccaaagttaacaccaaaggagttcaaaactcctcaagagtggcccacagaaaaggcgggggacttcagggcttgccaagatcccaggagccggccaatcccgattctgcagactgttaggtcccccgacttttttgcacacctaccctctggtcaaccgaataatatcccctggctgtataagacctccgatctcatcccacacggaaatagtgatgctgcccgttttatctgctactttgcacgatctcacttcatggccgtctttggttttggtcacgcgtcctgtgaggatttaaaaatcaaagggaggggttgttagataatgaggacatccagaaaggctaactcctcctccggtattttaatacatctggaaggtgggaagtgaccaagcccagggctcccgcctcaggtaggatccgatctcgggcggaggccactagagccacgtgggtgggggaggggagggaggaggaggggagccccgggcgcgcagcggccggcgcccctgtctcccgccccgggaggcacagcgggcggtggagtaggctgcaaaccccacttacctatctccaggacaataaagacgacatttaagtttttcagtccgggcttaatatctcttataaaaataagtgggtcgttgaccctattcatattgggacaggcgcggctacggctgcggagacgcgagtgggcagggcggggtcaaagcttcccaccctcccgggacaggggcgaaggcagaggggcgaccttgggcaggggtggcgagagaaggggcagaaagccgttagtcagggaccgggcaaaccagcccggacagcactgagcctaaaaaaagaaaaaaaaaaaaaaaaaaaaaaaaggctcacaagttctaaagaaaaaaaggcgaaccactccgcacaccaaccccgctcccaaccgggcgacaggaaggcaagcgtactaactgccccgttctttggataaaaggaaaaaaaaacgcagtgaggggacacttctgccctgagtcccgctcactcacacgggcgcgcgcccagcctgtcccgggctccgggaaggaacgggctgtgacagcgaaacgggagcggagacagaacaccgcacacccagcgtcccaaacagcgactgatgaacacgcccgcgcgccggcaggaccctcggcccgcccctccccttgtgaagtcacgctgcgtcggcacgcctgctgccacgcccgcctggtgctggggaggggaagcaaaggggcgggacccggccgccgcagcccgcagagcttccctcgctcctccccgggggctgtcagcgcgggctccgccccctcgtccttccaatcgctctcggccccgcctcccccgccctcccgttctccacccacttcagctgtcgccgcgcagcagcagttctgttcggtttcgccttcctgctgtgcagtcttttgacgcttgctgtccaactttggagttttcttgcctttttttctctcagagttgagcccctgcccgggccctttagtccctcggtcacgaggaacggtagagtttagaacctgtgagtacgttagaaagttcgcagtcgaggaagaacagggttcgggcaagggcagctggtccggtaccaagggaaaacaggctgggatggtgaaggcgtcagtggctacaaggctggaagtttagcaccagaagggaatttggagatcaattcaaccgcctcatttcaggcatacttaaattgaaacccagaaagatgaggtaatttgcagaaggtcacccagcaacccctgagcaggcaggactgcaacacaaatgtctgacgtgggcttccactgtgtaatgctaagcagataggacgtaaattcctttgcagacttctcatttttccttaccccctgcctctcatattacacaccttccccatttagcttttcttcttttactttgcacttgcttttgtacatctaaaaggaattaattattcaacagcagtgggaacccttgaaacataatctggaaaaaaagattaataaagttttttttatgtcgcgtagtgaaaagagcatgtgctttagagacaaacctgggctccagctatttacttgtgagagctttaggtcaattggcttttattacagctttttaaccataataaaatggggatccctgcctagcagaagattgattaaatggatcataaattgtccaactagtgcctagcaaatagtacatactcagtattttcccctttttaatccccgttttacaggcgatggaactcaccagagaccagatagctagagaatggctgagctgggttttaaatctagtcaatcttgaccccagagctctccagcctaaaggtaatgtttagacttaacttccagtggtgtcattataagagtcaaaaacagactgaagaaataaaatagcagaataaagtagtggggcattaaagaatcatctagttaattcttggtgatgataacagaaatgttgggaaaagtgtcagaagccttaattttctccccattctttctgagtatctttagatcaaccaccacttcccaagtatttgcaaacaagcagcatagatattatagccctagaaagagttggaaacattatcacaacattagcaagagagtcaaggcatttttaaggaaacagaagcttccatttcatgaactaataaagcccaaggtgccaaagacactgatgtcatactggaaagtggtgtaaaataaaattataagcataatttcaacatcaaataaaacaaatgatgaaacatgccagttaatggcagagccagcgtccaacctcaatcccaatccagctcagaagctctaattctaccatggttatctggcaggacttgacacttcaattggattgtactcaaagctgtattttcttaaacaggcaaaatattctcacagaagcaatatttaaggcagagctctttttttttttttttaaggtttgacaagatcttcaaaagattaagaatagacaggaaaccaattaagaatgttaagagttacggccaagagtttgggcaaagaaagtttgccactcaactctcaatcatttgcccccagaaaagggattaggttgggctgttcaggctaatt

SEQ ID NO: 1880776 - DNA, 4001 bp, Homo sapiens; identical to SEQ ID NO: 3401

SEQ ID NO: 1880777 - DNA, 4001 bp, Homo sapiens
gctcctcactcacattgcaacatactctcaaatctcctggggatcttgttaaaatgcagattgactcagaaagcctgaggccctacctgagataagtggacccgacttttttttttgagacagggtctcactgtcattcaggctagagtgcagtggtgtgatcatggctcactacaacctcaaactcccaagctcaattgatcctcccacctcagcctcctgagtagctgggaccacaggtgcattccaccatgctcagctaatatttctgatattgtgaagacaggtctagctatgtggcccaggctggtctcaaacttctggcctcaagcagtccccccatcttggcatccccaggtgctgagattacaggcatgagccaccgcacctggccaagtggaccccactttcgggggcaagggcctggtgggtttggagccttgtgagtgccctgaccctcaacctgtgggctaagcccctcccaagaccccagatcaaggccacaatcagtgactgctcggctaagggatggctagtgccaggtacgtctccaccttagtgcaggctgccttgggtggttccccagagcgctgcagccatgcatcttgttaataaatcacactctcatgagaggtatgtatggcatcttattagggaagtcaactctgagcctcagactgtctggaaaattacctggcaagctatggccctcaggccacccaaagccagcaggctggggtggtatagttgcatcagtgggaccttgggccatgaggcagctggggggcagaggaggtcattctgaggagctaaaaaacctgcctaaagcctcccgtccagggtacaggcatacccgccacacactctgtgtttgtttattgaacaaactgccagggttcaggacatgccaccccaaaatatggcactttggcatttaagaaaacagcagaagcaggaaggcctcgctcaccttccctttgcccgaatcccctgaagtagggccatgaggccataagacccatccttacctctgaagacacagggacagagagaagaatctgaacaggctggccgactctccccggtttattaccccttccccctttagccaatcacttctccacgatgcccactcttcatgaaaccaacgcataaaaatacatgtccccatttctttgggtcttcatttccaaaggcccctgtgtcatgtaaaatttacatgaaataaatttgtgtgcttttctcttgttgacctgtcttttgttataggtgtcctagccatgaaccgagcaatgggtggggaaagattttacttttgtacttttcctcccctgcagaatgctaccgtttttgttgttgttgttgttgtttttgagagggagtctcgctctgtggcccagactggagtgcagtggcacgatctcggctcactgcaacctctgcctcccaggttcaagcaactctcctgcctcagcctcccaagtagctgggactgtggcgctctccatgatgcccagttaatttttgtatttttagtagagatgaggtttcaccatgttggccaggatggtctcgatctactgacctcgtgatccacccgcctcggcctcccaaagtgctgggattacaggcgtgagccaccgctcctggcccggaatgctaccgttctaagtccagaacttacctgacagtcctcatggcaactcctcaaaaaggtcctgtttattgtaatcatttccattatacacgtggggaaactgaggcacacgacagttacgcagcttgttcagctcactaggcatgacgtgacaggctgggattggcccaggtatcgtggctggagaccgtctgccttgcgcccctccacggccactcgccgcggagactccgccccttggaagtgccccctaattaggaatatctcctccactggactgcgcgggcacagagcaggagatttgtagataggcctaacttgctgctgagtgtcaggttgaggctgccccgcagtagatgtcacccgccagccccgctgcaaacctttgctctgagaggggcgggcccgtgccctcaagcgcggggcggtctccgctgtgcagagactgaggcggcccctgctggcggcggtcagtactgcaggaggcgccgagggcccgggagcccccaaagccgggaggggcgccccagagggaggtgagcggcgccgaggctcactataccgcagctcccacacacccgtctcccagggtgggtggtagcctcactgggacccctctgttgcagtcggcctctcttgcccagagccccatcactacacatgtcttcacgcaggttatctctcaagactcaacccgcgctccgggaagagcctggcacacgaggaagccactgctgccccgcgcccactccagcgtgcggcccagcgggaccgggagcccagcccaacctggggcactgtcaggcagcccggtccctcgtgggccctgccattaaggcccagggacgcctacctatgacacttgccagccctcatccgttccccgccgggccaaaatctcagagggcaggggctgccctgcctagaaaccagccccagaacatcagggccgcgggcgctgtgggcggtcggccagggcgcgcaggggccaaacagggcagcgttgggagcttttgcacaaggcacccctctgccagcctcatggcccagccatgccacccccgtgaaccaagtgtgctggcccacagcagcgctctgcacaacagccccagcctggaaacaagcgaatgtccactgctgtccacctcacactcagctgggggagctgaactgctcagatccccgggaatgcagggcccattccccggaggccaaggccagtgtcccacccacacccagtccaggcctatgcttccccgggtctgccgcctaagcagccctgtccctgatctctgtctcagaggctgctcccggcccagcttcccacaaccatcagcaggacctaaactgccacatatgcgcgccatggaatactgtgccaatgacaacaaattactgctacctgcaacgacgaggataaacctcacagccgtgaggctgatgtaagggaagacccaaagagcaccgcgtgctgccattcataggaagttcaggcaaaacccatccgtggtgttcgaagcaggacaaggctgcctttgggaggtagtgatcggcagggacacgggaagcctctggggagctggaaacgtcctgcaccttgatcgtggtcacacaggtgtgtagatgtacaaaaaaacccttccaatcggaccctcaaatcatacataaattgcgtcttcgtgttatgttggctaagcccttccagccctaacaatgtcgttctggcggagctggtgagtcagggagcatccacgccgcctgggaagaccggctctggaggctggagggcttgaccagcactgccacccggtggccggcagcggaactgaccacaggcctggtgccctggagggaatgggccacaaacgctccgccaggactgcacctgtgtcctaggcgccgccctcagccaccaagtcggcctgcctctcgagcacccaacaactccaacaagccctctggaccaatagctgcagcccccacggggccttgggggtgggagggaggagagggaggccagcctgtagcacagtaccagcccagagttattaacaggtctgtgctgtcacttccgctctgctgcggtcctcctgggtcctgattctgccgagcgcctccacagccttcctccctcctggttctccccgccagcagccagcacgggagcgcccactgggcatgaatggggagcctgccagagaggggagctgggggagagaggcacagcttccaggcctggcgtggctgctcatgcctgtgcgtgagggaagggtcaagggaaaggtgtgccctctcttcttttggtttcttgttttcctttttcccgtgccccctcaccccatac

SEQ ID NO: 1880778 - DNA, 4001 bp, Homo sapiens; identical to SEQ ID NO: 3423

SEQ ID NO: 1880779 - DNA, 4001 bp, Homo sapiens
aagataacttactatctctgtattaccctaaaaggatcttgaagagttatctgtacactcatgtttgaagcagtattattcacaataaccaaaaggtggaaataacacaagtggtatatacacacaatggaatattatttagtcttaaaagggaaggaaattctgacacatgctacaagatggataaaccacaaggagattatgctatgtgaaatatgccagtcacaaaaatacaaatactgtatgataccacttacacggggtacacagtcaaattcacagagacagaactagaatggaggttaccaaggctagctggaaaatggcgaatgagaaattgtttaatgggttcggggtttgttttgcaagatgaaaagaattctggagactggccgcacgaggtaaatatacttaatactaacgaattattcactcaaaaatggttaagataataaattttgttgtgtagataaaaaaatttaaaaatcgattccatctttctcatcaaatcttactttttactctttgtttctttttttcccatttcagttagattgctctcttcattgtacttccagtatgcctcttgagcctttgcaccatggtgtttcttctctggaatggtctttcattatcacccatccattttcaaaaggttgcatgtgctttcgttccaaagacattagtttatagatccaaccaggagtcgcatcctccatgtcatccctactctttcaaatcacatacctctaccttttctgcactacacagaagggcctacacacggctttcatactttagcttagcctctccgaccatacctcctaagaccctgaggatcagggggcattatctcatagttctcccgcacttctctcccatcccaacacatacactagcaaggagctccgcacacaagctcctccagtaaaaacaacgcactgggcagtgcatctcaacacatcaaattaccggcgtgcataggagcctgatgcggcaaatctgtgggtccttcgggatccttgaaggcagccctataatttgcatttttctacgctccaaaacactttccgggccagatgcggtggctcactcctgctgtcccagcactttcgaagacccaagacggcggatcacttgaggtcaggagtttgagacaaggctgggaaacatggtgaaacccatctctacaaaaaaatacaaaaagtagttgggggggggtggtgcacgcctgtaattccagctactcgggaggctaaggcaggaggatcacctgagcctgggaagtcgaggctgcagtgagccgtgatcgcgccactgcactccatccggcctgggcgacggcggtgagaccctgtctcaaaaaaataaaagccaccactttcccacttattatcccagggaaacgcacgcgacggaggagcgaaggagcgtttatttgtggaggcgctcaagtaagaaaccctgctcgctggccgactcaagggtctccaaagccttctctgggctgtctcccctccccaaaaggcaaagaaccgttaacaagtttacttccggcacaagcgtccgcgcctgctcggaaaagggagcgtggacacacagctctgttacgggaagtcgcagggcacaatttccttcattgcagtcgccctctgggcggacgccctaacccagaagtgaaagaccgtttccttcgagtatcagacccccgaccaaaggaagttccacttggacgacttttacccagggtttcccgattcctctttagctcttcctatcacgctccctgcttgctggtgcattgttgctgtggccacttagttccgaccttccttgtctaactcgagttttgtcgcaactttccaaggggcctaaccacaaccttttccgtaaaaaaaaacaaaaacaaaacctttaccctacgggtccccatcagggtcaactaacgttctccgtgaggggcaaagctcccggggactttacgccagcgaagcctaacacggccaggccagcgcctgcgcggggcgttaccatagagaggcagccgcctctctggtctcggtttacgctctctatggtgtacccgggttggtggcggtaagaagaaaaagggtgaccgcactgcgcaggcgccctcggcgtctctctcgctctctcggtcttttttttttttttctttttttttttttttaatccccgcaccaagcgcttaacctcattggggtggaggagaaggcggcggctctctggtccgcagcggcaacagtaacgaaaaacagggctgtaagtacccggtcagggggcggagggtcagacccgagccctctcgcggccctggcccctcccgcgcagtggcgggcgccgggtctgggtgggggcgatgtccagcgctgtcatcggctcttgggtgcactttggggggatggggcggccctgaggtgggagcctggcgaggagcgggatgcgagggttgtttatccaaccagtaggtcgctgagcccaggctgctttgcagagggaggggatcggccctggggtcagtcgggctttgtgtgcccctctctgtttcccttttccagaccccacccgggcccccttcctaacccgagtctcccctgccgggtgggagaagccagcgagcccggggcgcgtttgaaaggaagggagggggcgagggagagaaacccacaacaactagtcattggcgagtgatgggtgtgaagaaagatccagagagaaggggtgccgggaggcgggcggcccgggctcccgtcctgggctcccaaccgggccagacaaaagctgcgcgagcggcgccgagcggagcggccggcttgatgggatgcacaaggtccccttggttcccggggccttcgaagagcttctttctgaagctgggaaagcgaacaagtgctgagttaagcctgtgcagacttctcaacttgcctttgttgttctttggtattggcagagacgctctgacgaagatgagtgtgtgatcttgcacgttagcctggctaggtacaatggagctaatcgaattttgctttccgttttccgagctgctgggatgagtatggggctttccagagtttaaattattacataatatttttaaaatagttgtttgcttctaaaattaaaaaaaattaatgtggagtctgaaagcacgctgtggtgagtttgcagctgagtttgcagctgggtgagtttctgtgtagtggggtgcgttcattaaatactgaccattcgtagaacctgtgagctctttaaacatgatactttcatttgtagatgtggcaatgagagcttcagattctctagtcctttgggagaccgtgatgcagaagagtcagaagcgagaaatagtttcatgccgccatgtaccttggaccctatttgggtgccacagtccgttttcaattctggcattagaaattgtttttattactacgattatttacgacggtaactgacctctcgatatgagggatcctggatattggctccgtttgctcatcaagggattgggagaatagcaacattgatgttgcgaccatatagataaaaagtagcacagtgcctcagagtattgaatattatttattttttacatttgttaagaaatttaaattttgatgatctggttatcttgttaaattgtgtaatacacctttttagcagttgttactgaaatctcagtttctataattcattgtttattatgggctaccttgtaacaccattttagacttctaaagttttagtttttatgaaggagttttcagccatagcttttaattctcccaggtaaggttaaccaaagtcaggactccttagaggagactttgttggtggtggaggtgtcaaatattgtatctctgtgttacaactgaattggcaaatacagaaaaggcttttgctaagttttcaccataaatttgtgttagaacggaaaacccagatctcctagtatgtcaggcttttgaattaacccacag

SEQ ID NO: 1880780 - DNA, 4001 bp, Homo sapiens
ccacttcctgggttcaagcatttctcctgcctcagtctcctgagtggctgggattacaggtgtgtgccaccgtacccggctaatttttgtatttttagtagagacagggttttaccatattggccaggctggtctcgaacttttgacctcaagtgatccacccacctcggcctcccaaagtgttgggattataggcgtgagccactgcgtctgtccccacaagctattaaaattagggtttttctttttttgtttaagactagccaagtgcagtggttgagaagtggagcacaaggagaacaaggagtttggtctgtaactggcagtgaacaatcaagataacttactatctctgtattaccctaaaaggatcttgaagagttatctgtacactcatgtttgaagcagtattattcacaataaccaaaaggtggaaataacacaagtggtatatacacacaatggaatattatttagtcttaaaagggaaggaaattctgacacatgctacaagatggataaaccacaaggagattatgctatgtgaaatatgccagtcacaaaaatacaaatactgtatgataccacttacacggggtacacagtcaaattcacagagacagaactagaatggaggttaccaaggctagctggaaaatggcgaatgagaaattgtttaatgggttcggggtttgttttgcaagatgaaaagaattctggagactggccgcacgaggtaaatatacttaatactaacgaattattcactcaaaaatggttaagataataaattttgttgtgtagataaaaaaatttaaaaatcgattccatctttctcatcaaatcttactttttactctttgtttctttttttcccatttcagttagattgctctcttcattgtacttccagtatgcctcttgagcctttgcaccatggtgtttcttctctggaatggtctttcattatcacccatccattttcaaaaggttgcatgtgctttcgttccaaagacattagtttatagatccaaccaggagtcgcatcctccatgtcatccctactctttcaaatcacatacctctaccttttctgcactacacagaagggcctacacacggctttcatactttagcttagcctctccgaccatacctcctaagaccctgaggatcagggggcattatctcatagttctcccgcacttctctcccatcccaacacatacactagcaaggagctccgcacacaagctcctccagtaaaaacaacgcactgggcagtgcatctcaacacatcaaattaccggcgtgcataggagcctgatgcggcaaatctgtgggtccttcgggatccttgaaggcagccctataatttgcatttttctacgctccaaaacactttccgggccagatgcggtggctcactcctgctgtcccagcactttcgaagacccaagacggcggatcacttgaggtcaggagtttgagacaaggctgggaaacatggtgaaacccatctctacaaaaaaatacaaaaagtagttgggggggggtggtgcacgcctgtaattccagctactcgggaggctaaggcaggaggatcacctgagcctgggaagtcgaggctgcagtgagccgtgatcgcgccactgcactccatccggcctgggcgacggcggtgagaccctgtctcaaaaaaataaaagccaccactttcccacttattatcccagggaaacgcacgcgacggaggagcgaaggagcgtttatttgtggaggcgctcaagtaagaaaccctgctcgctggccgactcaagggtctccaaagccttctctgggctgtctcccctccccaaaaggcaaagaaccgttaacaagtttacttccggcacaagcgtccgcgcctgctcggaaaagggagcgtggacacacagctctgttacgggaagtcgcagggcacaatttccttcattgcagtcgccctctgggcggacgccctaacccagaagtgaaagaccgtttccttcgagtatcagacccccgaccaaaggaagttccacttggacgacttttacccagggtttcccgattcctctttagctcttcctatcacgctccctgcttgctggtgcattgttgctgtggccacttagttccgaccttccttgtctaactcgagttttgtcgcaactttccaaggggcctaaccacaaccttttccgtaaaaaaaaacaaaaacaaaacctttaccctacgggtccccatcagggtcaactaacgttctccgtgaggggcaaagctcccggggactttacgccagcgaagcctaacacggccaggccagcgcctgcgcggggcgttaccatagagaggcagccgcctctctggtctcggtttacgctctctatggtgtacccgggttggtggcggtaagaagaaaaagggtgaccgcactgcgcaggcgccctcggcgtctctctcgctctctcggtcttttttttttttttctttttttttttttttaatccccgcaccaagcgcttaacctcattggggtggaggagaaggcggcggctctctggtccgcagcggcaacagtaacgaaaaacagggctgtaagtacccggtcagggggcggagggtcagacccgagccctctcgcggccctggcccctcccgcgcagtggcgggcgccgggtctgggtgggggcgatgtccagcgctgtcatcggctcttgggtgcactttggggggatggggcggccctgaggtgggagcctggcgaggagcgggatgcgagggttgtttatccaaccagtaggtcgctgagcccaggctgctttgcagagggaggggatcggccctggggtcagtcgggctttgtgtgcccctctctgtttcccttttccagaccccacccgggcccccttcctaacccgagtctcccctgccgggtgggagaagccagcgagcccggggcgcgtttgaaaggaagggagggggcgagggagagaaacccacaacaactagtcattggcgagtgatgggtgtgaagaaagatccagagagaaggggtgccgggaggcgggcggcccgggctcccgtcctgggctcccaaccgggccagacaaaagctgcgcgagcggcgccgagcggagcggccggcttgatgggatgcacaaggtccccttggttcccggggccttcgaagagcttctttctgaagctgggaaagcgaacaagtgctgagttaagcctgtgcagacttctcaacttgcctttgttgttctttggtattggcagagacgctctgacgaagatgagtgtgtgatcttgcacgttagcctggctaggtacaatggagctaatcgaattttgctttccgttttccgagctgctgggatgagtatggggctttccagagtttaaattattacataatatttttaaaatagttgtttgcttctaaaattaaaaaaaattaatgtggagtctgaaagcacgctgtggtgagtttgcagctgagtttgcagctgggtgagtttctgtgtagtggggtgcgttcattaaatactgaccattcgtagaacctgtgagctctttaaacatgatactttcatttgtagatgtggcaatgagagcttcagattctctagtcctttgggagaccgtgatgcagaagagtcagaagcgagaaatagtttcatgccgccatgtaccttggaccctatttgggtgccacagtccgttttcaattctggcattagaaattgtttttattactacgattatttacgacggtaactgacctctcgatatgagggatcctggatattggctccgtttgctcatcaagggattgggagaatagcaacattgatgttgcgaccatatagataaaaagtagcacagtgcctcagagtattgaatattatttattttttacatttgttaagaaatttaaattttgatgatctggttatcttgttaaattgtgt

SEQ ID NO: 1880781 - DNA, 4001 bp, Homo sapiens; identical to SEQ ID NO: 3437

SEQ ID NO: 1880782 - DNA, 4001 bp, Homo sapiens
ccattaaaaagggattgtagccaactgagtttgcattttcacctaatttgtcaatgattctaattgagtctttaagcactcataaattctcctctacctaactggaggtgttgatccagaaacagcatgtttcatttacaaatgcacaagcgccccttacttcagccataaggacatcaagagtttgtctattttgcatggccactgaggccagagaatttatggactgctcttgggcttttatggctcctacagttacctttcacccttgttacatcatgatagaaatattaagcactgatctttcaagaaggggaacaccgccaagccaaaataggcctctggctattgcatattttattccgtttttctaatataggattgccatgtgcatattcttgccagttctctctctttcattttaatctccatatgatggcatagagataagtgatctcctgttttggtatgtgtgatggaatgcactttctgtaaaagagcccaaattggcgatgtcacccaacaatgctaccctgtcagtggggtttaaaaataacaaattggggaccattgccactatagtgcatgttcctctccagcgcctggggaggaataagcatagcctggagccacagagaaagtaaagccctgttccctgaagggatggttctatgttgtgatttatgagggttccagctaagtttagtccaggccttataaggttgccttccctacatctaattcaagcatctttagaataaggatatccatacttagtatagtcatccacagtattgtttggaactttacatgctgggagggaagaatctgtttggcaaatatagttttgaaagatcagagacgcaatatgttccagccagtatcttagacaaccctccttacagcggctattggcccagacatcccctgttcattcacaaatctgcagatcactgtcattatcaaatatcatacaagggtccaggattccatgtgtgggcatgtttgggaaggaccatgtgctatttattacctgataataaggttggcgaggggtggcatttctgcccggggtagacattcccattgggaactccacctgggaggtctggctagattgttaaaatttttccacagtctctcccaatgtttggtgtcacccttgttccttcttagtctccagatctctgtgctctcagcaattacaagcatactgttgcaattatttaaggtttcccgagtatggtccttttcctttactcttaaagcagagacaggcattggctatcattctatcaacttcacctagtctaagggtgtgagttttaccatcaggaggtgtgtctttctgggtggagttaaaaatgctcccataccatgttccctttatacctattaggtccttaatgatttaaggtaaagccatcagagggaaaccctaagatagtgagttctgaatcatcaaagagtccattggtgttattaaactgagtaaattgttcagggcaaacccagtaatcagtcttgttgtagagatcggtaatatctgatattgtaggagccaaagaatgtgaggcattgctacatctaacagtgaatgctagtaaacttgatagtaacaaaatcttcatgtttatctcttgcctgtgactactatccctgctatatgaataataactaagcaaaagattatggcaattgagactcttttcccaatattccacttagaaggtgccacagtatgcagtcctactgcaaagagcaaggtgagtacaacaattcccatatgtgtgaagtaataaagttccactttaaatcttactcaccgagatatataatttcttcgtgggggtggtttatgaggttatgaatggaatcccatggataatcaaaatctccctgtaagtatgtgacaaagagaagttctaatatctaacagcaaatctcaagaggaaaggtagaaatgactttagtatctggtaaggaagggtgggattgaactgaacagagagttcccactcatttacttatcttttggattttcagtttgaaatccccagacttttcacactgatatctgagatgttcttctgggatgtcaggggtcattccaggccttgactcgagtgtgatgaatccaagattccagtcccacaaacttcactgccgagcaggtggagagaaggatggtataaggttcctcccagctgggacctagagaggggaaaagagaggaaaaatccttcaccagtaccaagtctccttggtagaacagaggtggccctagttcttggggttggaattctgataactgttttaattcctgctagaactgggccagggaggttacatgtttaaccaattcagaagttctctgatgtaatataaaatcattggtaaggaaaggccgtccatataccatttcaaaagggtgaaggaacaccccttcaaccccaaatttgaaggggtgctcctcacctgcactaaggctataggaagataagcagtttagaggaggtgagtttcttgagaccacttcctgaggtgtctcttaatgatatcatttgttttctccaccttccctgaagactgcagtcttcaagcacaatgaagatggtattgtatgctcagtgcttttgagaccccttgggtaacagctgccttaaatgaggggccattgtcactttggaggtatttagggagtccaaaacgaggaattatttcattgactaatgcttttatcaccttagaggactttctgtttgacatagaaatgcctctacccagctagtgaaggcatccacccacaacaagaggtgctgaattccccttatctttggaaaatgggtaaaatccatttgccagtcctcccctgggcagtttcccattctttgtgttgctggggatggggagatgccatttgttgaggggattgtttttgaggcagatcttataagcattaacaatttgtttgactgtttttggtagatatttacctgagaacaacctctgggctatttgatgagttttattctttcccaagtgaaaagtttggtgaaggatcttaagaactttccactgactggagactgacaaataacatttgccatcctctgattgtaaccatcctgagggctgaaaagtgtatcctcgagaggtggcccattctatctctgcaggagaatactgaggctttatttcccttatggagccctcccaaattagacagccttcaagtgtgctgggactttggggtcttcttactgctgacttagctgtttggtctgctagcctatttccttcagctatttcatccatccccttctggtgtcctttgcaatgtatcattgccacttcctgcagaaggaaaactgaggacaacaatctatttcctaatggtatttaataaaagagccattagcagtcagggagtgtctttctttccaaatagcggcatgagcatgaagaaccaggaaagcatacttagaatccatatatatgttaactgccttagctttgcttagttcaagcaccctcatgacagcaattaactcagctaattgagcactgtacctggtgaaagaggtgtgcttttaatgatgtcatccagggtgactattgcataccctgccctacaggttccttgttctataatagaactttacttgtaaagacagcccagtctcagttttctagaggagtttcctggatgtcctctctggctgcataggtttgcatcactattttttcacaatcatgttcaggttctccaatttcatctggaaggaaagtggctgagttcaggaaaggacaggcctttaactgaactgcagatccctccagcagcaaaacttaatatttgaggaggcgattatctgttagccagagacttcctttagaggataacagtccctttacattatagggggtgtaaacaatcaggtcattcctcatgctcaacttagtcacttctggcaccagcaaagccaccactgcaactg

SEQ ID NO: 1880783 - DNA, 4001 bp, Homo sapiens; identical to SEQ ID NO: 3454

SEQ ID NO: 1880784 - DNA, 4001 bp, Homo sapiens
aatatcgaagtaattgtacagcacccctgtgatattcttcctcatatccagaaaggaaaagaatgatgttactcccaacagcctaggaaatgtatacccgcgctgtgatatctttcccaatatccaggtggggagaggatcatattacttccaatgtcgcagggtgtgtacaccccctctgtgatcttgtcgctcacatccaggtttggggaggacgagattactgccagtattgcagggggagtacactcccccgtgaccttgttagtcatttcctgggtggagaggatgatattactcccaatatcgcaggggtgtacacacccctgtgaaaatcttcctaacatccagagggagagaggatgatattactcccagtaccacagggggtttacacagccctgtgatactcttcctaacatccacagggagagaggatgatattactcccaatatcgcagggggtgtacactaccctgtgatattgttcctaatatccagagcgaaagaggatgatatgactctcaatatcgcaggaggtgtacacccctcctttcctattgttctgaataccctgggagggagagggtaaggttacattgaatatggcagggaatgtacaccgtccccctctgatacccttcctaatgtccaggggaagagaggaaaattttactcccaatatcgcagaggcactacaccccacctgtgatgttgttcccaatatgcaaggggagagaggatgatactactcccaatattgccgggctgttcacatctccagtgacatttttcctaatatctaggggagagacaattatatgacagcaaaggtcgcagggtctgcacatcccttcctgatattgttcctaatatccaggggggaagaggatgatataaaatatgaaagggggtgtacaccccccacccctacgatattgttcttaatcttcatgaggggagacgatgatattactccaaatatcgcaggggttgttgacacccccctgtgatattgtctctgatatccgggggggagaaaatcttattacttccaatattgcaggtggtgtataccccacctgaaatatggcaccgaatatccaaagagggagaggatggtattaataccaatatcgaagtgtgtgtacaagccccttgtgatatggtttttaatatccagtgggcgggaggatgatattagtcccaacatcccagagggtgtacaccacccctgtgatactgtccctaacttccagacgggagaggatgatatcactcccaatatctcacaagttgtacatcccccgtgatattgttcatcatatccagggaggcaaaggatgacattccattgaatttcacgacaggcgtacatgcacagtgtgatattgttcctaatatccaagaagggagaggatgatattactcccaataaagcagtgggtgtacattacccctgtgttattgtctctaatatccggggccgggggaggtggggagaggataacattccctcaaatttagcaggtggtttgacgccccttgtggtgctgttttaaatatccagcggggaagacaatagtatagcactatttttgatagtccgattcatccactccacctttccggaactctgaggctgggaggcggcatgcagtttccgtgtgatccccaatacctttgccgtcttctgtaccatggcagccaaaaacgcaggcccgttatgtgagccgatccgtaagggcagtcgaaatctaggaatcagatctggaagaagcacaggggtttcttggccagctttctcagttcgtgttggataggcctccacccacccagagtaggtacacccaagaactagtgaatacttgttacctccacactttggcatctctctgaagtctacctggagatctccaaagggggctgctccataagcttgtatgctgggcggaacggctggaccttgcctcacattatgctgtcggcaggtaacacaccgctgcctcaccgttttggcaagggctgacaaatgcgaggtgtagaaataccggcctaacaacttttccagtgactcctgacctacatgggtggtttcttgcacagccagtacaactgcagctcctagcaactgtggcacagctactctcccatctggtaaccgaatccatccttcctccatcacttgtccttccctctacctggagacagtccttttcttctttagaagaagtaggtaggtccaagatcaggtgtttgagggagcactgatgcccggaagagggcagatgctgcttttcgagcctctgagtcagcgtgggaattccccaaacccagcaaggtggaagctcgctggtgtcctctgcaatgcataactgccaccttgtggggtttccatactgcttctcataattgcaagatttctcgttgatattttctgtcttttcccccagagttcaataggcccttttctttctatcacgctccatgcacttgaaggattaaaaagacataccgagaatcagtgtaaatgttgacagtctcaccttcactgagttctaaggccccaatgaaagcaatgagttcagctttctgggctgcagtggcctggggcaacgatctggcttcaacaacagtgtccagggttaccactgcacaccctgcacctctctctccttgggggttgaagaagctgttcccatccacgtatagttcccagtctactgatgcccaaggctggtcccggaggtcaggtctgctagagtcaactgagtccaacacttctacacaatcaggctcgacagggctctctgataccaggagcaaggtggcagggtgtagagtgttacaaacttcaatggttatacagggattttcacagagcaaagtttggcacttggtgagtctggcattcattagtcaatgatgtcctttagtattcattgaagtcaccacagcatggggggcctttatgttcaggttttgcctaagagtcagcttatttgcttcttggactagcagggcagttgctgccaaggccctcaaacaggggggccatcctttagaaaccccgtctacttgtttagagaggtaggccaccagcctcagccagggccccacactttgggttaaaagtccagctgccatcttttctctctctcaagcatacaatggaaaaggctttgtcagatcgggtagccccagggctggggctgccagaagttgttcctttaactcatgaaagacttgctgttgttgggatccccattccaaaggttcccggtccctgccccctttgtgacctcctacaaaggcttggctaatactgcaaagtttgggatccacagtctgcaaaaccccacagctcctaagaattctctcacctgccttctgcctttaggctcgggtagattgcaaatgacctgctttctttcttatcccggcctccgttccgacccctgtcggatagtaaatcccaagtaaggtacctgctgtcggcagatctgagctttcttcttggacaccttatacccacagtcctccaggtgccggtgtagggcatctgttcccttggtgcacccgactgccgtggggtgtcccagcagaaggtcatcaacctactggagcaacatgcagcctaggtctctggtgggaaacttctggaggtcttgagccaacgcctccccgaagatggtgggggagttcttgaacccttggggaagcccggtccaagtgtacactactcagtgtactgacacctgactccggatcttcccactgaaaggcaaatagcttctgcctctcaggggctaatctgataggaaagaaagcatctttcaggtccaagcaggtgaaccagctgtcctcagctggcagcaaccccaacaatgtggatgggttaggtactgttggatgtaaagtcagtgtagcttgattaagcaagcgcaaatcctgtaccggccggtagtccttggtccgtggcttgggaacaggcaggaggg

SEQ ID NO: 1880785 - DNA, 4001 bp, Homo sapiens; identical to SEQ ID NO: 3463

SEQ ID NO: 1880786 - DNA, 4001 bp, Homo sapiens
ctacaaatggaaagctagacacacaatatctgagaccaaataagcatatctagattcagctggaactctcgatttatgttgaacttacataggccatattttttgagaatgcccatgagtggcattctaactatctgcataaaagtacagacaggcctcagagagcatacatgcctttcccccaataaccctctcctatgttacaatagagaacataaaaaatgtatatctttgctaaatacatgggacttgtataagtgccactttacatatattcggtcaagggaaagataaaattccatactaatgtgccctagagttctcctgtttcacataataacagcattcggactcaacactggccaagagtgcctagacgaggaatctaccaatgatagcacacacaataggatcttgcttgtcttgacagcacagaagagcattgggatatacttgctgaacataattggaattgtaagaaaaataatacctgatgtgaaaggttttatgttcaaactggattccagtgtataacagaaataagctctgacctctctaaccgtatgactaatttttcttaacttttaggttttaatttttcttttttcccttgtttaggccaacagtgcaccctagagaaaatgtgagttattttctcttctagcagttaagaaaacagactccagtgccagatgtcctgacttctaatcctagctttgcttttcctagttgtgtgacctccaaagcacccaaactctgtggcccagttgcctgtaaaatgaggacagaaactatttcatgggattttgaaagaaattaatctacagcaggtgcctggtacatagtgccactttatcattattgttacacataaatgaaatttttgaaaaacataagttccaaataaaaaacctcaaccatattctggtaattatttacttatttatctgtatccacctctagactgtactctgtggcttcccaacatgttgttatgggatttactcatcttttatacccagagcttcacaacgtgcaaagtgcaggtatatatgccagccctgtacaacagtggattctaaggtccttgcttactaaaatcttaaataccagcaggggaaaagcctgactcttggaataaatctgtccaatgttcaaaacaaagttcacaaaccaataaaagaaaaaaaaaaaaaaaagcaggtgcaagactttgaaaacataccatgctgaatttcatgtacatagtaaggaaggacaacataatgcattatgaaaataggatggtttaaggcaactgaatatttaccacagccttttttttttttttttttttttttttgagacagagtctcgctctgtagctcaggctggagtgcagtggcgcgatctcggctcactgctacctccgcctcccgggtcccagttcaagcagttctcctgcctcagtctcccgattttttttttttttaattgtaaaaataagccagcccctttcttcctagtgaagtgggagaaacggtttacactgtccgatgagaaacacttccgttctttggtaaccctgctagggggcgccgctagattccatcctatttctccgatgaaagtatcaggtacctcacccctaagtttagatttgatgatagttcccttaaaaatgaatgacgaataatctaccccatccttttctcacagtagcaaccaaattccagccaagggcaaaaaaaaaatttctttttaatgtagcttagtgtttggaacttgatgttgtgtagtcagacaaacctgtattcggcctccgctggatcagtcactagctgtgtaattttacagaactctcatcacctgcaaatctgggggaaatgcaggtgcgcacagagagcgttttgggcaaagacggcctttaagcttttcttcactaagcatgccgctcgctagcggaacagcagccagctctggacgggaccttgcacagttccgatgacatcacttccgggcgccaggttcgggctttctcctgcagcgataagggcagtcgacagtctttagtagggaaaggagacaagtgctagctactgccgcccaagtggaaggtgggtgaaattgctcactcttcaccccactgacgcttttgcgcacctggaaaagcggttccagtttgcgcccgtcgccgccttacagccgacaggagaccagcgctacccaagtcacgtgggttcagcctgcagctttcttggcccgaaagggtagtgcttcgtacaatcctccttgtccagattttgttaatgcaaatctaattcctctaggttgtgtctgtctgggctgcactgcccgcaactgccttctgcaaataggtcgctcatctctaatccctgggatgccgtgtccctttagtgtggtggagaaaggccctgctttaacacccagaaagttttagaacggatgatctgggggcataaaattaggtgcttcgcagtgtgaaaatactagtgtgctttagtgatgggctgctattattttgggggaaaaggatttgggaagatccttgttatgacaaaacctgtagcaaaaagtggagatttaattccaaagattgcaattaaggataaaataggtgttaggttgcagttggcgtgtgtgtgtttatgttaactcttgtttttgaaccaaatgatccagttttattttgaaagatgtttttaggagatggaatacattaacagtatttttatctgttccatctgcctttgttgtttgattctttttagaaaatccacattttgtcttaattttagctgtcaaaaaataaatagcacttttcagaggactctatcaattattgtactttatattagctgtcttaatagtaagtcttttggtaggaacagcatgcaagtaataataatactaaaaaattttatatctgacccctgttttcccccttggagaacattatattcattcataatattatttatattcccatgttgctatagcctttacaaacttttggtgacttttacaaactttcctgtaattctgtaaaactatatattgaaaaataagctggctaatgtcagttgcaaataataagttgtttctgtaattctttttcaggaattatctatagagtaagtatgctaatcttgactaagactgcaggagttttttttaaaccatcaaaaaggaaagtttatgaatttttaagaagttttaattttcatcctggaacactatttcttcataaaatagtattgggaattgaaactagttgtgatgatacagcagctgctgtggtggatgaaactggaaatgtgttgggagaagcaatacattcccaaactgaagttcatttaaagtaagtagacattatcttagtcatttccacttttttggaaaaagtaaaatcattcttttgtatttgtcatatataaaagttttcaggagctactgtcttattcctttttgcaaacacttttaataactgctatagaaaacctcaaacacttcatcctggcttttaagggtcttcacaataaggtcccaaccttaactaatcctgttgccaaaagaaactgagctcattcccagcttccgtatttattgattttccttcagtaatgcattccttcttttctccacttctatgtttcatggtctcagctgaagtcctaggaaaactgttagtcattgaaaaaaaaaatcctattcatatttatacatataacttgtattagtacttaaataataatacactgttgtattaaagcatagaatggtgcaaggattataaactgtgatgtttatagaggactaccaggcaggttacctaaataaatggacaagataaaaagtggaaaatgtctggaggaggtcactactcagctctagccagttgtcatgtgggaatgcaggacctgtgttattagattattataattttcaagggaaaatggaaatccagattttttttttctttttttttggtgagacagagt

SEQ ID NO: 1880787 - DNA, 4001 bp, Homo sapiens
aaaagtttttgaccttggacatgaacagcaagctgcttcctggtaacctgtggatgtgctttaagatgctgctgaggaatgagaattcctgaagcatatttgtactgtggaatgatgtagaccgcaggagtggagccagcagcagcagctacaggacatggactaattgtctgtattgatgagttagcaacatactgtgtggacatgactggtggaacctgtgaagaagctggtctcagagtggtggttacgagcagctgagcggatagcacaggtcatatttggaatggataaggtctgacactctgaacagcccagggaggacttggtcttagttgagcaatttggccaggaggatagtatgcagcacggttctgggtctgtgggatagctgctacgaagtaacatgtagaaggtgctggctggtaggggttgattacagggtggggcacagctcgtacacttgccatcttctgcatgtattggttagtgaagtgagccaggcgctgttctttgcactgagctaaagctacatgcaatggcttgctggccacaattttaccgttcattgctgtaactgctttagctacttcttctggggaggagaaacatacaaagccaaaccttttgctgcaaccaccctccatcataacatttgcactattgattataccaaatggagaaaattctttctggagacgttcatcatcaatactctcatcaagatttttcacacaaacgttagcaccctggtatctggtgattctatcttgcttcatctgttcaaatttgcacttaagttctgtctgctcttccacttttttcggagctagacaaatgtaagtttgatttccactgaactcctttccattcacatccatagctgtctgtggatcttcatgcctttcaaagcttacaaatccaaatcctttggattttccaccttcatcagttattacttttacacttgaggcaggtccaactttggactcttttgccctagctccaagttctgcttcttgttctttaggagacctaaaccgtccaacaaatacattgagaccattcaggagcatcccatccattttttcaatagctccttcagctgcttcctgtgtctcaaagtgtacagatccacagcccttagaaccattttcatcacaaactaccttacacgaaaggaagttaccaaaagcagaaaatgcatcacacagtgctttctcaacggatttgtcctggtttttaacgaatacgttgcccactccacttttgcgcagcgatagatcgcgctgagaccacaggacttatactggcttgccctttataacatcaaagttcatggtggccagagcacgctccgcgtctgccggctgcaggaagttcacggacacgtagcccacgaagaggtgggtgagccagtccctaaagacccggatggtgagggtggacctgtcgagctaaacttctcttggaacatcaattcagtcacgtcggggtgcaggtcccccacatacagcgaggccatgtggtagctgggggcgctggggttcatcgcggcacggctgcccacagggctacaggccgcgaccctttcgtgacaggaggagagcgagtgccgggccgggggtctcgcagccgggggcggggagcaagggcacgcgccgagggacaaaaatcatccgaatcagaaacaactcactggccacagagcgaggtcgcttgtccgccgctgtctgctggctgccggtgtccggttcgggcggcgggaaggcctgggtctcgtggttcctccttacggctgctgcagggccgcgggtggggtcggttttggctgctgacagggttatttaataaaaggggaagaaaaaatattatagtaactctctggaggagtagatgccgatttgaggggatatttttaaaagatttttttagacttttcttgaatttttagtaaatgcatgttgtcctcagcctcagcactaaccgccagggagaaaggctatattcaagtttttatgtcaagctaattagttcctctgatcaaatatattttatcccggtttatttacttagtatgtagatgtcaaacactaaattagttggatgacaaacattgcagtttttctttttattgagcttatggaataaagaaggaggcagtatcataaaacatacgaaatacatgttaagtgcaattaaagggcggcataggagttcagaggcgtctaatttagctaatgtttgtaggcaaggaagacttcccaatggaaaaagattcctgaccttgaatattgaagaaacagaagaattgacccagtaagactatatcaaaaggatcctacctgcatttaggtttccataaaccaacaatccacctagctagttcctttccgttcaggacactaggccagatttctttgggagaaaaatcattgagcttcttcttcccccacaaaacacttagagtcaatgtgggactctagctatattagtaatagggagttcaaagcccatgaggttagagatgatttgctttattataaatagccatagattaaaatcatactaatttcccttctttctctttataaatatgtattcacaatgcctacatacagaattaacatgtggttattaaatgacaatgggaaacaagaaatttagaaatttacctattcttttactatatgtttacataaacataaaaataacagaaatttttttttaatgttccaggtgcttttcttaaagttttaattttccatttttccctaaaagcatgacaagtaattttaaaattaaactataaatcatttggtattatagtctctattaatgattcaatttccagattagattgtttattataatatgccaacctaaggtattaatcaatgaatatttgtttattggttatgcttaagaattattttcaggagggtaaatctgtgcctctgaggcaaatattaaatagacgtgtcaaatattttatttaacctgttaattaatgaatggaccaggaaagttaaaatcagttcaaataacatttgatgaggtaggtatagaggtaattttaagaaaacatattagggtgagattcttgggttagatataaaactagttaatgtctttctgggcaataaattgtaactttcacagttatctcttcattggagagaaatgatttgcatatttacctgagaaaaatctgtacattaggttgtgttcctaaagagttgtaaattttgaacagcaaatagaaaagtaataaaagagcacctagtaatctattgcttgtttccaaacttcaggtgatttttctaatagttatatgtaggcacttctttaaagacattattctaaaattctgtcactacactagcacctaagtgtggtttgattaaattggtgagtcgcttcaatactataccaaagtagacagtgttcttggtttttatgctaaattggctgcttacaatttttggtttggtcaagatcttatttgatatgaaattttttaaaatacgcttcctaaaaatggtctgatagatctaggtgtattattctcattaaaagagaagctaaaacttaagtcatagtaataactattttaaagagatggatgaataaggaaggagtctctttataataaggaaatgcatttaaaaattttatagttatcgcatgctggatataaactgaattgtgtcctcctaaaattcatgtgttgaaaccctaaccctcaatgtgactgtatgtgaagacagaatctttagagaggtaattaaggataaatgaggtcctaagagtggagccctaatccaatatacctggtgtctttataaaaagaaggagagacaccaggaatgcacccacacagagaggaaaggccatgggaggacataacaacaaggtgaccttgagtacacaaaggagactgatctcaagaaaaaccaaccttgctggcctcttgatgttggaatcccaggctccatgac

SEQ ID NO: 1880788 - DNA, 4001 bp, Homo sapiens
ccattttcaagccgaacttgcacacttctatttgtttggatgtggagagagaaaagaagaaatccacgtggtgggtaaagcacctgggtccacagccgaaaaatcccgggtttagtctgtttcactatacaaaattgggccatttacctgagttccaggctccacatataaaacacagacataatattactcacccatgtcactgggctgctgggggactctactaggacaacagaggcaaagctctgatataagctctttgcaaatgtaagaagtggtccttatgtcacccagtttagggcagtggttgagagcagacacattctgatccctcgaatctgaatcctatctttggcccatctggaagtgggacaagtttcttaaacctttgtgcctgggtttcctatctggggaagaataaattaacagatgcaaggaccctgaacagtccggttggagactgctccagtccttggcaccgtcctgcattctgtgggtcccaacagtgtggtgaaaccaggaagccgaccagccatccaaccagggtgtggtcctctggctgagactctctatcccacgtctgggcacccatgctaccagctggccttgaattccagggatgcgggaggacaatgagcatgaacgaaacgtgccgagtggagttgagaacgtaaaggaagaagggggcgatgaggacctctcctggggagatgagggctgccaagtcctaagacacaggctcagggtctgcaggaaggtcggcttgttggatcgtctctgtgcgctgacttctctttgctccccagggcctctacccgctgcccttgctcaacagcaccctggacgacgggaaggccaccctgaccccttccaacacgccactggggcgcaacctctcgactcaccagacctaccccgtggtggcaggtacaacgcccggagcctccctggcaggtggagggcgggggactgaagagcttggctggctgtcaggcggaaggtgtggggccctggcctggagaggagaggcgggctgtgccggccgggccgccaggtgggcccaggggtcgcgcctccggtcctaggccgggcctcaaggtgggccgaggggtcgcgcctccagtcctaggccgggcctcaaggtgggcccaggggtcgcgcctccggtcctaggccgggcctcaaggtgggccgaggggtcgcgcctccagtcctaggccgggcctcaaggtgggccgaggggtcgcgcctccggtcctaggccgggcctcaagctgggccgaggggtcgcgcctccggccctaggcggctcccgtaaggtgggccgaggggtcgcgcctccagtcctaggccgggcctcaaggtgggcccaggggtcgcgcctccggtcctaggccgggcctcaaggtgggccgaggggtcgcgcctccggtcctaggcggctcccgcaaggtgggccgaggggtcgcgcctccggtcctaggccgggcctcaagctgggccgaggggtcgcgcctccggtcctaggcggctcccgcaaggtgggccgaggggtcgcgcctccagtcctaggccgggcctcaaggtgggcccaggggtcgcgcctccggtcctaggccgggcctcaaggtgggccgaggggtcgcgcctccggtcctaggccgctcccgggtctccgcgctccctcctgtgggagaggcgggcgcacacacgccttccgggtctctccattttcgctgcagaagcgcagcagggaggtctagcttctctctccccgccttgccacgcctcgtgggccccggctctccccagcccagactctgagggcagctgagcctgccccgcgccccgcccgcaccctccacatcccacggcttggcttgtgcgtgttccctccccgccatctcacacccctctctccttgttgtctccctccctccggcagatcctcactcacccttcgccataaagcaggaaacccccgaggtgtccagttctagctccaccccttcctctttatctagctccgcctttttggatctgcagcaagtcggctccggggtcccgcccttcaatgcctttccccatgctgcctccgtgtacgggcagttcacgggccaggccctcctctcaggtacgacagggaggtcccggggccatgcagctatggcggcgggtgggacgggggtcctcagggcagaccgccagccccctctctggcctcagtctcatccacccccaccctgttccctaattcctccggcaacttttggaggcgccaacatgaagttctctgtgacggggaagacatgctcggaaggggcggatgctgtaggggtgccggggatgcaccaccccaagaccccatggaaaagcaggaaccctaaggccgggagccgggtgctgtaacgtagcaacttggccttggtaaatgcataaatagatagaaggaaaaatgaacattttggagggaaaaaggaattggcttttggagcccatttctggatcaaatttctaaaaaggccaagggtcagtcccagttgtgtttccatgatgcagctatcttcattcctagcttaacagcatcaccgggaggacagtcagacatctgttaaacatgataaattcagtgattcaacaacttgagaggagtgggggacctcccatcaggaacctcaactgcctcaaaatatttaaagctggaagcaccgaccgggcgaggtggctcacccctgtaattccagcagtttgggaggccgaggcaggtggatcacaaggtcaagagttcaagaccagcctggccaagatgatgaaaccccatctctactaaaattcaaaaaattagggggtgtggtggcagacacctgtaatcccagctactggggaggccgaggcaggagaatcgcttgaacccaggaggcataggttgcagtgagctgaggtggcgccatggcactccagcctgggtgacagagcaagactccatctcaaaaaagaaaaaaacaaataaataaaaataagtaaatctggaagcacctgagggagcctctagatcaaacctcttatgctgatgaggaacctggcccagggaggagaaggtccctgccaaggtctctgggcaggagcaccatctgtagctggttgaggcctgggcctgcactgcatgagtcagacctcaaggggagctggctcctcctggcagaaggaccttcgctcatccagccagggcctgaggaatggctgagagtcaagcgcttggcttgggttggagagggcctgagatgcagtgaaagtgggaagcagagacccatatggtcttcagatacctcaagggcttccacagggataggactattttagatgtgggcccagtgggggcccaggaccagggaaggaagccagctagctctcagttcagcattggaggaatctctttaatagcggcactgtctccaaggagtgtgggtatttagtgacagaagtaaatgcctcttcacctcccacaccctcctaccccgacgaccttgaaatgctggagcagagaccagtgcgtgggtggggtgtgtgagacctgtcacagaggcagcccagagtcagacagtccatctggaccagtggtttcaaatttgggcctctcaatgctctcttgaaatgaagccttttacagaagacatgtatgctcaccagacccctgaagaactgctcttttagaaggggtccctgcccctagaaagcccttggacttcgaaaccactgcaccagaggattaagacctctacaagcccagagtaaccacagggtcatgtgataaaagtccctggacccttttttttttgtttttttgttttttgagatggaatctcactctgttgcccaggttggagtgcagtggcgcgatctcagctcactgcaacctccacctcctgggttcaagtgattctcctgcctcagcctcccgagtagctagaactacaaatgggcgccactacacccggctaatt

SEQ ID NO: 1880789 - DNA, 4001 bp, Homo sapiens
tgaaactcctgtctctactaaagatacaaaaaattagcctggcatggtagcacgcacctgtaatccctgctactcgggaggctgaggcaggggaatcacttgaacccaggaagcagaggttgcagtaagcgaagatcgcaccattgcactccagcttgggcaacaagagcaaaactccgtctacaaaaaaaaaaaaaaaaaaaggccctaagcaactccaccctgcctctaagtgggcccccttggaaggcatggaaccagagcaccatttagtcaataattgctgctatgtgctaatggtgccctggtggcctccagaattgactgcagcttccaaaagtgcccagcatgcaaccggaaagtgctgtggatctttgcagaacccagctcgatggaaatcactgaaaacaattgcctttagtggcactgttatgtaactactgagcattccctgaattcagctttgcacatctcacgtagcaggtatgtgacgagtgtgaaggtatgtggggaatgggtgtgttcttttttctgcgctatctgcttccccagtggaaggaggccatggtgaggatgaggtacacttacctttagttaaacaagttcttttcggaaggagtacctaaggtcatagctgtgctcctgggaaggggaggccaggaggcatctaaaatgaggtcttactgatgaagacccccaggtacttgacaaagagtgtttccaacaaaaacaactctcaataccattttcaagccgaacttgcacacttctatttgtttggatgtggagagagaaaagaagaaatccacgtggtgggtaaagcacctgggtccacagccgaaaaatcccgggtttagtctgtttcactatacaaaattgggccatttacctgagttccaggctccacatataaaacacagacataatattactcacccatgtcactgggctgctgggggactctactaggacaacagaggcaaagctctgatataagctctttgcaaatgtaagaagtggtccttatgtcacccagtttagggcagtggttgagagcagacacattctgatccctcgaatctgaatcctatctttggcccatctggaagtgggacaagtttcttaaacctttgtgcctgggtttcctatctggggaagaataaattaacagatgcaaggaccctgaacagtccggttggagactgctccagtccttggcaccgtcctgcattctgtgggtcccaacagtgtggtgaaaccaggaagccgaccagccatccaaccagggtgtggtcctctggctgagactctctatcccacgtctgggcacccatgctaccagctggccttgaattccagggatgcgggaggacaatgagcatgaacgaaacgtgccgagtggagttgagaacgtaaaggaagaagggggcgatgaggacctctcctggggagatgagggctgccaagtcctaagacacaggctcagggtctgcaggaaggtcggcttgttggatcgtctctgtgcgctgacttctctttgctccccagggcctctacccgctgcccttgctcaacagcaccctggacgacgggaaggccaccctgaccccttccaacacgccactggggcgcaacctctcgactcaccagacctaccccgtggtggcaggtacaacgcccggagcctccctggcaggtggagggcgggggactgaagagcttggctggctgtcaggcggaaggtgtggggccctggcctggagaggagaggcgggctgtgccggccgggccgccaggtgggcccaggggtcgcgcctccggtcctaggccgggcctcaaggtgggccgaggggtcgcgcctccagtcctaggccgggcctcaaggtgggcccaggggtcgcgcctccggtcctaggccgggcctcaaggtgggccgaggggtcgcgcctccagtcctaggccgggcctcaaggtgggccgaggggtcgcgcctccggtcctaggccgggcctcaagctgggccgaggggtcgcgcctccggccctaggcggctcccgtaaggtgggccgaggggtcgcgcctccagtcctaggccgggcctcaaggtgggcccaggggtcgcgcctccggtcctaggccgggcctcaaggtgggccgaggggtcgcgcctccggtcctaggcggctcccgcaaggtgggccgaggggtcgcgcctccggtcctaggccgggcctcaagctgggccgaggggtcgcgcctccggtcctaggcggctcccgcaaggtgggccgaggggtcgcgcctccagtcctaggccgggcctcaaggtgggcccaggggtcgcgcctccggtcctaggccgggcctcaaggtgggccgaggggtcgcgcctccggtcctaggccgctcccgggtctccgcgctccctcctgtgggagaggcgggcgcacacacgccttccgggtctctccattttcgctgcagaagcgcagcagggaggtctagcttctctctccccgccttgccacgcctcgtgggccccggctctccccagcccagactctgagggcagctgagcctgccccgcgccccgcccgcaccctccacatcccacggcttggcttgtgcgtgttccctccccgccatctcacacccctctctccttgttgtctccctccctccggcagatcctcactcacccttcgccataaagcaggaaacccccgaggtgtccagttctagctccaccccttcctctttatctagctccgcctttttggatctgcagcaagtcggctccggggtcccgcccttcaatgcctttccccatgctgcctccgtgtacgggcagttcacgggccaggccctcctctcaggtacgacagggaggtcccggggccatgcagctatggcggcgggtgggacgggggtcctcagggcagaccgccagccccctctctggcctcagtctcatccacccccaccctgttccctaattcctccggcaacttttggaggcgccaacatgaagttctctgtgacggggaagacatgctcggaaggggcggatgctgtaggggtgccggggatgcaccaccccaagaccccatggaaaagcaggaaccctaaggccgggagccgggtgctgtaacgtagcaacttggccttggtaaatgcataaatagatagaaggaaaaatgaacattttggagggaaaaaggaattggcttttggagcccatttctggatcaaatttctaaaaaggccaagggtcagtcccagttgtgtttccatgatgcagctatcttcattcctagcttaacagcatcaccgggaggacagtcagacatctgttaaacatgataaattcagtgattcaacaacttgagaggagtgggggacctcccatcaggaacctcaactgcctcaaaatatttaaagctggaagcaccgaccgggcgaggtggctcacccctgtaattccagcagtttgggaggccgaggcaggtggatcacaaggtcaagagttcaagaccagcctggccaagatgatgaaaccccatctctactaaaattcaaaaaattagggggtgtggtggcagacacctgtaatcccagctactggggaggccgaggcaggagaatcgcttgaacccaggaggcataggttgcagtgagctgaggtggcgccatggcactccagcctgggtgacagagcaagactccatctcaaaaaagaaaaaaacaaataaataaaaataagtaaatctggaagcacctgagggagcctctagatcaaacctcttatgctgatgaggaacctggcccagggaggagaaggtccctgccaaggtctctgggcaggagcaccatctgtagctggttgaggcctgggcctgcactgcatgagtcagacctcaaggggagctggctcctcctggcagaaggaccttcgctcatccagccagggcctgaggaatggctgagagtcaagcgcttgg

SEQ ID NO: 1880790 - DNA, 4001 bp, Homo sapiens
gcttggcccactagctacgtgttgcattgaactgaagagtccacagactgacctaacactctgtcatgctctgtcaatctctgcagagaaatggaggcttggtgccagagcgaatttatttttacctggttggggtgctggggtgggggaggcaagagtcaagcccatggggagctgacggaagcaagtcagtcatacaaaaaaccatttgctcccccagaggcaggtaggctcaaatgtgccacagacagggccagaccgacagacacctgagcctctgggcaggctgaatcacttccccctccctatcctcaccagacactgcataagacagcatttcagcccgcccgcccgttacaggtgtagctcttatcaggaaaagctgggagctgcctgatacaaaaaggggctgactgcacaacaaaagattacctgaagggctcatttaaatgacaagctcacctaaacgttttaaatagtatttaaattccaaaaccctgatttacagaaaaacctggaaaatgtgctcaccagtaaggaaatctggaggtccatccccgacattgtgtgaccttgaattaagcacttcatctttatgtttgtcttcctctgtttaaaagagagagagagagagagagataagaacacctacctcagaggaccatggtaaaaattaaagatagaatacggtgaactgccttgcatcggatgtgctggcactggccaatgcacaataaacgcctgtcccttctagactaaaaatgaacacttaattgtggtaaactattaataagattcaccggccaactgtcctatgaaaaagtcagaggcactgtagtctcttcgtagctctcgttctctccagcacaacagcccatgctaggaagtctagaaaagcagtaacttatctcattccttaaattaaacagaggtttctaaatgctttggtactgtggggacccaaattatcccttgatactgcccccctattatccactattaagctttaaaaaggcgagagattaaatattgtgcccacattttacagtcattcgcgttcccgtttcaaattaaagggaggaaaacgcgttaaaattaggcctccgaccttcagaccagcctgtgggcttttttaagtcataaaactcgcggaggtggaaggccccggggaggaagaggggtgcattctagagctttcgggccgaccccaatttctcgttggcgacgaatgctaaccacgtgtcgccattttgtgttcaggaaacatggcggccgccccaagggtaaggaacaggggaggcggagtagcgccacgttagccgctttccctgagagattgtgaagcacgttgcgcacggggccctttctggtctggcttagcccaaggaggaaggggaaaaggcagaaatcacaactcataggccagcgtcttgagcgacacttcctcagcgggaagaaccggcaaaaaaggccttccaagatggcgggccctgacggggccgccccccttgagcctggcgcagtggctgcgcccatgggcccgaaaagcagccgcgggagcccaggccgcgcggggaaagccgcagaaacgtcctgaagccctggccggcagcccctgaacaaacgaggcctccacaggcgtacactattgtttctaatgtcggaaaagggtgccgcggtggaaacgacacaagggcaggaggtggggtttctgtggctttaaccgaaagaaacttgcgaaacgcaaacaaagcattatgtaaatggacgccattctttttaggaccacgtttctagcacgccccacaaacagcagagccgcgattcggcaggcggccgtgagtgggtttcggtctttctgcccaccggccgccgccggggagcaggagctggggtgggggatccatgcagggcgcccggacgccggggacgaaagggccccacgtgcccgcccgcgcgcacccgctccgcaggcctcgcctcgccgcccctcccccccggaagagggctgctgcccctcccatccccccacaccctcgcgcacgcgctctggtcacctcacgcgcatgttttaaacccgcggcgtcccggcttgtgcctgcagtttccgccggggctgcccatgtcgttccgcgcacgagcccctcatgtagggcaggaaaataatgtctatcccgcatacacagcactagtattttcagtcacccgccagtgccgttagagttaataaaatacgtcatcattttaaaactttgccggactcacagcttccgcccatcgtgcgcttcattttcactactgcagtgtcagaaggttttttttttaaggaccatgtaagggttggcgcaatcttgtgacctaaaaaagacgggtcctcattttttttcaaggggtcctgcgcagcaagcacttccggggtcagagggtacgcggggttgaaagcgggcttcccgccccgcccagaccgccgaggctgccgccggagtcgccaccgccgcgccctcgcccacccgcccgcccgccgctcccggccccgctcgccccctccgccgccgccgcccgcccctgcgactacgctgcggcctcccgcccgctcccgctcgctcccgcggccctcgctcgcctcgcgccggcagttttgggcctacacctcccctccccccgccagccgccaaagacttgaccacgtaacgagcccaactcccccgaacgccgcccgccgctcgccatggatgccggtgtgactgaaagtggactaaatgtgactctcaccattcggcttcttatgcacggaaaggaagtaggaagcatcattgggaagaaaggggagtcggttaagaggatccgcgaggagagtggcgcgcggatcaacatctcggaggggaattgtccggagagaatcatcactctgaccggccccaccaatgccatctttaaggctttcgctatgatcatcgacaagctggaggaagatatcaacagctccatgaccaacagtaccgcggccagcaggcccccggtcaccctgaggctggtggtgccggccacccagtgcggctccctgattgggaaaggcgggtgtaagatcaaagagatccgcgagagtacgggggcgcaggtccaggtggcgggggatatgctgcccaactccaccgagcgggccatcaccatcgctggcgtgccgcagtctgtcaccgagtgtgtcaagcagatttgcctggtcatgctggagacgctctcccagtctccgcaagggagagtcatgaccattccgtaccagcccatgccggccagctccccagtcatctgcgcgggcggccaagatcggtgcagcgacgctgcgggctacccccatgccacccatgacctggagggaccacctctagatgcctactcgattcaaggacaacacaccatttctccgctcgatctggccaagctgaaccaggtggcaagacaacagtctcactttgccatgatgcacggcgggaccggattcgccggaattgactccagctctccagaggtgaaaggctattgggcaagtttggatgcatctactcaaaccacccatgaactcaccattccaaataacttaattggctgcataatcgggcgccaaggcgccaacattaatgagatccgccagatgtccggggcccagatcaaaattgccaacccagtggaaggctcctctggtaggcaggttactatcactggctctgctgccagtattagtctggcccagtatctaatcaatgccaggctttcctctgagaagggcatggggtgcagctagaacagtgtaggttccctcaataacccctttctgctgttctcccatgatccaactgtgtaatttctggtcagtgattccaggttttaaataatttgtaagtgttcagtttctacacaactttatcatccgctaagaatttaaaaatcacattctctgttcagctgttaatgctgggatccatatttagttttataagcttttc

SEQ ID NO: 1880791 - DNA, 4001 bp, Homo sapiens
catcaaatagtatggtcatcataatgctagtacagaaaacaaacaaacacataaattacacaaataaatgtttgatataaatatcaagtggtgaggaaaaggaaaagaaacttttgatcgagactattctagatcaggtggtcactgaagctattttggacaaggaaaccttttagcacgtatatagaaatgatgatgcaattgtgaatatctattggaagagcaatctaggcaaaggcaaaatatgaaaaaaagaaatacctcggccaaaacccagtctaacttgtagtagtgaaaaggctaatgagattgaaggagagccagaaaggcctagtggctggaaattacatgaaattttagggagagcctggaccagatcatagcaagtctttgtaggttttcaatattttttttctttctttctatgtgtgacagagaatagtggaagttttgtggggtggagtgacatcatctggtttatgtttaaaaactttcttccagttgctatgttaagaatagattgtaaggattggagctaaagaggaaggaataattatacaaagagcagtaggaaaaatactaataattaagagagaaaaggaacttagccaatttgaacatcctctacatatgaagaactgtgctggacatttacaaaaattatctactattgctaatggatatgtgtatatattagttgatttgcttcaatagtatactgtaattgaaagtttcaattgcttataagttattcaagcatatatgaagataacatacagatatatagttaaaaatagtgcaatctgaaactttcacaattactcttaggagattagtgttcagtactgaaattaatgaaatgatattatctcaatatgcatatgcaaatatgaataagtagttaagctcaacaatagcataagcaaaagattatgataataagttccattatctgaattaatgaatggctcacctcacttgataaggtcacgttgagtcccagtgcatctcgtagtacaattttatcattcagctctatgaatctgcttaactatttctgtatattttaacaagaaataaaaatcacaaagagataaaggtaagttgcctgtgggagcctgaaaaaaaaaaatcaaccagaataacaaattcttcttggtttagaatattcccaagttgtatgctttttatttttttttcaatgattcaccatgcaggtatttaaataataaaggaggcatttaaatgtttctttgatttaaatccctattttaatctctagttaaggttcctcaaatttcttgtctcatacatctagtgattaacaaaattatatacatggtgacatacacataagatctatgaggacctcacttactgaatattcaaatgtgattattgtattactctctacctctgtgagttccctaaaagggaaactgtgtgccctgaaaataaatttatgtgtgattttgtcaaattatccttggagatagaacctggaagcaaaacatattacaatgccaaatgtgtttctcaaaaggccaaataaattaaatcttcttcagggaaaacatataaaggctggatcacaacatccatgctctgcattcagacttaaagcaccaaagttatacaaaactgagtagccctatcaaatcatttcattattccctgctaattacactaaaacctctatacttttcaaagcatttttattttgtcttctaaatgttagtagtttaaaaataaccatgatttaagccattattactatattcttagctattatatacataacaaaatctcttactcaccccaattagaggaagttgcagacacaggttacggcatagggcaaaaaggttgctgcctaattgaaaaaagatgctgtccagggacctataaatagctctttaaaaacctccacctttgctatcattttcattcaatttatgacttttaaaactgcagttccaaaactgggtgccagagtgccttggggcactaccatgaattaacaggagcactgagggatattttaaagtttctaggaaaacagagtgacatctattgggcaccaggcaagttacaactgttaacatgggagcttactacttaatacatgaagctgatagctttgtgctttgtttttatttaacttaggtgctttgtgagaaaaaacaagaacaaaagcaaaaaaacctgagacactaaaggtgtcatgaactcagagattttcagaaccactgttttatacataatttcagtacaacgtgcagtgaagcctcaagcttcatagtgaagcatgctaagatcaatttttaaagaaagcatatataattttaaaaattatttgtttcataaataactgcaatttattactaaaaaatgataaaatgacttaatgaacatatgccaaaaaaataagaaattatagagatgtatctttatgacatctatgtaaaggaaaattttataaagagattattaaagatgctgattataaaatttaaaaatgttaacttcaacacaatacaatttaaaacttttatccatcacaagacataaagtagaaagtacacaacaaactgataaaggtattttcagtaatataataattagtatctaaaccatataaaattcttataaattaatgagaaaagcaatccaataggaaaaaatggggagcaaaaataataagcaagcatttcagcaaaagtaaattataaatggttaaaaaagaaacaattcttaaacatagaaaatgcaaattaaaagcacactgagattttattttatgccatttgatgggcaaaaattattgttcgatcataccaaactttggcagaacaagcaactatgtgggcaccaatatactcataccggtagtataaataggtataattactttgaaaaatgatttggcattatcttgtaaattcgagcatgtgacaatcttataacccagcaattttttcttatttttttaccttagaataactcatacacatgcctcaaaaaagtatacaaaatgaaatttaaaacagcattatttttgtaacagcaaaaacagaaatagcagagtatctatagacaaaggagtcaataaacaaactgaaatttatatagtcgaatgtcaaagagattaaaaataaacaaattatacatgcccaacacattactgaattttagaaccataatgttaagtaaaaaaagcaaagcacaaataatataactacaatatattatttaaaaagcttaaaacaaggaaagctatataatcttatgcagacatatgataaaacaaaaattttaaaagcaaaagaaaaaaacacacaagtcgggaaagatgttgcaatgggggagattcaagtgttaatgttttagtttttaaattagatgatgactttatgggtggtattgtattattattgttatgctttatatttatatattcattagaataattttttgcattttaaaatatttataatacatggaaacatatgcatgttttcattcaatcttcactaacatactgagaactaattaaattccatactactaaaaaaaacacaaatgcttagaatcgcttacccatgtcactcatccaattagaatcaaattggaattagtacctttccagtgctcatatcactttgcaatgaacatctttttttcagaaattgcagaacgcaagagggatctgatagcatgaggttttccctagactactttgtggaattggtttaatgccataatggactcatacaaacatccttttaattaattttaaacatgactcagaaatataagtcttttatttatttatttatttttagtgtggcaagtgggagggggaatgatgttgagttggttccatttagctccacatgtagacaggttcatgagccattcctttctgccatcactggtggactaagcacataggctctctctttatctcagatacttgccaacaacctgaaactttaaaa

SEQ ID NO: 1880792 - DNA, 4001 bp, Homo sapiens; identical to SEQ ID NO: 3502

SEQ ID NO: 1880793 - DNA, 4001 bp, Homo sapiens
gcattttaaacttactattcttgctgctttagaagagaaaacgttagcaaaaactagattgtcaacagtagaaattaaggtactaaaggaaaacagcttgtaaaagttttatggcatactcatgaataccaccaaattcgccccttcctcgaactagggtcattttaaagtaaaaacaaaaacctaaggctttgagccaaaaattatgccactacaaaccacagttttaagacaaagttgccaaccatgcaggtatcgttcaatgcagaagtcacaatgcagaagataacctttgtactcaaattttatgaattcattaaggttttcccttttcccctcatcgccttcacatgggaagtgggatgtaaaagttaaaatgcctaactatgcaattccttctgcaatttgttgaacagcttctagagaaaaccaagataatgtggtaaataaacttcacagcatcttgtcctcatgcactcaacacgtgcccaagacttacttgctgatgatgaaatgtgctgttggtgccaacagttttaagccactggcaaggaaaacattctaagaaaccctgggccagttataatctgccttccctattatcacgccaattctatgcaatcatcatatgcaaaactgggcattcatcatcactgcacggaatccaaacgcgattctcgggggtgcccacgctcggcctcccacccgggtccgactccttggaaggggcctggcctagcgcgcacctgcacacgtgcgccgggaggcgggaggtcgtcccgcggcccagctggtttgttttcaacaatacggtcaaagccacacgcccaccgttatttacgccgccagccagcgccggcacttcggagggaggaaggaagcacctaaggcgctgggggcggaaacgctgaggaggaggggtgcgcctcaggcgagagctggccggcgccgacccggcctggggcagcggccgcagctccccgcccgggaccgcgcaaaaaggcccaaggtcccgggccgcactcaccgaagtccaggaactgcttcatggagagcggggacggcgagaagcgcgcgtagaagtccacctggcccggaacgccgcgctcggacgccgggctggagcccgagtccgagctgaagctgcggctgaagccggcggcgcgcagccccgggcccgggccggccaaggcggctccgcgaagcagccgcgccagcctcatgccgagtcccgctagagaagccacagccagtacgccaggtttccccgcgcctctgccgagtggtacgtgagggacgtggcgggcagcaggggcggggatcggctgtcaccggcgcggcccccaccctcctagccggagcccggccccctgcgccgctgggcgggacgcggagcgggaaggaggcggggagagaaaaggggcgggcgcttgcggggcccgccccctcgccggagtcccgcccagcctcccgaggaaggagatgcggagcgcgcgccaggccgcagccgccgcccagatcccgccccagccggcgaggtgtggggtgagcgtgtcggccgtccccgtacacgtcgggtgatgggactggggacactaagaggcgaggcggtatggagcgtccccttcccgcacccttttgaaacaaatcccaccttcctgcttcctctgccctcccaatctcagccaaaaggctcaaggacagggcggcgttccgcttgcacacaccgcggtgtcgtgctgcgagcgcgttccagaaacgctcctctgtgacgcaagccacgcattttccagggtcagagagcttcaggagtccccgcttgccaaacagtagtacgtaaatacgaaagctgaacactgggacgtgtggccctaaatagtatcaccgcgacggcggccccgggagaagagatgtactgccatgtactggctctgtgcctttgagtgagctgtttaacctctctgagcctccgtctctttacctgaaaaaggagcatattatctgtttcagttgctgtgacatgggtagtagagctatctgtgttagcacaatgccggggacataccagataataaatgggatttatttttaccattattgctttttaaaattatttcattattaagattttatcagaaccaccaatctgcgttttccctgaagcacattttaccaaaagtttgagagaaaacggtttttggcggttttataactatttgatgtattcgagtatcagcagttctcccacactgactgttggttttagaaagtgtaacgggtacatagttttgtgaactccgaaagtttgagacaagtctcagttaatgtataaagtttatcttgacaaggttgaggacgcgtgcccgtgacacagcctcaggaagtcctgagaacacgtgcccaaggggtgaacagcttggttttatacagggagacaggagacctcaatctatatgcaagaagtacattggttcctgccggaaaggtgggacaacttgaagcagggaggaaggcttccaggttataagtaggtgagagacaaatggttgcagtctttggagtttctgataagcctttcccaaggaagcaatcagatatgcatctgtctcagcagagggatgactttgaatagaatgggaggcaggtttgccttgagcagttcccagcttgaattttccctttagctcagtgattttgtggcccgtgatattttcctttcacatatcagtgaatcttcattcgcattatgtttttctggacaaccacatgtggataccgtatgggacattattcttttggccagacagctttgtcaaacctggtatcagtatgcgcatctggagtgcccatctctttcttggcaaatttccagatatctttgctgagtgcccgaggggcacacttcctgaagtccgtttcaatgggatgtgcttgggaatgttgatggtgtcaccacctcattgatggctgaatggcccccttcttcttcccacccttcttctgcgggacctaagttggaaagaagaaaacaattttaagttgaatattacacattcttaaaatagtccctcaaacatttccacagctctaccccagcctctcaggttgcctcctcctttctaatctccttccttctagattattccctgagctccaaagtcttgtcactttatcatgcacagcattattcagctccctcaatccctgtttgcaattttgctgctttctgcctgagcatgtcaagatgctcagctgaacattaatttgcgtgaaagtacaaaggcccagcagaaaccttgagactattttagcaagatttttttccctcaggaaggaatcaactgttgtataaagtgctttttcctttctccaaagtatattcaccatgcttcaaccaatatacagagaatgtgcatataaaagtacatattaaatggtgtcaacttttgcttcttagtcaaagacttagagtccagaaactggagagaacctttgaggactttagtaaacagctgtattacttctctgttgttatggtctgaatgtgtcccctaaaatttctatgttgaaacttaattatcaatgtgatagtattaagaggtggagcctttaggagagaattaagtcatgagggcagagccttataaaagggcgtgagggggtgagtcagttcctaccatctcttctaccatgtgagtgaaactgcctttgaaaaattataacagtgagaaaattttgacagtgaaagagatctgacctaaccaactccatcttgcttctcacttccaagctgcccttgtttattcctgggcataggccaaactaactttgggaggaatttagattacaaactttgaaacaaagatgataagagctcttccatgaaacaaatccccagctttcctggggaccagaccacctttgttaaactaacagattaggcagggcacaatggctcatgcctgtaatcccagcactttgggaggccaaaatgggaggat

SEQ ID NO: 1880794 - DNA, 4001 bp, Homo sapiens; identical to SEQ ID NO: 3506

SEQ ID NO: 1880795 - DNA, 4001 bp, Homo sapiens
cttgagagaaatgggagatagaactttcttcctgctttgggttttatcctgttagtcttttctctcttcactcctattttctatggagaatttcctggttttggagtttgggtgcgttttatggagaggaggcagaaaatctttagctccagcagaatgaaagggtacatgcaaagaaacctagcacagtatctggtacccagttctcctttaacttggctttattcattcactcctggtagggcattaataagggatttagccccctcctactgaaaacgattaattcagggaagagttcagacagtgtggacagatacagtgtaggccaagcctgtttctaaggcaggagctgggtagggagggtgagaagggcgagaagaatagggaaatatgtgtcgtctgtgttgctgctgttgcaaccaccacaacaaacaaataagtgaaaaaaaaaaaaaaaaaagaattgtccataccggaaagtgtgctgttttggaggaggctggggcaagtgtggatggctcgagtgggtcctgttggattgaagtctgacagtggtgattcccttcaacaaatggtcggggtgggagggtacacagacacacacacacacacacacacaccccacacgcagcgcccggcctccgatttcagcgctggcaggagataaccattcttagctcgcctttccagggttgtttttggctgaggctgttcgctgatggcaaaaggtttcagccccctcgcaaatccctcccagtccttgttctaaagagaaactggtgcgtgtaggctgcgcactcccagggagacaggggacgggcctggcgccggagaggagcccgcactctgcccgaagtctcgccgcccgccggctgttttctggcggagggtgcgccccggagggcggcgagcgcgggtggaggctgcggccaggcgcgggtggaggcgtcgccggggtcgggctagcaggctctgggatcgggcttgtgggacaccccgaaagtgagtccaacttggggagaaactgagggcagctcgggcggtctggcagcggagaaggtgggcgggagaaaacttggcagcgaggcagaagcgatccctgccgagggagtcagcgagcggccgcgcggagaggaggggcgggcggtccccaggcgggcgggtgcagggcgcggggcgccgacctgctggagaggggcccgggcgcgaggcggagtcccggcgcgcagccaggctggcggaggcccccggccggctgcagattccctccggccccgggagccgcagcaggaccggccgggaggcgccgcggaggggagtcgcatcccggtgcggacagtgcccaccgcgccctgcgaggaccggcgacccaccggcctcttccagggccagcgcagctacccgcccaacttcatccggagcgcgctgtcgtccgtcgacctgcgcgaccgtcagggccgcaccacgggggtgggcagcgacggcaggtacttcggcaggacggccgtcgaggtcggggggccgatggccgcggccaacggggcgagtgtccggatgcccctcgcttcccgccgcgccgccgccgcgccctctcctggcccttgtccgcctgctgcctccgggcccagctgggaggcccctgcccggctttgctccctcactcccgcgtcctcaccctccagcgccccactcccgccgcgctcgcagcctccccggcgcaccccggacactgggttctattagtacccaccgcccccaaaagccctgaggggtttccgtcgttcctggagccactccgggcgccctggactcttctccgactctgcgcacatcccgcacctgctcatttttctttcggacattctcttacccggccctgtagattccaaggcggctcccagttttccatattgttcccaacgcgttcactgcccacagtccccacacaaacttctttcgcaggctcacaacatagtccctctgccccgtgccctttttgcaatagtctgccagtcccctaagtcttagctctgcctatttaacagtagtggtgtctcagaacacacacacacacacacacacacacgatccctgacatatttggcaagagtaggccctgaaggtttttaatattttggttctttaacccagtggaattactgaatgatttatttaattagggtggggatggagtggatccatttgtttgatgctaaacagcctgagctcgcagttcccagggggcatatctctaaatggtctgaaatgagatttgcagtggttttcttaatgcaattcccaacttctctccaaatgccttttgacatctggcaacatttcatgcctcttcccctttcggttttcatccttgttttctctcccttctcccacgacctcggtagtcttctgcaatccagattctcagacttcaggtttttctccctctgcccctttcctctctgtcctgtaactagaagcaccttttggcatagacccatatcccagtttcctctttcccaggtccagcagcatctcaaggacatctacaagagggatacctaatttcaggggtctctgaattatatgtgggaaacatcgtctaaaaaagtaattttatccttattcatgcaaccagacccacactcatagaacttttctttaaggggagtgtcttgcagatgtataaatgagtgttaacatctttaaaagcgaaactgaacaattctctggcatttgaattccctccttccttcccaaccctctccttttcattttctcatttattattaaaaacacttttaaaggatctccatgcttcatatttatctactataattcctccttctcggtgttgcagggatggggaaagaggattttttaaaaacacaataaaaagcaattgggagaaacagggccagtggtgttggggtgggtagtggaattgtgatttttgactccagtagacaatgatgctgcatatatggggtttgatttctctctggctcctcagttgggattgatgaagtttggctagaatcagggagttgaagagaggttgacaaatggtctttcactcttctctgacaggctgttcctgtggagtgatggagaataatgagccttgggaaagctatgggagctctcatactccttcccgagccaattttttagggagtgagagaaacagggcctgtccaatacttgttgtgggtcaggatatttttgaagctacggttgttgatttgcatgggaaaattattatgtcttattatttcttgtcccactttaccataagggctcctcagcttcttacttcaatgggtcttccatgacaaacacactttattaactctaagagtggaatttattttaacagataattagcataggtcaatatatgcttaaaatagagtcaaattaaacctactagctgttataaaggacagatgacaaattaaaatccacatagaagcatcgactcttaaataatctgaaagtactacttctaagaggggtgggcatgggtgaagggaatggtggacatgtttcagaatttcaaacagccaactttaaccaatcttttcctcattttgttcaccttcttgggggcttatgctaaagtgaagtgaatagccataaggcttcaggagaaaggtggtcgaaaagaactggataattataagcaaaattggtctcgaatgattgaaaattgatgagaatgtgcttgtctcctgatttggcatcctgagttagactcaggaatactgaacttggatcccaaaggctttggtcttttttgatatcctattggataatcataagcaggctagaaaaataggaaactagaatttattctctttgaactgacaaatctgaccagtgggctgcattctctatatctgaaaaatcttggttttgattgaaaaagttaattttacaaagcaattttctttttttaaattaaatttcatttttttttttgagacagggtctcactt

SEQ ID NO: 1880796 - DNA, 4001 bp, Homo sapiens
atagaactttcttcctgctttgggttttatcctgttagtcttttctctcttcactcctattttctatggagaatttcctggttttggagtttgggtgcgttttatggagaggaggcagaaaatctttagctccagcagaatgaaagggtacatgcaaagaaacctagcacagtatctggtacccagttctcctttaacttggctttattcattcactcctggtagggcattaataagggatttagccccctcctactgaaaacgattaattcagggaagagttcagacagtgtggacagatacagtgtaggccaagcctgtttctaaggcaggagctgggtagggagggtgagaagggcgagaagaatagggaaatatgtgtcgtctgtgttgctgctgttgcaaccaccacaacaaacaaataagtgaaaaaaaaaaaaaaaaaagaattgtccataccggaaagtgtgctgttttggaggaggctggggcaagtgtggatggctcgagtgggtcctgttggattgaagtctgacagtggtgattcccttcaacaaatggtcggggtgggagggtacacagacacacacacacacacacacacaccccacacgcagcgcccggcctccgatttcagcgctggcaggagataaccattcttagctcgcctttccagggttgtttttggctgaggctgttcgctgatggcaaaaggtttcagccccctcgcaaatccctcccagtccttgttctaaagagaaactggtgcgtgtaggctgcgcactcccagggagacaggggacgggcctggcgccggagaggagcccgcactctgcccgaagtctcgccgcccgccggctgttttctggcggagggtgcgccccggagggcggcgagcgcgggtggaggctgcggccaggcgcgggtggaggcgtcgccggggtcgggctagcaggctctgggatcgggcttgtgggacaccccgaaagtgagtccaacttggggagaaactgagggcagctcgggcggtctggcagcggagaaggtgggcgggagaaaacttggcagcgaggcagaagcgatccctgccgagggagtcagcgagcggccgcgcggagaggaggggcgggcggtccccaggcgggcgggtgcagggcgcggggcgccgacctgctggagaggggcccgggcgcgaggcggagtcccggcgcgcagccaggctggcggaggcccccggccggctgcagattccctccggccccgggagccgcagcaggaccggccgggaggcgccgcggaggggagtcgcatcccggtgcggacagtgcccaccgcgccctgcgaggaccggcgacccaccggcctcttccagggccagcgcagctacccgcccaacttcatccggagcgcgctgtcgtccgtcgacctgcgcgaccgtcagggccgcaccacgggggtgggcagcgacggcaggtacttcggcaggacggccgtcgaggtcggggggccgatggccgcggccaacggggcgagtgtccggatgcccctcgcttcccgccgcgccgccgccgcgccctctcctggcccttgtccgcctgctgcctccgggcccagctgggaggcccctgcccggctttgctccctcactcccgcgtcctcaccctccagcgccccactcccgccgcgctcgcagcctccccggcgcaccccggacactgggttctattagtacccaccgcccccaaaagccctgaggggtttccgtcgttcctggagccactccgggcgccctggactcttctccgactctgcgcacatcccgcacctgctcatttttctttcggacattctcttacccggccctgtagattccaaggcggctcccagttttccatattgttcccaacgcgttcactgcccacagtccccacacaaacttctttcgcaggctcacaacatagtccctctgccccgtgccctttttgcaatagtctgccagtcccctaagtcttagctctgcctatttaacagtagtggtgtctcagaacacacacacacacacacacacacacgatccctgacatatttggcaagagtaggccctgaaggtttttaatattttggttctttaacccagtggaattactgaatgatttatttaattagggtggggatggagtggatccatttgtttgatgctaaacagcctgagctcgcagttcccagggggcatatctctaaatggtctgaaatgagatttgcagtggttttcttaatgcaattcccaacttctctccaaatgccttttgacatctggcaacatttcatgcctcttcccctttcggttttcatccttgttttctctcccttctcccacgacctcggtagtcttctgcaatccagattctcagacttcaggtttttctccctctgcccctttcctctctgtcctgtaactagaagcaccttttggcatagacccatatcccagtttcctctttcccaggtccagcagcatctcaaggacatctacaagagggatacctaatttcaggggtctctgaattatatgtgggaaacatcgtctaaaaaagtaattttatccttattcatgcaaccagacccacactcatagaacttttctttaaggggagtgtcttgcagatgtataaatgagtgttaacatctttaaaagcgaaactgaacaattctctggcatttgaattccctccttccttcccaaccctctccttttcattttctcatttattattaaaaacacttttaaaggatctccatgcttcatatttatctactataattcctccttctcggtgttgcagggatggggaaagaggattttttaaaaacacaataaaaagcaattgggagaaacagggccagtggtgttggggtgggtagtggaattgtgatttttgactccagtagacaatgatgctgcatatatggggtttgatttctctctggctcctcagttgggattgatgaagtttggctagaatcagggagttgaagagaggttgacaaatggtctttcactcttctctgacaggctgttcctgtggagtgatggagaataatgagccttgggaaagctatgggagctctcatactccttcccgagccaattttttagggagtgagagaaacagggcctgtccaatacttgttgtgggtcaggatatttttgaagctacggttgttgatttgcatgggaaaattattatgtcttattatttcttgtcccactttaccataagggctcctcagcttcttacttcaatgggtcttccatgacaaacacactttattaactctaagagtggaatttattttaacagataattagcataggtcaatatatgcttaaaatagagtcaaattaaacctactagctgttataaaggacagatgacaaattaaaatccacatagaagcatcgactcttaaataatctgaaagtactacttctaagaggggtgggcatgggtgaagggaatggtggacatgtttcagaatttcaaacagccaactttaaccaatcttttcctcattttgttcaccttcttgggggcttatgctaaagtgaagtgaatagccataaggcttcaggagaaaggtggtcgaaaagaactggataattataagcaaaattggtctcgaatgattgaaaattgatgagaatgtgcttgtctcctgatttggcatcctgagttagactcaggaatactgaacttggatcccaaaggctttggtcttttttgatatcctattggataatcataagcaggctagaaaaataggaaactagaatttattctctttgaactgacaaatctgaccagtgggctgcattctctatatctgaaaaatcttggttttgattgaaaaagttaattttacaaagcaattttctttttttaaattaaatttcatttttttttttgagacagggtctcactttgtgcccaggctggagt

SEQ ID NO: 1880797 - DNA, 4001 bp, Homo sapiens
ccatcacacacatgtatactcttcagtcctgaaattctgagtgtcctctctgcctggaccattaattagaatcatgtatttcccctgcctccctttgccagtgggcagaaggcagtttctgagcagtgattaagcctctatcaggacactaatgcaagtggcccataaaaggcatctaaccctgacactgttggaggatccaggacccagggagttggaaagagggaaggaaaatctttaaaagagggagccaggtgaagcgacacactgcaatgtgactgacctgctgagattccaagacctgaaacacaaacatacatgtgcacgcacacctcctcccatctagaacccaactgtttttgacttctgttctcttagcgggcttcccattcctcctatgcccccaacattatctgagaggcagctgtctgttttgtaggagaaaagagatagtctgtttgagtgatgcacactggatcacagagcaagttatggacaaagatggaactgtctctgagtgtcattacttaacttgctaatccacatagggctgggggtatccactcataaaaagcagggcaggacattttaaagccagacaggggctgtgtagagaaggaagaaaaatagaattgcagggactgataatggaagtatttactgtacacttactatacaccaaacattttatgtggttcatgctcatttaatcctgacagccctgaaagttaggttaacataaaccctatttgacaggtgcagaaactgagactgagaatagtcaagcaacttggctgaggtcacaaagccaggatatagtggcaggttttgaaagaggcagtttgattccaggctcggctctgataatattaagcgggcattaaaaagcaggcttctgggagatggaaaaggagtggtggaatcatcaaatggcatggatgttgtacataactgaagccctggattacagaattaaaattccatgtctgtactcctccctcccgctccagctccacagttggcgtgggccagcccaaggctactggtggtgggaggaatagcttcatgtcctcaaagcactcacctaaattctggtgtagggagagcttaaagtctgtggaagagacccagcatgcctttccaagtaggtcctgggttagaaagatctgggaggcctgtgtgttaaaagagatggcaggaaatgattcagctctatatctgtaaaatctctgacaatgacaggatgtgaggaatgacaggaggatcaggagggctgggcgggggtgactgaaatgtactgaccctggctgcaaactaaaaataaaatcctaagtcccctccaccaactgaatagaaacgctcttggcaaagaggaccccagaaaaaccttagaaactgagttcccagccatgacaggacaagaggtcagacacacctcattatactcccctcccttttatggtttagacacaaccaaccagcattaatgtcaaaatagaggtcataagactgaccaaacacactctttgtggcaacaagataccaaattacaaacaggacctaaggccatgccaaacaagggttaagtcatgcagccctacacttaaaagaataaactatgttctaactgccacaagttttccttttctctagcagctaaataagcactggcctctaaataaacaatactaaaacacttgcagctccaccagatgctgactaactgaactccaccagccataactacagctttgattggacaagagtgatttcggtaattttctcctggtaaggagcccaccgaccatgactggttctagcgggtttacagagattgcatacttgagtgccttcatgtcctgaatagaccttttgatgtatagggcctgattgcaatatttaaatattaagtctccaccccaaggtgaacatgtgtcatatgtaagatgcatgtttaatatgcatgcatcaggaccactttcattaatattcatagctcctcctgtaacctgttgaatatgtgttaagccaacccattcagcataaaagcataaaactcctaccccaacccctcctccttggaggtgcctgtctctgggcttctgctggaggaggctgtgcttcctggcctgcaggatggccacctggcaggctgtcacccttaagaaatagtgtctccatttttctaaatttgtatcttatgattttttttttaaagttaacgtatctggcaaagatgggattctgaagcagcccctgaattccttttcctgtgtcacccaggacaccaggtacagccaaggtccctttgaaaaagtccagttgttcctgactatgctgggaaaggatctgggtaagtgctatcaaaatccaagatctcccacttttaggttgcagacttgatttcttcttttaggcctcctccatctgtggaactccggaggagaccctcctgctggccttgggtttgggagggcattcctagttcttctcagtcctttctgttctcctccctggaccccggagggaacatctctcctagccttgggtttggaggaggccttcctgattccctccatccaagggccctggagaaaatgcatttgtgggctccgggcttatggagaggcattcaggttggattcaactggttcataaggtttgtggggatgctcacactaagggcactggaagagatatcttcataaagtcagtgcaataggtaacttacccactaggggcaggaactcctgtagaagttcaaaggcatgccaggttttccagcacttcagctagctgcatattgtggcctgttcttgtgcacattttaaaactgaacgggcaaattacagcaaggaaaattcagagctcaaatgcccaacctgcaactatacaattaaaatgtagagttttctaaagctatctcttttttgttttcggcctgctttgaatttgctgttattaagctactgctgttaagataaaactcattgtttatgatactactaattcaaggctacttggagctttctttacagttcagccaattgtagctaaaatgtaaacactgaaaactcatttgaaacttcaggaaaaaaaaaaggggtaaaaggtttttaaaaataaaactgccatgaaaactacttttcccaagactttggtccatagccttcattggattacctactgggacaaataaagtttagccatgtgaacaggtcccaattttgtcagaaataatttggatccagctgtcttttgttaagtggtgagtctgtattaccatctcatggctaaggttccagagtaaaagctgtaagatctttgtgtgtatgtgtttaaatgtttgtatatgaacatgtattatgttgtgttgtatctagcatggtaccaaactggtttataagtaaattatactcataaattaagtaagtccaaatacttttcagattcatgtgaacttagtaatctggtaaataaaatggttttaaaattattggtaaaataaaactagaaatgtcttcagaattgtcagcatacattttttttttagtctgggtttactgattattttatatttgcctccgctaggtgttttaaggtatcaggatttggcacaaaagattataagactataaacccagtcaaaaagagaatgatctttgtgtgaattttttgacaaataagactaatttaatattgttggttcaatgaaaacagctaagttgttagctgttttgttagcttctgagttgttggcaaaaatatccacatgtttaaggttctgacttaaatgaacatctgatattcacaggctacaaaaatggttaacaggtcatacaggttactaaacagctgatgactcgtcacatagaacttacaggtaagtcactgttgtaaccttgctttttggctcttctgttgctcaaaaggtttttaagggttaatgagtgcctgttcacctccatcctcatctggcctagaatgtttaattggctcca

SEQ ID NO: 1880798 - DNA, 4001 bp, Homo sapiens; identical to SEQ ID NO: 3525

SEQ ID NO: 1880799 - DNA, 4001 bp, Homo sapiens
cccccatttttttttctcttattcacctctaggactcatatggcaataggatttgacagggcttatttgctggcaaggaaacatcaaacaaatcttttagtggaaaaatacatttatattataggcaaaatgcagatgtatattgctactgatgcaaatgtattttactaatggtgtgagaatttcttcctcactgtggtgtgtgaatgtgtatgcatatttgcatgcgtaaaagacttaatttgtgaaatggaagatgtttctccacttcccactaagcatggctgtaaaagaaactttttcctctccccgggcattgcagcacactggaaagatgatacatccacagaaagcctggctttccgaaagagcttatgagagaatgttccccccaggttggttaaaacatatgttaatcctgtggcagagaagtttgttctagcctttgggtgtagcccactgaataagttcacagtgatctatgtcatagtttccatgcattgaaatataatattcataccccccaacgtacatcaatttcttacaaaaatttctctaattttctcctgctctgtattttgtttgatagctccttgaatggcttccactaaattcaaatgtatttgactctaaagtgcaacttgtaaaattttatctggtaatttatagattgaatttcaagtatacattatttacatgaagaactactagcaaatcgtatgattctgtttgtatgaaatgttcaaaatggcaaagatataaatacagaaagtagattagtggttgccagaagctgcagatcaggggtaacagctaaggagagtggagtgcgttttggggggtatgaatagttttaaagtttattctgatggtggctgcacaactctcaacgtattgaaatccattggattgtatgcctaaatgggtgaattctatacattaattatatctcaataaagcttttttttttaaaaaaaaagaaaaagaactactaggacatgtttagaatattatttcaaaggcttaaacaaagctgagaagtgagaagagccctagattccttctgggaaacctggcttaaatccagttttctttatttcccagatatgagaatttggtcactgagcaaataacatgattttcctaagtctagatttctttgtttataaaatgaggatgaatatgctaccctacctataccgcgagctaaataagctagtatttgtaaaggacacacactcacactcacattcacacacaggtatgtatgtatgtgtaaaactgtagtgacctaacccaagcactgagtatttgttgaatcactatctgcacacagcatctggcaaatggatgcgtgtgatttttctggggattagaggcaaacgtatactgatggaaagccttcctcaggccataacaaagggagaaatgctgagtccctgaccctgccgccaccatgaactggtgagagaacagaatatattcaaagagaaatttcattgttttaacttgcaagtgaggggagcatgacaccgttaacagagattatataaattagtcaaactgagaaccaggcgaagagcttagccgtcctttgcatagttagctacattggctctttttcaattagactggccattatgtgggtgcactcatttagatttgaaaagtcacccattattttctctgtgtattcattccagcaccctgacaatcttcacaggaaaactaaacttatttcttgaagaattcctcaatcttatacaagattttcaactgggagtttcatgaatcaaaaattaaatgaattgcacataaagccatggcatatgtatttgtactgcattgtgggagaaaaaataattattataatttaaaaaaactatgtcttacctgatttcagaaataaaagaagtagaagaaccacttccttatgttccattttgggactggccagcagtgcccagaaagtgtgtcccagtcccaggatgttgttgacttacatgagagtaaacgcatccacaaaccagatagtcaaattaagttaatgattctctcagacacccacgccactggctcagcagggttcaaacataaccttgaataaagggtccttacaaaatgattgagggtggaatctgcaatagatgctgggaagtggtgaaagcaatctcccgcctcagctgctccacgctgccttcatgtctccttactccttccctcacccttgtacttcatctctcacaattagtcttatttcctcccctcttcttttattccctttcttttggagaaaatgaactcataaaagtatctcacatttgctggaaccttccatgacaagaccctctgccaagcactgcacgtccatagcctccctcaagcttcccaacaggcagtgctgttctcattcctgctgtacgagggatggggttgaggccttccccaaggttgtgtcgctacccaggggtgcagctgatagacaaaaccctttcaggtcttggatgacaaacttaagttaggtataaatgttaatatctccacatcctacatcaaatgacatagaaattatgacataagtgaaagtatcttattatcttcaaaatttctttattcccagtgaactcacatgttttctgtaattataacttatgttataagacatcaatctttcccccaaatgaacgtatggcatattattatattctcattctcatgaaataaagcaagactggtagcactaagtggaaagcgtctatctcaattttaaatgttgaatctgtacttttccctggcttaagtctagagcaaccaggtagtatatatgctgtaaaacttctattttagtgttcaaagatatttaggaataaatcaattgacctctctatgtcagatgtgaaataaggaccagaaagcattgttcctctttccaggcagtgaaattcctgcctattcattaactggcaaaagagtagaggtgggagcccagtggtcttgggtggaacgtcctgcggaattccctgggattgaggaaccatgcagaaccctcaagaagaaaccacactgggcaacaagagggtggccccacgtgagggacagggggaccgaatcgcatttcctgatttcctattttagcctcactctcttctctcctcaaattcttaccactccctttatcctctctgactcacctcatggcccagttcattaaaggggacagaaggtggaggcaaattgagaaaccagcagtgggcagatgttttatttttaatgtgaaatgtctcttagggggcttatgttgatgtgcttgagaaagtacttcgggaaaaaaaaaaaacaaactctactaatatataatgcttccagcctgtatttatttccacttaaaatattattgtagcagttcctcttggataaggcaccttgggaatgatgttatcagaaattctacatccacataattttcttttcctgttgttttggttttgagttgggtggtgttggtatagcttttgcccacctttcccctggtagttgttggatgcattaaattctacaaatgtgattttataaattagttgccctcctaatggcctcctggctgtacattcttccctaccttcataatccatcagcatcgtgaaagcacagagggacactgagcagagttctgtgctggcgccaccgcactctgtagcctgtaagagagcagcaaagaggaatgagttgctcaggtatagacgggggtgggtgcatagagacttccgctgtggcacggcccttcatgtccagggtaggcatgaagcaatggactattccagattgtgcataggaaaccacactgcactcttagagggatttttgctctaaagacaactaattcaaaataaggtgctttctacctgaaagaatggcatgaactgagaaaagagatatatagagagatctctgtgtactacgatcaggttgcacatattctgagatttatgtattcttattta

SEQ ID NO: 1880800 - DNA, 4001 bp, Homo sapiens; identical to SEQ ID NO: 3532

SEQ ID NO: 1880801 - DNA, 4001 bp, Homo sapiens
agaccccatctcgggggaaaaaaaaaaaaaaagtcagattaatgttattggaaaggaaagatttaaagaaatcagcacatatccaaccccaactcttctagagataccttaagtttctgagacataagaatttacatattacatttatgtattgagtggttcttaagcaggagtgtatccagattttgagaaaattgttgttgctgttgttgttagagacagggtctcattatgttgaccaggctagactcgaattcctgagctcaagcaatcctcccacctcagcctccctagcagctgggactacagccatgcaccaccatgcctggcttcaaggaaacattttcaaatatacatatccaggatttattagacttactgtatcaaaatattcagaaaaagcctagacttgttgattatttaaacattttcctcaggttactgggatgcacaattctagctgaaagctagtgcaacagacaattatttcagtctcatttctcacccacatgaccaattccctttctcatttgaagatttggccaaaaagagtaaggagtaggagagagacccatttgctgaaaacaccacatgattttccccagtaagagaagaacagggtctagtcaactcaaaatccaacttgattttgttacttatttatcttctaccttcccatccagacacactagatttgaaagcagagctgagactctaattggccatttctaccagaataggatactaagtcagttaattacttgatattccctctgctcaagggtttcctcttacattaccacctgttcactgcctatctggttcctcagaggcctcctaaaattgatctctattcagtttccaacccactaactccctctcccaaactgaaaagtgtcgttctttaaaattgaagagaaccttgtctcaccatacaaaggaaacaaatcaatcaacaacaacaacaacacacacacacacaacttcttcgtggtcttttccctctattacttaatttccaaattggccttgatatttctgattgctctctttttccctttccacttctgcctcatgagcaatcagaaatatcttaaaccttgccactgacaggcgcatcacctcgtatctattactgttttttaggaacttgccaaaggagcaggatctctattcactgaaacatgtttaacttttcttggagttttcatgtaaaacctatttcagggcaaattttgccatcttacattcattaggggaaaaaaatcctaggagggaaaaattgaaaaatagtaagtattaccttttacaaattcagtgttttcaacaaaagtatttaccagaagtgcatttaaaaaaaaaaaactgtaccctctaatgcttctttgaaaataacaatatttaaaataaagtcttagataattaggtcatttcaaaatattttcattcaagttatgcttgagcttccaaatacggaagactggcccttacacaggtcaatgttaaaatgaatgcatttcagtattttgaagataaaattggtagatctataccttgttttttgattcgatatcagcaccgtataagagcagtgctttggccattaatttatcttcattgtagacagcatagtgtagagtggtatttccatactcatctggaatatttggatcagtgccatgttccagcaacattaacgcacattcatcttcctggcattgtacggcctgtcagtattagaccaaaaacaaattacaaatcttaggaattcaaaataacattccacagctttcaccaactagttatatttaaagcagaaaactcatttttatgctatgtattgaaatcaaacccacctcacgctgatagagttggctactgcatacctttgtcagagctgtcctctttttgttgtcaaggacattaagttgacatcgtctgtccagcacgagttttactacttctgaattcccattggcagacgccagatgtagagcagtcctgtgagagtgacaagactttttaggaaattgtagtgcactagctacagccacattaatgattcatgtacttgcaaacactgaatagcctgctattactctgccttcaaaacaaacatttaactttcccatgaaaaaagcacactattttctctcattgctcgctgtattaatgaaagagcagcctatatgaatacaaagagcatagcccttggatgacattcaacttgggctggaatcctacttgaagctctgtcacttcctagctgttgcttagccttttggggtctcagtttcctcatcaataaaataggaatgagaatagtagctttctcacaggaaaccaccgtaatgcttaaatgagactctgcacaaaagatatagaatagttcctaacacaaataacagctcaataattgttagatattataatttttactgataccactaaagacaacatttgaattgagatgatacaattatacctacactgaggtgtgttttaaatattacagctaacattgtattttagtgattctgagatgatcattgtctccatgttgtctccactgaaataccacttacaattcatgatttactataattggcggcatttaaataattctcttattgagacataaaataatggggcatcatacaatccctggtgtcttacattaagtagaatatgttataacaggtctggggcggttccagtcagatgaccagcatttagataaattttagttcttaaaagaaccatggaataagaaagctgaggcgaaaacaaaaataaatttctaaaataaaccaattcttactttggttttcaataaactttaagccaaagaaaacttggaattcaaatgaatagcatgggctcatttttgtcaatacttagatttatacaatatatctacatcaggtatttccaatcattcatattaggatttaagactgttataaatgttctctttttaaaatggatttatgaaactatttgtggagcttttttcaacttttacattcaggggtacgtgtgccggatgtgcaggtttgttacataggtaaacgtgcaccaagggggttggttgtacagattatttcattacccaggtgttaagcccagtacccgttcgttctatttcctgcttccttccctcttcccaccctccaccctctgataggccccagtgcgtgttgcttccctctaggtatctgtgtgttctcatcatttagctcccacctgtaattgagaacatgcagtatttggttttctcttcctatgttagtttgctaaggataatggctttcaacaccatccatgtccctgcaaagcacatgctctcgttccttcttttatggctgcatagtattccatgctgtttatgtaccacattttagttcttaaaacaactaaaacagtctttatccaagacttgcaaattttcaaaagggcagttaaggggtgtcttttactattttctaccttcagaaatgcttctgtttgaaaggagggaggaaaagcttcaactgagattaagtcctaatgcaccaattttaaatctctcagcttgctcaagcccagcaggtaaacatgaagttttcaaagatggaaggatcctgagagacagtagaatatgcctgccacataacaggtgtctggcttatgtctgatgactaaatggattgaaagaatggataaacacagcttgggagttcagtatttttaaagaaaactcctgtagagtagggcaatacatttccaatagtaacagtcatttatatttgctattttaattttcataaatatataactcaactgaaataattcatactttttacatgttaatctatatataatgaaaaaataattatgtaataaaatgtatatataataaaatctacaggaacaggtaaacacgacccctctacttctgaagagggtaaaagttcacagaagatagccaaccacagaaagaaaaataaataatagaatgt

SEQ ID NO: 1880802 - DNA, 4001 bp, Homo sapiens
taggacgaggctgtaaaggtggataaagccggctttacagtctgcacctcctgtgtgagccgtggaagcttctggagggatgggcgtggcgtggcgccatcatctctctgcattctccttgggagggctccagagccactggtcacgggcagctgccaggctgggtctggacaaatgaggtctgggtccatcattggggatgggggccactgtcaggatgggagtctcgcctaaagctttggggtgaaggtgctgatgaccaagaggaaactgcggggtggggacatgtcagcaggggacgagaatgcatgacctaaaaggtatccaaagttaaggctggtgggggcttagtgaggagcagcagagtggggtggtccagaaccgtcaggatcgggagggggaagatggaacgagacagcagctgcctacgagccagggagcaagagctctgtgctttaacctgaggagcaggagcctgggaactggagactctgggtttgaggtgggggatgaatctgccattaaacaaataatccccttcccccccaaaaaaatcctcagagcactggggaagggaagtgtcccagtgactgagggaggggagcgctgtggaaggatgggtcggctacagcaacttcagcccagggatcagggaagagagggtccagtccctggcccagcggggagcaggcccggtgaccttgacctgagcagccccagggccagagggaggggtgggccggaagggcccagatgcctccctgcacggggggaaggggatgggctgccgggactcaccccctaggttggaaaatgcctccctctgggttggaggaggagaaaggccaggaaggagagggagagggacatggggagggttccctcctggcctgaggcctctctatccccaggtgttgagctgagagaagtggtggggaggcccctgggggtggggaggcccctgggtggggagatttaagatgacagctggtcttgggcacattgctctccattcagaaaggccccagcccctggcattcttccaggagggggcttgctttgccgccctgcagggggactctgcagagccggcctctgccatctcatgtccaggaccacaacctgtggccccggcctgcgccgggccggagctccgcagaaggaagccagcgggaggcctcctgcctttgactgccgtgcgtccagcctgcagcgggcctcagggggccgcctcgatccagcctgcccgaggctcccaggccttcgcccgccttgcgtccagcctgccgggggctcccaggccggcgcccgagctctggctccgtgtcttcactcccgtgcttgtccgaggagggagggagggacgggggctgtgctggggcagctggaacaacgcaggtcgccgggccggctgggcgagttggccgggcggggctgaggggtcggcgggggaggctgaggcgcgggggccggtgcgcggccgtgagggggtgtgagaggtggctgacggcgccgaggagcccctcagaacctgcaggtggggggagctcccatatcttacgggtgtttcgggcctcacctctccatgcctctcgtcagcctctcccgtctgcgtggtgggggctggggagtgggtccgccgggacctcgcgagggaggggcacaggaggagccggcgggggacgccacccaccctcctccctaggagtgcttgagccctagtcctgagtcttggaccagctcactcggttcctgtggcccagccagcctggcctgggtgccccgtcacagctgagcccatctcagctgagcccagggtgtgtcaccgggaagctcagctggcacctgccaccccctcccccaggcacgtttccctcccactgcccagcccattaccatcatgtgtccggctgacctgtgctctcctggtctgggcagcctggatgggtgcacagggccccatcacagcccacaccctcggagagacgcctcctgagtctgctcagcctggcacaggccccaggaaaggacccggaggggcggttcctgctctaaatcctgcccccacgggggtgggactggggcagaatcccatcagtgaataaaggctgcagagtgaaggatggtccctggcgagtgtacctgtgtcccagtcttcttgcctgagggcgccttcccacccatgtgaggagtggggaaggagcaccccttctctactaggccccagggctctcagagccgggctctgtcctcaccccagctggctcccacaaggccctcctggccccagactctgttggacccccaactccccctccagcaggcatctggaggtaaggaggggcggggggcgcaggtgcacttgccattcccgctctgtctgcagcatgggcacatgtaagtccaggccctggggaatccctggacctgcagcccctgcggaggactccctccccctctagctcaagccagagccccctgcatcagtacattccagaactcagacaggaaaagagggcaaggagggagcgctccaggataagaacccctacctcggccctccctcgctctcccaggcccctctgacaacctgtctccttgctgtcatgtcagcaggcacagaggctacaggggccaagcggcagccgcccaagcccggattcgggttctctgttcccttctcttgtctcgggctcctccctgagtgtgtgtacttagagggtgcggaagatcagcaaactcagtctgacccaggcattcaacctctgggtagttacctagtcctgggtccccaccccagatggcctctagtgggtaagggcttcctggaccccaggcctgaggggtgacttctcttgcagtaagcgggtagggcactgcctgcgctgctccaggccctgcctgcagtggggctacagatccctgctcccacctccaggcagggctggagctgctgccagctcccccaggacagcctcgagccaggtgcctctgcccgggctgaccccgccctcggtcccggtcctggctccctctcctgcctctcctccctggcctggccttcacttcctgctgaccctcaggagggcgtaaaagaatgcaggacctgctgcattccagccaccctggcccagggtcccagaacaggatgagacaggcccctgaggcggcagtcctgaggaaagttgctggaattcctgctgacaacgcccccccttgaccccacccctctgaccaagccaggctcctgcttccacctctccactgtgcctgacctaggccagcaccaggagggccttagaggcgggggacgaggcccagaaggaacagtgtggccccgtcagtgtggagtcctgagcttaggcagccggaaccacttgccccctcactgtatagctgggacgagacctcatccctgtaagccccggttttctggttaataaaatgaggattgcggcagccttcatcacagtgcgatgcacaccctttaaaaaatgcagtttttcctgatgccacacacccattccaggtgggccctgaggtgtgcacagcagggctgagagctgactcaaagcctgtcctgtccccactccccacaaggaggtgaagctgtctctgatggcagtgccgctgtcactgcctcggacgctggagcagagtagctcatggcaggctgcagaggaggggactccacaaggacaccaggaggcacagggtgcaccctgcagggcttggggcatggtccaatgaccctttcatggggcctgccagctgcaccagagcacacctgcccccataccagactcgtgcctggggtcctgcagggccactgcctctgaccagcccactgttggtgggatctgccgtccttgcagtgggagcttggtgccccccagggctggtgtgggaagagagggggattggattccttcctccttccccatcctcagacatgggcccaggcaaggggtgcctttcgggcctgggagccttctccacac

SEQ ID NO: 1880803 - DNA, 4001 bp, Homo sapiens
ataagaaagaatgagttcatgtcctttgcaaggacatggatgaagctggaaaccatcattctcagcaaactaacacaagaacagaaaaccaaacaccacatgttctcactcataagtgggagttgaaaagtgagaacatatgggcacagggaggggaacctcacacgccaggcctgtgggcaggggtggcggcggggaggtggggaggagataggggagggatagcattaggagaaatacctaacatagatgatgggttgatgggtgcagcaaaccaccatggcacatgtgtacctatgtaacaaacctgcacaacttaataaaaaagaaactgtaacacaaaatgagattaataaaatttaaaaagtatataatattaaaacatgcatagacaaaagactagaccaaagcacaccaacatttcaatggcgcttatctctgtgtgctagaattgaagatcattttatttacttcttaataatcaagaaaagtgttatttatgaaaaagatagtgtataagctcctcccactaatttaaatttcccccaaaaaagggcttagtagacaaatgttactttagaatggacaagttttgaaaatatattattatcaaggcttgtatgaattgaggtggagacatttactttgatctctttgaattaccacatattgcctagaaaacactctaaaatagaaagcctcacagactgtaatggaacagtttttgttggtagtgatgagataaaacaatcagacattttagtaacactatttccttgattgacaaaaatcaaaagggaaacgataattacatttaaacacacgcacatggcctttccctggtggaaaaaaaaattgtatttgtgctggtctcccttaagtaatttttcaatggtcctctttcaagttataaatgtcaaccaatttgaaagcatggtaaagaggaaagaaatatgtaaacaaatttcataggaaaagtacagctgatgaaaacaggaatctaatcaagggagttttcaaatatcaagtttccatcacattgaaaggtatttgttgtgactcagaaggatgatttatttcagatttggcatttcctgtgagtcacacttttcatctggccatcttagaatattttataaacacgaacctcaataacatctgtattattctctttgttttataaatggaataataagtcatcaaagagcttataaagctgacagaggtcacctaggatgagactgatttttgtatcagcacctttccctgagacagccctcaattaggatttgagaactccacagctcctgtcctagccatttcgaaacatggaacccatgtttttaacttttaaaaatatttatgtatggagacatgcctagggaaaaaaaatctctctttaaacacatacatactgatacatatcacctatctattcatatagatacgaagatatcatagaaagagttcataaccagtaaaatggcaataaaatgttaactgccagagcccagctcctgatcatggaagtctgtttctgtttaggcagccaaaaatataatggggaagtctgtaggaaatagaaatgtttagaattttttcctaaccttttgtcagttgtgatgattctgacgtctcttaactcttgatcagatatcagaggtttctgaagtttcttggttcgtggctctccaaggtctcggtacatttttcactgtgtccttaggccaaaaggagtacctagcagttcaaagtataaagtaaccgtcaggtaggaacttaacaagagtaattggcatgatgtccgacagatggcgctgtgctttccctcgaaaatttaaattacttcgcggtgctcttagacttcactgctggagggggtcgggggaatgtatgtggaggtcggggtggtggggtggggtgtgtgtgtgtgcgcgcgcgcggggtgtgtgtgtgtgtgtgtgtgtgtgtgtgtgtggcgggaggcggttagcgggtagtggggcgcggggggaggggtccctgcctggccacctgaattcagtttgtaaaccacagctgtagatcacacatacattaggtgaagtttgcagaagaactgggcttggtagaatttgaaaacggatgaaagacattccatggaggtgcctttctctcatttgagaaacaccagaaagttatctggttctaataaaaaagtctattggtgtcctttaaatctaattactatggtgcttgccccaatgaagagggaaaagagctgtctcttctactcacacataggaagcctttgtcaagctttagctatctcccttcagacaaaagcctccaaaattacaaaaccactaagttgttttgtttgacttaatcttttcctgttttgttgtctatgaatccttctccaacccacacagtcttaaagataacaatatgaataaaattcatttctgcttgcatctgaatcacaccaaaagaaatacacagatttttgtacatacagtaactttgtctgggacagtcagacttataagaataaatgaaatttgtttcctggaacattgaagagatacccagaagaaataggcagtcttctgaccaacaggtactaaactttgctagtaaatctgtgtgcttgccagttggatgagagcagttgcatgtattaggatgctctggacagaagaaataatggttttaaatgaatctgctggtgagaagttataagagtagaatccttatttttattggtttgaagttacaagaatagaatcctcgtttttgtgtgtttgtttgtttttgagagagcctctcaccctgtcacccagcctggagtacagtggtgcgatcacagctcacttccgccttgacctcccaggctcaagcaatccctcaagcaatcctcatgcctcagccacctgagtagctgggactacaggtgggcaacaccacgcctagctaaatttttaatttttttgtaaagacggggtcttgctatattgaccaggatggtttcaaattcctggccccaagcaatcctcctaccccagcctcccaaagtgctgggattacaagcatgagccatcacacctggcaagagtagaatcctttaaattgcaggtattgatttgctgtggaactctttctcctgcaggcaactccatgaggcatgtatttgggagaagaacagcaggaatttattatttatttatttatttatttatttatttatttatttattatcagtgattagtctcctaagccataccaggaatgccagagagtttctaatgagagtaaaagactttgctcagagataagtgctttttttccagaactataagtggagtgtctgctaagtgccaggcactgtctaggttaaggggaggatcaggggccatgttaggggctgaactaggatgactcttgctgtcactgaacttagcctggtggttaagaacaacagagatttttacatctcagaggaaacaaagatatcagggaaattcgctttactctcttaccttaatttactctttttaaatgagagggttggaatacatgatctctaagccctagtgctctgattctagcaccatacaaagttcacttcaaagtcagtgaaagagttgcagcaacataaatagacctcagggtataaacactatgtaatccaaagggaaaataaagatgacagactacatgttttaaaataaactcactgtggtttttaattctcatttccaaccttgagttttatgagtattgatttcctaagaaaagaaagcctacaactgctaccttccttaagtacctttatattcattttaaataaggccattaaaaatttcaggcctagtatatataactttcagtttaaatgttctcttaccctcacttaaaggacctttttatgtaactaaaatgtaaaggtttaattttggacacatacaaaattaagcttgacatctactgagcatttataagaatacctttttttgctg

SEQ ID NO: 1880804 - DNA, 4001 bp, Homo sapiens; identical to SEQ ID NO: 3554

SEQ ID NO: 1880805 - DNA, 4001 bp, Homo sapiens; identical to SEQ ID NO: 3555

SEQ ID NO: 1880806 - DNA, 4001 bp, Homo sapiens; identical to SEQ ID NO: 3559

SEQ ID NO: 1880807 - DNA, 4001 bp, Homo sapiens
accttttcatgtccaccttcgagaaaagcagaatccagaacaaacttcacatctccaccatcacagaaaagtgccaagggtgtggcacagccttgaccaacttttagtttttctagcatggctgtttcatcagcaaatcgcagatttccactcccaacacctaactgcttggcaagctcatttaaattaatttgtctatcatgaagaactgtcaccagccaataattctttttctttttgtctttaagaaataagttcttactatgtgctcctttcagatgttgaatatgaggcatcatttcttcaactgtaaatagctataagatatcagtaagttttaaagtaatatgcatgtttacatatgcacacgtttatacctattttgcctgctgggtgaaaacagcaaggtttgggagtgcctatcgccctgaatttcactgttaaagacccatcttcacccctttaccaaataattacttataagcccatgccatctcatttcctcatctcaggacctcaggcagtttcttcggccagttttgtattccaatgtacttgccaagatctcactcctcagcagctttttatttctaaatttaagcttttggttactgaaagtttacagcagttctagactcctattctttagcattccgttacgtccagaccatgtgacaacctccattctacaaatatgtaaccacaaagaacgtgagtggggaggcaataagaacccagactaacagaacatcagaaaagctggcatacgcacacataaagaagggggagaatataggactatatgggagggaggaaggtcacagaaaaggattacggttttgatgttgtatttgtgaaggtgaggaatactaactatatttctctactctttgaagatcaccatatttagccattatctatcaactgttaagccttgggtaaacttcatgtccttgcaccactcaagttacacattggctctgtgaaatatttgcaagtggtctggcgcggtgggtcacgcctgtaatcctagcactttgggaagcccaggtgggagaatcacctgaggtcaggagttcgagaccagccagggcaacatggcgaaatcccgtctctactaaaaatgcaaaaattagccaggcgtggtggcgggcgcttgtagtcccagatattcgtagtcccagatattcgggaggctaaggcaggagaatcgcttgaacccaggaggcagaggttgcattgagccgagatcgcaccactgcactccagcctgggccacagagactctgtctcaaataaataaataaataaaataaatgcaagtaagactttctatcaaaacacaacaaatgttacaatttatgaaaatacaggcatgtcaattttggtaagcactttacgggtggtggtggtttctgccatgctgcatactttgtgatcaaccctgaccacagtagaaaaatatcactgtgaacctcagtgtcctgctctatgtatggtgcctgatacgtcgtacctactgaacacactattaaccacttgcttattttatctacacaaaaagtggacaaactgacccagcatcccagaccgatttaagatgcacagtcctccgtatgttgtgctggttctcaacacggaatgtaagcagatcactcccaagagtaaagatttccgtgcagtaacctcatggtcccaagatggaagtcctctgctgtccctgcagggtcactttcgtattttgagaccggggaaatattccaggagcgacgttctcacggtacattgaccctgggacacctgatctcagcggcctcgcccgacggacgtgcagcacagcccaccccgctgggcctgtctcggcggtcgcttctaggggcctcacctcggggtgctccacgacctcagtgtggatggccagggcaccgagccgctgctcgagcgccgctcccaactccgcgcccgccgtggagccgctatcgtggcgatgggcggaaaaacggcacggcttcccgcggctgcgcagaccgaagcctgaggcggaactgcccagagggatctcggccgacgccggcagcgtagtgctggtgcctggtgaaggcgggtccgccctgtctgagcgcctcgcccgctagtccctgaacatcgtccgctgagggctccggcttgcgaaggcctgcgggagctctcaacaggcgcctcgctgcggggcggcgcctgcgatctcacagccctccctgatcccacttcaagtttcccagatcaccatatcttctgttgacggtttgggagttttttgtttttcgagacgcagccttgctctgtcacccaggctggagtgcagtggcgcgatcgcggcccaatgcaacctccgcctcctgggatctagtgattcccccgcctcagcctcccgagtagctgggattactggcaccagcaaccacagccgtctaatttttgtactttttgtagagacagggtctcgccttgttgcccaggctggtctcgaactcctggattcaagcgatcctccagcctcccaaagtgttggggttacaggactgaaccaccgcttcccgccgcttttattgtttaaaccgcagataggcaggcggtgcccggtggctcacgtctgtaatcccaacagtttgggaggctgaggcaggaggatcgctcagagtccacagtttgagaccagcctgggcaacataatgagaccgtgtctctaaaaataaataaataatcaatagtcaatcaaacccacatagtaactcccagattagggagtgtggaaggggcccagatccatactgttctaaggcttttcaacttcttttgttgtaaattataattttacattttaccttttctgacagttcttattattgatctaagaataattgactgtgccaactatgactcaccttttcccaaggtagtttgactacctccaggtggttttaagctatcttggtgtttccagctgtaaaaagtaaagtagctattcctcttcaaagactttcctccccgtctaattaggaataaatagtaacttctcttagaagcaaaatttattcaaagacccttgcaaacattcttaaatatctgctagccataataaacaaatcagtgtactttatgttcttagctcccacaatttagcctaaatatttgccctggcatgcttatactggtccaagcaagcattaggtcatagcgtattcctcttccttatttaaaagtgttcttacctttctcagcattccataagttacttcctttgttctcctctatctttgcctcttttaaaaagttctaagttgctagccaatcaagacaaatacagaatgtgaggtcccattccagccaatggaaaccggacacagcagtacggaggacgtgtcaggttataaatgaccctgtctcctttgttgggtgtactctcctggcaaaactgctggcaagtgtaccctttctgcaggaagtaaaaatggccttactaaataaattaatgttcaagtgctatttctttacagcaccggggaacaagcatttcaaacacagctatcctgggaaacactccccacttgaatgaggcctggaattccaccttagaagttcatttatgaatttagattaaggctcgaatcccagataacacatagatatacctaaggatatttaaccttagtgtgaatgggtcatttctggggtgcaaactgaacggctggagaaggaagcctcttaagacacagtaaaatgtcatagtccttacctgcagccctggaggaagctacaaaagaggaggaattcaaagtcaacctcacagtttcacccagaattggccttggatagcacaatttcaaaatgtctcagtttaacctacctctttaatgattaaatcatggtttcccttcaaaaactccatctaattatttgatctctgattacaggatcaacaggccacacttcccatggcctgctaaattcagatcaacaac

SEQ ID NO: 1880808 - DNA, 4001 bp, Homo sapiens; identical to SEQ ID NO: 3581

SEQ ID NO: 1880809 - DNA, 4001 bp, Homo sapiens
tttgaagaaaaatggatggataaacaaaatgtggcatatacatacaaacgaatagtcttcatccttttttttaaaaaaaaaaaaggaaatcttgacatgtgctacaacatgaatgaaacttaagaaatcatgctaagtgatgtaaccaagcaagaaaagacaaatacttatgaacccctttatatgaggtaatataagtagtcaaattcatagaaacagaaatggtagctgcctggagcttgggagtagggggaaagaggagttatttagttttgcaaaatgaaaaagttgtggagatctgtttcacaacaacacaattatacttaacactaccggatttcataattaaaaaatggttaagatggtaaaattgcattatgcattttttacttcaaaaaaccagagcactggttgggtgcgtcctgcccagagtctgcagctggggtactctgaaaaggagagcaactacagcctcccacagctgactgcaggaacccattgctgccaaacctggagcaagggccgcacccagatggccaccatctgcctcaacaaccacgaagctgtaagagtggggccaagtgggccaaggtgcccgagctcaaggagcacaacgggcaggtaaaaggcatcaactgggcctccaagagtaacctcatcgtgacctatggcacaggccacaaggcctctgtgtggacgctgacgggccaggagggtaagcccgcacccactgcctgctgtgtgtgctgggcccacaggacaagtttgctgtgggcggcagctgtgtgtcatcgccatctgttatttccagcgggagaataactggtgggtgtgcaagtacatcaagaagcccattggctccaccatcctcagcctggactggcatcccagcaacgtgctcctggctaatgccccctgcgacgtcaagcatgggatcctcggtatacatcaagtgcgtggaggagcggccggcacctccaccatgggactccaacataccctttggggtgctgatgtctgaggccagcggtaggtgcggctgggtgctcaggttggcttctcagtcagcgggtgcctcacggcctgggtcagccacgacagcactgcgtgcctggctgatgccaacaagaggagggccttgcaaccctggcccccaccttcaccacagaaggcagcctggtggcagcaggcgacgactgcttccgggtgctgttttaccctggcgcttggtgggtggctggatggacaaagccaggtagagccggcagcgcggcttgcggcccgccagactccagagccccgagcgagcgagagggcggcagggccccgggagcggcctccactcgccgcacaagcacagtctcagccgggtctggcccagagctgcggttctgcgccccaggcatgcccagcgcctgagggaggacctcaggaccaagtaacctgcgaggagcacgctgccctcatcccagctgccagggaaggggccccgaggggctcggggaggccgccgctccgggtgtggcgaaagttcctagggaccagtaggagaccccgtaggggctgctcacgcagaaggcgggagaacaagtggggcgctcttcttacctgttcaaggaacctgtgcctttttcttgaagaaatgctttcatttatcgtagaaaaagaagagaaaagaaaaagcactatgctggtgacaaactgcttcgaagcataaaaaggtcattttcgagggaaaaaaatcatttttaaaaactctccgtttttaaaaatattaacccaggaattttatcagataattcctctccgacccaaaaaacctgtgggtggatagggactggagagcaggctgcctcccaagccccatccgctcctcccgcccagcacgagaacgtggaggaagtgactgggcgccccgcagatctgccacctcccggtctccctgcgcagctggccaccagcccagcctcctgcccaaccacctctcagggtacgctctatccagccaccctcgccttcccctgcaggaacccaggcagggggcgggcctcccggcttcctgcccacaggtgtgagttcctgtgggagggaagcctcccctcacgtagtggacctgtggtccctcggagcacggaggcactggcagcggagagccctgcccacccacaaattcagccaatcgcaaatggaagagggcaggacttcctttagtgccctatcagaagaaagaaggggaatgctgcttgcccagtattggctgaaatgaactgtgggtttaccttaagttacggattctccagtggttaaacaaccaggaagagaatgaacagaatgaacagaaagcgacactgctaggccaggtgaggcagaatagtctggaggcagggaacctaaggccgattcacactgactttctagaactaaatcaaaaggaaaaccccaactttctacatctaagtaacaaaaggactggaatactccgtttgcaagcaccctcttcccttttctgcatggcagacggaaaattgaaagcatctctgattggctgctttctgcaaccagacattggcataggagtgtaactttgtaacttcacttcagcctctgattggttgctttccacaaccaatgagatgcttgcatagggtgtaacctttgtaacttcggcctctgactggttgttttccacaacgacacttgcatagggtttaacctttgtaacttcacttcagcctgatgggttgctttctgcaaccaatcacactgattgcaggccactaattaatttacacagggtgtacaccaactaaccaatggtaaatccctagagggtatttaaaccccagaaagttctgtaacgggagctgttgtgccccagtgctcctgggctcctactctgtggaatgtactttcgttttcaataaatctctgcttttgttgcttcattctttccttgctttttgtgttttgtccaattctttgttcaaaacgccaagaacctggacaccctccaccagtaacacaaagactaggcttgcaggacaaactccatttccttttgttgtcaatttcttcaagcagattcaaaactaagtggagtaagtagattctgagtttattgttaagatttctttatttacagtacaagtctccaaaagttcaaggcagttatcttttaaataacatgtcaatcatataaaatagctagaaccaaagtagagaaatatatacaatacattaagtactttcaatatagtggcatttttcatattaaattaaaagaggctactatgatttacaatgtcatttccctagtttaaaattcaacatgtcaaaagacataatgtacattttttacaaaactgacacagcagtattaaaactgctaatgattgtagtttttattttttctataatacactgcacctgtgttaccaaaaaaaaaacaaaaacaaaaacattgcactagatggtttgaatactgcataagtcagtatattaacacttgaggaataatgaatggcctggtccgttttatgatcaggctcattcacaacagttttcactcttcaagctcagcaaactcctacaggtaattactttccttggcagttttacacaggatcactgcaaatgggtaaaatgtcatgaagctgatgaccacaatgccatcacaaaagctgatatcgatataaccctactatttacaatacctaataagagccaaagctagaaaatcactcactgctaaatcatggaaaaaattatagtttgtaggaaattttgaatatctataaaatattcaatagactacaaaagagcttgcaacagcttgttctcattatttttcttaggtcagaattagaaaaaagtaaatcctattttttaataagttttgatggcatcaaaaagcttcacatttataaataagatttttatacaaagcaacatgttactgacatagttttctcttgctactatcaattattctcgggactcat

SEQ ID NO: 1880810 - DNA, 4001 bp, Homo sapiens; identical to SEQ ID NO: 3601

SEQ ID NO: 1880811 - DNA, 4001 bp, Homo sapiens
caaataaatgaaattttaaaattagtagaatgagacagaaatactttttaaagtttttaatttctgatgaatatcagtatataaaactaacaattatatggccgttaattgactaaaaacagtactttagatttcagctagtgaaacagccatatatgatcttctaattccatttttatgtctcaagaatgacttgtttaaataattttttttgaattgttacattttcatcttgaaagagcttcacaaaacttacatgagaatctggattgtcataagaggtctgagtttttaatggtatgttcgtatttctgttatgtacatcgatgtcaaacattcatttcctgagctgttctccagaacacaatttgacttgtaatgaacactcaataaatggttgcttggataatcaaatcaacaccttagtttcatcaattttcatttcatataaaagtgactgatcttccatactcaccaatgaaacagagagagatgagggagggatagcagtggagactaagaggatgacaagcagacctcattttgcagtggatatcctacactctccacttctgaatgcttggaaacacttgccatactcaaaaaacattgctatttcctaggcagaaaatgggagttaaagaaaatccatatttctatattacaataacttacactataatacatggacgacatacatttctaagctcttcagttcatagaaaatgtagatacatttaggtgagcaagatgcaggagaagggttaataatcaggctgagtgtgattgtgagattcagtctaatacaagtcttgggtaattgtatcagttgacatttctgttcaaatgcaaggtgggagagttttgcaggagctactgaaacttcctgcctgatgttaggagagatgttggtccatgtgattaggccagatgtgtttgcttaattgtggcttagaaaagttaggtttctgacctctcacagagacggggagatagggacgttaaattttataacatttctatttaatatatatttaataatacataataaagtttttaaaatgtcaattttgtcctttttctagtttgcattattttgttttcaccgcaccattgtttttagtacatatgttttgtgtatttaaaaaactgtgttgaggcgccctggctcgccctgcgccagaggctcgcgcactcagcaggttgggctgcggcggcggcggctggggaagccgaagcgccgcgcgtgagagatcccggatacatctgcggtttgggctccgccaccctccgtctctctcccgcaggtctctgagccgggtgcggaaggagggaacggccctagccttgggaagccaaagcacacccctggctcctgccgacaccgccctccttcccttcccagccgcgggcctcgctccgtgctcggctactctgccgggaggcggcggcggctgccagtctgtggcgagccctgctgccctccagccgggctcctccagccgggctcctccaccggcccttgcaggggcgcagagagctcggcgcccgcccttccgctcgcctttttcgtcagccggctggaggagcatcggtccgggaggtctctgggctgaggcggcgacagctcctctagttccaccatgtccgcgggcggagacttcgggaatccgctgaggaaattcaagctggtgttcctgggggagcaaagcgttgcaaagacatctttgatcaccagattcaggtatgacagttttgacaacacctatcaggcaataattggcattgactttttatcaaaaactatgtacttggaggatggaacaatcgggcttcggctgtgggatacggcgggtcaggaacgtctccgtagcctcattcccaggtacatccgtgattctgctgcagctgtagtagtttacgatatcacaaatgttaactcattccagcaaactacaaagtggattgatgatgtcagaacagaaagaggaagtgatgttatcatcacgctagtaggaaatagaacagatcttgctgacaagaggcaagtgtcagttgaggagggagagaggaaagccaaagggctgaatgttacgtttattgaaactagggcaaaagctggatacaatgtaaagcagctctttcgacgtgtagcagcagctttgccgggaatggaaagcacacaggacggaagcagagaagacatgagtgacataaaactggaaaagcctcaggagcaaacagtcagcgaagggggttgttcctgctactctcccatgtcatcttcaacccttcctcagaagcccccttactctttcattgactgcagtgtgaatattggcttgaaccttttcccttcattaataacgttttgcaattcatcattgctgcctgtctcgtggaggtgatctattagcttcacaagcacaaaaaaagtcagcgtcttcattatttatattttacaaaaagccaaattatttcagcatattccggtgataactttaaaaattagatacattttcttaacatttttttcttttttaatgttatgataatgtacttcaaaatgatggaaatctcaacagtatgagtatggcttggttaacgagcagtatgttcacagcctgctttatctctccttgctcttctcacctctcccttaccccgttccctatttccgtgttcttacctagcctccccccacttcctcaaaacaaacaagagatggcaaagcagcagtccgaccaagcccactggaattatcctttaattttacagataccacttgctgtaggctgtggaccaagatgtccagaattattcttgagcactgatgtaaattacttagatcttctttgaggtcagaattcagcgatcacggtaggcagtgcttgaatgagaaaagcctcctggtgcatcttcaaaatgagtcctaaagaacatactgagtacttataagtagcagaacataaaatgtatttctgactaacacaaatggtcctttcacatgtgctttattagactctgggagagaaaagtaaccaagtgcttcagaacaggtttttagtatttacttcttcatggtaagataatgaagttctaatgaactatttctcccaaggttttaaaattgtcaagagttattctgtttgtttaaaaagtaagaaacctctgtaagcaatagattttgcttgggttttctttcttaaaaaaataatactatgcaggcaagacaccataaaagtttaattccttacagaagaaccagtggaagaatttaaatttggcactacgatcaaaactactgaattagcagaaataacgatatctaaagcttaccagcaaaagaaccctcagcagaatagcaaaaactttgctcaggacatttgaggtcaaattgaagacggaagacggaagacggaaaccggaaaccgttttcttgtaagcccctagaggcagatcaggtaaagcatacatagtagagggaaaggagagaatggaaataaaactgaatattatgcagatttatgccttattttttagcattttttaaggttgggtctttcaggctggttttggtttgtattagatctgtatagtttaactagtgatttagttttatatttaagctacgattaatattttttctttggcgatatttctttgctttttttttttttaacaactttccatttttagatgtttcgttgaatctatttagagcttcaccatggcaatatgtatttcccttaaaacactgcaaacaaatatactaggagtgtgcccttttaatctttactagttattgtgagattgctgtgtaagctaataaacacatttgtaaatacattgtttgcaggaagaaaacttcgagttacaggtcaggaaaagcctgctgaatttatgttgtaaacgttacttaacacagtataaagatgaaaagacaacaaaagtatcttcatacttcctcatcccctcattgcaacaaaaccttaaactgg

SEQ ID NO: 1880812 - DNA, 4001 bp, Homo sapiens
tggcgactattattagtatcataaccaaagctatggcaactctgagcctctgtgtgatgacaggtgatgtgcagctcctttctcctctagctccttacctggaaaccttctttgcagaaaggcattttcagaaagcttttggtgaccttgaaacattctcaggtgctctctgatgtctttataaatgaaacttaatatatataggagatacagttcctccttcatacctgtatagtaaaaaagccacaacataaatacctttggttaatctttctatagtatattattttaaatattagcataaacatgatagaaattaacagaatgaaggttaactgggggaaaagccctgagcagggagggaggagttgctgtgggaacactgtggcaggtctgaaactagatcctggctatccagcagagggaaatggcacatatttggaggcttttatatcatggtaataattgttttattaggatcaaagcatcccagaaagcacttgctctttccttctctccagtccccctgactctcccctgagcagggttggataggaggtttggtggggggaggaggcagggaacagtagaagaaagcaatgctatgtccctttcccccattgtctggccccaaatgtagtgccataaatatcaaaacagtgcttggtaatagtccaaaacatttaacttgtccgcaaattcctaaacaaccattggcgtgtaatttggttcttggcagagtgtaactgaataacttgtagacatgacatttgtgtgaacatctacaagagacaggccgttatcaccacccattcaacactccagccagaggaagaacagcaagggggccagccatacaagttcacctgcgcgtccggggtctcggttctgctgtggcccggctactccccattctcaactgtgttttcttcaccatgcaggtgatggaagcccaggcaggcccagggttcaaggccagtgacttcagcctgtcaccccctcagaccacatcgggcccaccggcctcctccctccctgcccctcagccctgcccgcactgccccccattgcgcccagcccttcctcaccccgcaggagaagctggcctctcattcctcactgagagactcgacgggcgtccccacgccaagccttcctcgccctcccctccagccttttctgaaggggagacagcaaaggtgagcaagcaaccgccggcaagtttcgacagctgctgaggaagactcatgggtttctaaggaaacagagaggcagcagccattttagtagcatttgctgtatgaaaaatatatagacactggcagccctctccccactctgccttggcgcctgccctcccgccccgcctcagaggccccggggtgagggtggggccccagtctccgagggacgcagcggacacctgtcgcaggtggccggccaccggggtcgccacccccagtgtcccccagcagcgggaccgcggggtccccaccccggggcggaatccccacccacgggcgccgcagtgcagcggcgggcgggcgggcgactcggccctccccgcacccgcgtcccgccccccgggtcccctccctctccccaccgccccaggccgcgggagcccgcggggagggcgggcctgtcgcagccgcgctggtcgccaggcgtccgggaggagcggggtccgcgcggcggacgaggcgggggcggaggcgcaggcagagcgagcgcgggaggtcgccgcagccagggacaccgcgcgccgccgctcaacatggtcgctgcgcacgctgcccattcttcctcctctgccgagtggatcgcctgcctggataaaaggtagctcgccgggggccgcagccgggggccgagctctgcggtgctgcccgggccctgagaccgccgcagctccgcacctgggcgcagcgcggccgggctgcgggtggccggggtccccgagcgggggaaggggttgaggtcctcgtccgggagacaggaggacaaggatccccgcctctcgtggggtgccagcggcatgagattattacacgtggtggagaaaatgcagcgcagtaaggggagagagcacccacctctccaaccccctgccctgccgcgactccaggctccgctcctgggtgggggtttattttctcttggcatcacgggacagaagaatcgatgcataccctttccggctattcagaccttgcggggtatgaagttttaaagaggggtgggggcaccggcaggtgcagagtaacattctttttttgttcttgaaagcaaagtgtgagggacccggtggagctgtcgaatcccttgctgaaattcacagctctctgcccccgcagtcgctcgctcaaggtctgtgttagagaaggtcatttgggaggctgctttcgtcttaatacctgcttctcgggaaaagatctttacgctaaaaataattaaaaccataaagcatgtaactcccgacgacagctctctctaaggaggatgtgtgtgttaacagtggattgcagttgtttccaggctgtgacagcataattttctgtttgtccagattgcaggtttaaacgttacacagtatgttagcaattatagcttattaccctgattaaaaggtgatgcatctgaacttttaagaactgagcaagaaatcttgcagagtgaactgcctctgaatttcggagtttgatgcagaagggcaatgatgcacgtcttgcagctatctgcatgacatctctatttgcatttgtgtgaaatattttgtgctctgccatattgaaaaattttcaattaacagattcgtaaccagatcaaacttgaaaatcttaagtgtgacgtgctttgcatactctattataggcctttgttgaaaaatattaagtaatttgagaaaagctaaatgtagctcatttgaaaagcttaatatatctgagaaataatcttgactttcaattaccactcagtagcaagattttttggcaggtagtgccctatttatgtctaaaatgatatgtactaatattaaaagagttgcatgcaataaatagtaagagaattaaagtaatagttaaatcacacaggattatgtagaagaactaagagtatttaaagtatagaggttgttaatgtgataagtatctacatttaatagttcaggaaaaaggaattatatgggattcaggatcttgcacttaacctataaatagtagtgcttccttatgagcaaaatttttagataataacatatttctatgtgtagaaatgcatggcatggcattttttgaacagtcggtaattcactggaaacccgttagtcaataagaagtacttatggcaaaatcatagagcaatactaacacaagtgggacatattcgactctctcttttcataatgtgtatctgcctaaatgattttgcttgaaatggattttttagagcatggtgcccccatttaatgccaccattcataatgggaaaaaaatctaggaaaaaaaaaaaaacccttcacagatactgagcctagcatcagaagagtcagatgagtggatagatcaataagttaagggttttaggcacagagctgttaccagttctgatattggacatgtcacttttacttccttgagtgtctgaaaaatgaggataggactatcagggataagtggacaaatggaaggagaaaaaaaaggtgaaatagtttgaaaactgtgagtgccatgtaggctttttgttttgtggtattaaaagaactttgcatgttctgcagtgttcatgccagaattaattccaatgaggaacagtttagggcagcaatctcattgtatgaaggccatggggggacttgttttgaagttgtgtttttacttagattgtttatttatttattttttttaggaaaggagaaaggttgagagtgtttatggaagttggctagggaagccccctgaaacacctgtttagtggagacactgccctcaatgtttctg

SEQ ID NO: 1880813 - DNA, 4001 bp, Homo sapiens
ttgcggttcccaattgccagcagtagattctcctcctctataatctttttctatatggtctacagaaggctcttctataacagagatgataacacaatagataagaggtacataatagatacataaagatgctaccctagaagtacagagaatgagtttatctgtgaatgcctgaaacacacaggaaattcagctttaagcttatctcgaagaacctatggagaaccttgatatcctttacattatatgatttatagagaggttgcttttatcataatatagtaaaaactgatgcttgaggtgccagacatcagaccctctggaacctgataatcaggaggtagaagatgcagcagactgatccggtgggggtcatggaggccaatccagacattgctatccttggtgccactctctttaatcagcgaagccacaaaggcaccctcagcctgggtgagcacagacaccaggttacctgaattcatgttctggcagtagagctgttggagaagaaaatggagcactcagtgaaggaggaaagtgtgggagacatattgagccctcccagaggatgtaacagaaaaaggacagcacagaaatgtccctgatgatgctgtcactgaccaccagcatctctgtgctgaatgatgggataaagtagattggaaagttttgggctgatgattggatagggaggggattagtctcatctcatatcagccactgaacacactggagagtggcagcttcccctcccttcgtgagcctcccttcccacactgctctcctcactcacatctgcataaacccaggtctcatgctcttcattaaagtagtagcagtgggagccttaggcactggtgccttctgggcagctgatctgggccttgggcaactcagcatgggcctcctgtcctgggaaaagagagacaattaagaaagaccctcagggcaaggtaaaggctaaaatatgaggtaggagcttctgaggattctttataggaatagaaggatcctataggtcacgaagcgattggtcacttctgcccttctgcatcttacctataggctctcaagatgtctttgctcaagacaagagcacacaatgaataggctcatgaaaagtgtccccattgtcccttttacttatggctttttcttccttgaaggactgaggcttctttctcaagcctgtccagtttctctacacacaaagctcccctcagttccccattccactaatgactgtctacaaacagacatcctcaacccccccatcatgagtagtgttaatatgacaaaccaatgccaactgcagtggtcactgataaagggttatgctaagttccatctctaactccttagggaggtcaggatgtttttgaatgggatgagatcagcaataaatatcactgaacaacacaagacaacccctgaacttgactctgctttttctcaagtgaactcatatgcatgaggatagagtgagggcttcagggctggggttgtgggaggtatgtgtggggaaaacaatctcaccttggctcagagacaggaacatcaggcaggagatcagcatgaagcatgagttggtctgagccatgctgagcagcagtgaatctcttgcttaaggagcaaatcagcaatctctataggaaaacacagggaagagggtttgagagaatgagagcagagcacctattaccttccttatttcctcctctgaattcctgacagcaggaaggtcctctgagatatctacattcccatatatttctcttgagaatctggaaactatacaggctcagtaatccaaaataactttggcttctactgaggcttcgttactgctgacacctcttggacagatgacgctgtatcttccccaagattttagattacagcccttgtgaaaggtacccttctcctgtaatgcccacttacttgttggctgaatctgaggtggcttttcaggctaggtaatggtagagatgtataacaggatctgagagaagagccacagtatttaagccggggtggagcaaggagtgagagacagcggttctacagagggcattgacagtaagaggttctggcatcaagaggagctcttcctggcatatcctgggaatggccacagatgaagtcccttcccctaaactggaaacctttccaagttcaaggcagaccttgcccttgctcagcagaaaccagatgtcctatcctgcagccctgaagatccagcaagcagctgagaccttccaggaatcttggcagctgttatgcaggctaggccagcagtagtagaggcagagagagtgagaacctggagtagggccgtctttgagacacagggagaagggagctgctgaatggttatggagcatccctgtttggagcagtggggcaaatagagtttaaaatattggtaacttaattgacttttccaatactgtactatggaagaaagcagagctaaaactcaattcttctttttttctccttcgtagtctaatatactgttgttgttgctgttgttgttgttgtttgtttgttttggtctctgagcaccctccacttgcaggttctgtcagtccatgtatggtcagtccttctgcactgtccatttcctgacaagaccactgcctgcatcaccctgttataacctttatgtacttctcaaaccattcatgcatttcaatttggactgtcccacaagtagctgaaaagcctatgctttccttcctctgttgagcacacttttaaaaccatcaagatcactctctatcttttgcaaaaggagctccaggttctttctgagaatctcccttactggatttgctggcttgccttctgatcctaccatccagtagaatttcctattggttcttttcaacattggcattttctctacttagccaattaaagaacacaatagggccagacctaagaattttccttcatgttgtctccttagcatagattaaaatagccttataatgcaccagaagataggttaagatctgttcattaaaattttagaggaaccaggtctttgatctttggagaaggtaattataactcacaagaggattccagactaatccccatatatgtttttcccctgtaaagtcagtttattagtttaacttggctgtgtgacaaactttcactctcattcagattattgactgaattcagttccttgtagttgtagagttgtagcactgaggttcccacttccttgctggctatcagcttaggtgccagtctcagctagattccttggtacaagaacctctccatcttctaagctagcaacaggacagtgaattctttttggcctttgaatttcttgacttccccttatgctgccagtcagagaaaattatctgctttcaaatggctcacgtgattagactgggcccctccaggaatctcccaaaacctgctttcttattgatacaaggtcaatgaattagtaaccttcattgtatcttcaagaatccctttttccatgtaatataacatagttgtggtttttcaatctcatcctatttacaggttctgctcacattcatagggcacacattacataacatcaagggtcatgggggtcataattctgcatagcacagcatggcaaataattcatgctcctctgcgatgaacctcactcaaacttgtataaggggaacaattactctatttcccacatgaaagaatcaaaaggcttcatacctaagacatttcctctggactttcatgttcatgccctttcagctaatgtccccctcctccaactaatccccacttgcataatacttcatcccctaacgatttatcttcatatcttttgattaaattcaaattactcaatttatgactgctaatcctcaggaacagtccctctatccttgatggtggctgaagtacccttgctaaagccccataaaacatttcaccttcctgccccaagtcagaatggcccttgggactct

SEQ ID NO: 1880814 - DNA, 4001 bp, Homo sapiens
taattgatggttaattgcttggtcatggtatcttgctttcaatgatttctgtattgtatcatacttccccaatataaaatacattttacaaatatattgctctataaatgtttacagtttgttgtgactaaagatgatttgagatggtcctttcagtaattaaaattactgcatcttccaagtaatgcatggtggaggaagttaccgatttgaaagggaagcattactgcagggccaagcagttttttaagagttcttcctttacagtcatctttttgtggtagggattagggcaaatactgatgatgtcatattgtagtattgctcctactcagttccaaattaaatcctacacttaagaaaaatttgtctagcaatattttaatatcactatttagcaaagcaatgttgagtctcctaagttcatcagctctcagttaaagctaaattttcatttgtttctcttatttttatagtcttttacttctcagattagctgcctacattcttcctgatgatgaatctacctgctttttactttagtacttaagctcagaagaaagcaaattctaacctgttcttcttgtacaaccaacccacctcatactctttttccgacaacattacctatgactgctaagttatgggcgtgtctggatatctaattgaagtgcaaaaggtgccagtgtctagaaaaaaatagatcatgtctaatctcattagcatttttctggcctttaaaaatttaagcctcctattcaaatgatatgatgttctgacaagttcaaattgtttatctcttacaccagctggggaaaaaatgaattctcaagtaccttatatttttaaaaagccttaaatagttgacatcatccaaaaagtttggttgatctacttacggtcattgtacatacaaaatggtctgactgaggcacacaggatgactccagtataaataaaaggtaatgaagggagtgacttgggatgtgatgagtgacttgaaaattttaaatgtgagacttcatcattgctgttatcatcattactgttatcatcactgtcatgacattcaggacgcaaagcggctgctgccagccccatgatagggggaattggagaagtgtcagagtgttttgtgtgatttggaagaatttcttttataatggaaaatggtttccaacttttttagaattctataagcctggtaatagtgcctttttgataggtgtaaggtcatggaaatgatagtctaacacattggctgatggcttttccacttctctggaagattttgctagtagacttagagccaggaccagtggagctgaatttttcctggtgacttttagagtagaatctggaatagaataaatacatcttagtcttgattgtcagtgttgacaagatattcacttagagatatataaattgaattaaaggaatcaaaaaaggatcagtggtcatgactagagattaagattggaagcatctgcatgtagatagtaactaagaccatttaaattttttgtttgcatatctgcagttaagcaaataaatgctgttcctgtatttttgaataaataattgcctataggggaaataccactaaatactggtctcatttgttggctttttcattactgtcctttcttcctgggctcttagttcctcaggtgcctcaaatcacagtttagtctttttttttttttttttttttttttcttttttttgagatggagtcttgccctgtcatccaggctagagtacagtggggcaatctcaccgtactgcaacctccacctcctgggttcaagcgattctcctgcctcagcctcccaaatagctgggactacaggcacccgccaccacacctggctaatttttgtatttttagtagagatgggctttcaccatgttggccaggctggtcttgaactcttgacctcaagtgatccgcccgcctcagcctcccaaagtgttgggattacaggcgtgagccacggcgcccggcgggcaagacaccctcagagcacagggtgctgccaagagcccagcggagtgcagctcgagcgccgaggtcgccaacgttccacacactgttgacgcaggacacaagttcgtcacagtggtcctccgccggctacgcggagtcagtggctttcaggcgctttcctgttggaattggcgactgctgcggggctgagcgctggtttcacgcgtctcgggagccaggttggtggcgcgatgagttgcagcaaggcctacggggagcggtacgtcgcctccgtgcagggctccgccccgtcgcctcgaaaggtgagtggatctcgaagagaccgacggcctcgacctggccgggcggcggaggcctcgacctggcccggcggcggcctcgatggctcaggcgtcatggctcccgaccggcgctgctccctggcgcgctctgttgaggcggcggcctcgacccggcccggcggcggcctcgatggctcaggcgtcatggctcccgacgggcgctgctccctggcgcgctctgttgaggcggcggcctcgacccggcccggcggcggcctcgatggctcaggcgtcatgcctcccgacgggcgctgctccctggcgcgctctgttgaggcggcggcctcgacccggcccggccgcggccgcgatggctcaggcgtcatggctcccgacgggcgctgctccctggcgcgctctgttgaggcggaggcctcgacccggcccggtggcggcctcgatggctcaggcgtcatggctcccgacgggcgctgctccctggcgcgctctgttgaggcggcggcctcgacctggcccggcggcggcctcgatggctcaggcgtcatggctcccgacgggcgctgctccctggcacgctctgttgaggcggcggcctcgacctggctgggcggcggcggcctggacctggcccggcggcggcctcgatggctcaggcgtcatggctcctgacgggcgctgctccctggcgcgctctgttgaggcggcggcctcgacccggcccggcggcggcctcgatggctcaggcgtcatgcctcccgaccggcgctgctccctggcgcgctctgttgaggcagcggcctcgacctggccgggcggcggcggcctcgacctggcccggaggcggcctcgatggctcaggcatcatggctcccgacgggcgctgctccctgacgcgctctgttgaggcggcggcctcgacccggcccggcggcggccgcgatggctcaggcgtcatggctcccgacgggcgctgctccctggcgcgctctgttgaggcagcggcctcgacctggccgggcggcggcggcctcgacctggcccggcggcggcctcgatggctcaggcatcatggttcccgacgggcgctgctccctggcgcgctctgttgaggcagcggcctcgacctggccgggcggcggcggcctcgacctggcccggcggcggcctcgatggctcaggcatcatggctcccgacgggcgctgctccctggcgcgctctgttgaggcggcggcctcgacccggcccggcggcggcctcgatggctcaggcgtcatggctcccgaccggcgctgctccctggcgtgctctgttgaggcggcggcctcgacccggccccgcggcggcctcgatggctcaggcgtcatggctcccgacgggcgctgctccctggcgcgctctgttgaggcggcggcctcgacccggcccggcggcggcctcgatggctcaggcgtcatggctcccgacgggcgctgctccctggcgcgctctgttgaggcagcggcctcgacctggccgggcggcggcggcctcgacctggcccggcggcggcctcgatggctcaggcatcatggctcccgacgggcgctgctccctggcgcgctctgttgaggcagcggcctcgacctggccgggcggcggcggcctcgacctggcccggcggctgcctcgatggctcaggcatcat

SEQ ID NO: 1880815 - DNA, 4001 bp, Homo sapiens
ggggagatcaggagggctaggggagcctagttatagttgctttattggaactgtctggcatagaagaagacattcagagggcaataaagatcagactttttcagaggcaaacaggtgaacttccagtgatttattcttagttaaccaaccttcaaccaactgataagataaacagtatccctaatgctgatcctaaagcattcgagatcctgaagtatcttcagcattatcaaaaaggattaaattgtattgtggtaaacaatgatattttaattttaaaaatttattataatcctctaaacccatgctctccaaactttcttattttatgcttgaatcggttgtaaaaattgtcatcccctaatatatttatatttatttatttataaattatacgtattaataccctactaaaattttcatgataaaacatatacaaatataaaatattttaaagggcaagaatgttttcttgattttaaaatttaataagtagaaataaaggaatactgttttaatatttaaaaaaaagctttttatctgagctcatcatgcctactaacaaagtatttagaagcatttatgctgaagtaaggacaggaaaaatgacactgtcactactattattgaatattgttctagagatactagctctaattaggaaagacaaacaaattagaatatttgaaagtaatacattaacagaatatggtaagtatcatttatgttggcaaataaattcacgtgtgaaaaacctgaaagaacgaactacaaaacattcttcaacaataaaagaataaatatatagaaatcagtagccatgacaaatacagatggcagccagttagaaggtgtactggaaggtaatgcctcatttaccctgagtaaaacaagatcaaatatctaggaataaatataagaatcatgtctgataggcaagcagaaattgaaggaaccccaaaagtttgaacaaataaaaagacacactatattttgattaggaagacagcatcctaaaattatccaatatccttcaattaatctacaaatttgataaaattccaatacaaataccaacaagattctttttatgttctgaggttcaaatggaaaatcaaacaagtaagagtagttgtgaaaatactgaagaagtcaagcaatgaggggcaacaatacctaccagataagaaaaaatgcataaagctatcatactcaaagaaatatgaatgaatagacaaatcagtgaaatagaatataaagtccataaatacatcctaatacacataaaaatgtatatgataaaagaggcatgtaaaatgagttattcaataaatgagtccctggaagataaggagggtgggaaacagataggataggctatgaattattaagcaactggtttatatctagtttaaccagcaagatgcaggagcatcttcaacttagttttctcatagcaccatgatgtccacaaatccacttacaagcaatagttctgtctttcccaatgttacattccaagcattcacaaccgtatctggacacagaaactctaccatggtaccaaacagtaattactctgcagaggtaataggtgcacacactatttaggtctgaataccacagcagggaaaggtatgccagctaggaaggaaataaaatctcaggaaaaacgagggcaagtagaaaaaaaaaaagataagaggaactaaatagcctcgctgggcacatactcatgggaaccctgctgatgttgcccaacttgaagataaagagatgcctatgatatagaatcatgaagatctcacctcagagagatccgtgatatgtcacccaggagcatccgtcacctgccggagcactgtaccaggaaaccagaggcatggttctgtgtaatctcgagcaagctaagtggccatgatgagaatgcttcttcctactgtgcccagctacaggatttatgtaagaatgacacgaaatgacagatgtgagtacactttgcagctctgatcagtggtatcctaataaagaagaattgttagctttgagttgagccttgtttgtaacaggcactcacttcactgttgttgccttttatgttccggagtcctgcatgatatggactccaggatagcaagagtccacatacccctccccaagagaaattaagctgggagccatggaattatcatcatctccttgccaccctgtccaactgcaggtcgtgggaagctgaatttaccctgtgagacttctgcttcatttacattcatcttggcaggcagtggtgggtcgtggggaacctgttgaaagcatgacagcaatgaaggctttcttacatgctgaactcacatcaaagctcttttcttctgtgctgacacatgtaactctttaccagtctgatgataacacatacagagacagaccctcggattcctgctggggagaaaacagagccagagatatgctgtactgagctggcaaatacagtgttctttctgttaaaatctgatgggaaagtaactaggcaaaaatccatggtgctggctacggtacaaagatgaccaaggctgtctcaggtatcctggtggctttattgtctatttccgggaaaagagtaggtagggatcaagagcaaagaacatgggaaaatgtgctgctttgtcattgcagttcatttatttcctagaaattttggcttctagggaaaggcagcgtgatataaaaaagaaaaaggtactggactcaacctgatttaaatccagacctgacactttgctacctggatgaacttgggtaagtgacctaagctctctaagcttcagtttcctcatctgtaaaatgaggatgaaattttctatgcaagattttgtaaggaagatcaaataaatggacataaagcaattgacacataaatatggaaacgatttctcagctttcctccctgagggacagagactcttcaggctacttaaattctccccagacttttccaagttgctctttatcctcataccctggccacaccacaaaagctgcccacatagaagaacttggtgaagacttgctgactattcccctaaattctgcttgtttaataaacatctgcagagacaggctcagcaatgggctcattgtggagaatcccagaagtgtgtggcaacaccaaaggaattttatgaaagtcccaggagagagaaactgtcgttcaagtcatcacatagcaaactgcccctaacacgtgctgcacacacattaggtggtgactcagttttggtgtttgacttgagtcttaaaacatagttcagaacctgatgatacttccctgaattcccatttttagtgtgaaagtgtgttcggcttcccgttggctattgggagcttgaaagaaattcaaggaaggagacctacaaactgcttataaaggatactgcgtgagctttatgcactttggctcttttaatccattccacaaggccgtgatgcccattttacagatgatgaaactctttctgaggttaagtagctcacacggtgccacagctagcgactgcgtgagctgagtcacatccagatcgttcagtatgagaattttaagagaagataaacatgtgattctctcgaaactcggtgttctgtagcctgcaaacccctctggagcctggtgtttgctttgcttgcaagcctgacctccgaggctcctgccatcttccttccctcttctcccctccattctcccctttcccgaaccgtttctttcccccattccttccccatctaaaccacagaaaagcacttccaggctccatttcagccagcaaaaatctcaagcccaggggagggcttccgggactttccactggaggctcttagacttagacgcagcgtcctctcctggagggagcgcagcgccccccgggcgcaagggggacgcgttcaagcgagggcggacgccgactgcgagtctctttgtgcagcactttgtctttctctcccttggg

SEQ ID NO: 1880816 - DNA, 4001 bp, Homo sapiens
atacaggaccagccagtgggcacagaaaagcaagcccttggtaggtcaaccctcagatatgctgacgaggtgggggcagctgtcaggtcatcctgagagccttcccgggcatctctgggcttcctcagatatctacacaagggtaggatgatcagtcataaatggactttagggacagctgtgtgtgtctttttattttaaaataagaatccgtcttgaagtgcaataggtaggaatgaggaatgaaagctatggccaatttaaattaaaattaggaaagctgaaatgtttaaaattgatgttctttggccaggcacagtggctaatgcctgtaatcctagcactttgggaggctgaggcaggcggatcacttgaggtcaggagttcgcaaccagccgggccaacatggtgaaactctgtttctactaaaaatacataaaaattagccaggcgtgatggcgggcgcctgtaatcccagctacttgggaggctgaggcaggagaaatgcttgaacccgggaggtggaggttgcagtgagccccaatcgtgcatcgtgccactgcactccagcctgggcgacacagcaagactctgtttaaaaaaaaaaaaaaaaaaaaaaaaagatgttcttcgatttcacagaggaacacaacttaccacgccaatgtacgcgtcgcttttgcctgggccgttccttcttcctagaatgtcctgcttctttctctttgtctaactcatgtgaatgaactttttaaaaaattagtatccttcaaaactgtatttgctcaggcgttctgatgtgaggccctcctgactctccaggtgcgggtgcttctctgctctgtgtctctcacctccaacagcttgttctgcctgcgcactatttgctgatgtgttatctccggggattctcgaatttctcaccttcatccccaaggcctgacaaaatacatggcaggtgtgcaaaaggcttgttagaagaccttaagaaaattaaagaaaagtggtttaaaaataattcgaataacaatgtttgccaatggagactttttttttttttttgagacggaatcacgctctgtcgcccagatgcaacctccacctctcgagttcgagcgcctctcctgcttcagcctcctgagtagctgggattacaggcgcaggcgaccacgcccggctaatttttgtatttttagtagagacagggtttcatcatattggccaggatggtctcgatctcctgacctggtgatccacccgccttggcctcccaaagtgctgagattacaggcgtaagccaccacgcccctccaacccatgaacacttttaaaattacttgatttgcttacagagcaaaaggtcaaatggggagaattctaaaagttaccttctcaactcagttttctcccgggtcgtggtgcttgaggcactggatatcccctggttaaacacccacgtgcagtggagcagggaggggacgcgccccttcgggggtgggcgcccaaggcaaggggaggaatgcggcttccacggcctcccctctcgccctcctttgtgcttattctaattcatgaattctaacatctttctgcccactaaaaaatgtgcattcattcatctggccacagcccttactgtagatccgcatccctggagctctcgaggagccgcggttaccgcacgtgggtgccgggcgccagggggttcaagggcttcccgcggtgacccgagcacgccggggcgtggcccccgaactgcggcctgggggcggggagagaaggggcccaacatggtccatctcgaccttcctctgccgggcccagggcttcagccccgctcccataggccccgccccatcccagacctcgcccgccttcgggatctcagccctggctccgcttcttcaagtaccgacaggaagttgacgagttcgggctcgtcaggggccgagctccgggctccgccctacgacaccgcccctccctaggccccggccctcatcaggactccgcccagacgtgcgtcatcttcccgcgccggtgacggaagtgcggtgttgagcgccggcggctcgcgcccacgctgggccgggagtcgaaatgcttcccggtgccgggagtgagcgatgagctggcttctgttcctggcccacagagtcgccttggccgccttgccctgccgccgcggctctcgcgggttcgggatgttctatgccgtgaggaggggccgcaagaccggggtctttctgacctggtgagtggcccgcccgccgaggcgcctccctgccggcatcggggtcgagggaggccggagcccggctaaccccggcggcgggagcctggcggtccgagtctgtgccgcgcgctgtggctgtgggtggtcgggggaccgcctcgttttcctgctcggccggcggggttccaggaggctcatggcctgggactggaacgcaccgaagacttgtttgaaatatcagaaacgtcgcgtaaaggttaggggtggcctaataaaccctgtgtttaatcctccatctttgttgcagttaaagtgcaacaaaaagtgacacgtaatcagaacgaacccccgttaccagaagactttccgtaccagctaaattgggattggaactcagtacctaatcttcccttttaaaaaaggcaaattctaataagccagtatttgcagttggatccttgtaacaacccttggaggtgagagggattattctcactttcaggtatagttcttggggtcaggaagttcccagggcatgtaactgacagagaaaggacttgagcccagctgttctgactgtaccaccagaactcttcccactacaagataccaaagttcgttacctgtgtttccccatgcacggcagctacagtattgaggaagaagcatctcagaagttgacctttttgttgtaaagaaatggttaatatttttttcaaagaccgcagtattttgttatgctttgagtttgacgaaagccttatggtgctggtgtgctggctggctggcatacagtagaacacaggtgtagagtctgacgtgcaggataaaactataaggtgcgactctgcccttttcacgcaaaaattggtcctctatatccagtttgcatcctcagtttcagctaaccatagatcaaaaatatttggaaaaaattaaaatagaatacagttttaaaatacgcataaaaagacaatacaactatatagattgtattaggtattataaactagagatgatttaaagcatgcaagaagatgtgtgtgggttatttgcaaatacaccattttatgcaaaggacttaagcatcctctgatgttggtatctgtgatggggtggaggacttcctggaatcagtctccctcagataccaagggacaactgtatttccaaccttaagaatctcaataaaaaaggggataagttagagaaggaagaaggaaataacattgcacatcttttccaggaatgagtgcagagcacaggtggaccggtttcctgctgccagatttaagaagtttgccacagaggatgaggcctgggcctttgtcaggaaatctgcaagcccggaagtttcagaaggtagtcacctctcatatcagtgtgacattttaacctattcaaaggctttcatatgccagatggcatttgatctatatagctaccctctaggcatgtagggaacctcgtgtgattgttttcattttacaaattagggaacagactgaaagcagttacaaatagtggttcatattacttacagtattagggataagccaggactcagctctcctgttccattcagccttttatgccataattccttgtctttttttaaaaaaatacttgtccagcctggccaacatgatgaaactccatctctactaaaatacaaaaattagctgggcatggtggcgcacacctgtaatcccagctactcgggaggctgaggtgggagaattgcttgagcccgagaagtggaggc

SEQ ID NO: 1880817 - DNA, 4001 bp, Homo sapiens
gatacaggaccagccagtgggcacagaaaagcaagcccttggtaggtcaaccctcagatatgctgacgaggtgggggcagctgtcaggtcatcctgagagccttcccgggcatctctgggcttcctcagatatctacacaagggtaggatgatcagtcataaatggactttagggacagctgtgtgtgtctttttattttaaaataagaatccgtcttgaagtgcaataggtaggaatgaggaatgaaagctatggccaatttaaattaaaattaggaaagctgaaatgtttaaaattgatgttctttggccaggcacagtggctaatgcctgtaatcctagcactttgggaggctgaggcaggcggatcacttgaggtcaggagttcgcaaccagccgggccaacatggtgaaactctgtttctactaaaaatacataaaaattagccaggcgtgatggcgggcgcctgtaatcccagctacttgggaggctgaggcaggagaaatgcttgaacccgggaggtggaggttgcagtgagccccaatcgtgcatcgtgccactgcactccagcctgggcgacacagcaagactctgtttaaaaaaaaaaaaaaaaaaaaaaaaagatgttcttcgatttcacagaggaacacaacttaccacgccaatgtacgcgtcgcttttgcctgggccgttccttcttcctagaatgtcctgcttctttctctttgtctaactcatgtgaatgaactttttaaaaaattagtatccttcaaaactgtatttgctcaggcgttctgatgtgaggccctcctgactctccaggtgcgggtgcttctctgctctgtgtctctcacctccaacagcttgttctgcctgcgcactatttgctgatgtgttatctccggggattctcgaatttctcaccttcatccccaaggcctgacaaaatacatggcaggtgtgcaaaaggcttgttagaagaccttaagaaaattaaagaaaagtggtttaaaaataattcgaataacaatgtttgccaatggagactttttttttttttttgagacggaatcacgctctgtcgcccagatgcaacctccacctctcgagttcgagcgcctctcctgcttcagcctcctgagtagctgggattacaggcgcaggcgaccacgcccggctaatttttgtatttttagtagagacagggtttcatcatattggccaggatggtctcgatctcctgacctggtgatccacccgccttggcctcccaaagtgctgagattacaggcgtaagccaccacgcccctccaacccatgaacacttttaaaattacttgatttgcttacagagcaaaaggtcaaatggggagaattctaaaagttaccttctcaactcagttttctcccgggtcgtggtgcttgaggcactggatatcccctggttaaacacccacgtgcagtggagcagggaggggacgcgccccttcgggggtgggcgcccaaggcaaggggaggaatgcggcttccacggcctcccctctcgccctcctttgtgcttattctaattcatgaattctaacatctttctgcccactaaaaaatgtgcattcattcatctggccacagcccttactgtagatccgcatccctggagctctcgaggagccgcggttaccgcacgtgggtgccgggcgccagggggttcaagggcttcccgcggtgacccgagcacgccggggcgtggcccccgaactgcggcctgggggcggggagagaaggggcccaacatggtccatctcgaccttcctctgccgggcccagggcttcagccccgctcccataggccccgccccatcccagacctcgcccgccttcgggatctcagccctggctccgcttcttcaagtaccgacaggaagttgacgagttcgggctcgtcaggggccgagctccgggctccgccctacgacaccgcccctccctaggccccggccctcatcaggactccgcccagacgtgcgtcatcttcccgcgccggtgacggaagtgcggtgttgagcgccggcggctcgcgcccacgctgggccgggagtcgaaatgcttcccggtgccgggagtgagcgatgagctggcttctgttcctggcccacagagtcgccttggccgccttgccctgccgccgcggctctcgcgggttcgggatgttctatgccgtgaggaggggccgcaagaccggggtctttctgacctggtgagtggcccgcccgccgaggcgcctccctgccggcatcggggtcgagggaggccggagcccggctaaccccggcggcgggagcctggcggtccgagtctgtgccgcgcgctgtggctgtgggtggtcgggggaccgcctcgttttcctgctcggccggcggggttccaggaggctcatggcctgggactggaacgcaccgaagacttgtttgaaatatcagaaacgtcgcgtaaaggttaggggtggcctaataaaccctgtgtttaatcctccatctttgttgcagttaaagtgcaacaaaaagtgacacgtaatcagaacgaacccccgttaccagaagactttccgtaccagctaaattgggattggaactcagtacctaatcttcccttttaaaaaaggcaaattctaataagccagtatttgcagttggatccttgtaacaacccttggaggtgagagggattattctcactttcaggtatagttcttggggtcaggaagttcccagggcatgtaactgacagagaaaggacttgagcccagctgttctgactgtaccaccagaactcttcccactacaagataccaaagttcgttacctgtgtttccccatgcacggcagctacagtattgaggaagaagcatctcagaagttgacctttttgttgtaaagaaatggttaatatttttttcaaagaccgcagtattttgttatgctttgagtttgacgaaagccttatggtgctggtgtgctggctggctggcatacagtagaacacaggtgtagagtctgacgtgcaggataaaactataaggtgcgactctgcccttttcacgcaaaaattggtcctctatatccagtttgcatcctcagtttcagctaaccatagatcaaaaatatttggaaaaaattaaaatagaatacagttttaaaatacgcataaaaagacaatacaactatatagattgtattaggtattataaactagagatgatttaaagcatgcaagaagatgtgtgtgggttatttgcaaatacaccattttatgcaaaggacttaagcatcctctgatgttggtatctgtgatggggtggaggacttcctggaatcagtctccctcagataccaagggacaactgtatttccaaccttaagaatctcaataaaaaaggggataagttagagaaggaagaaggaaataacattgcacatcttttccaggaatgagtgcagagcacaggtggaccggtttcctgctgccagatttaagaagtttgccacagaggatgaggcctgggcctttgtcaggaaatctgcaagcccggaagtttcagaaggtagtcacctctcatatcagtgtgacattttaacctattcaaaggctttcatatgccagatggcatttgatctatatagctaccctctaggcatgtagggaacctcgtgtgattgttttcattttacaaattagggaacagactgaaagcagttacaaatagtggttcatattacttacagtattagggataagccaggactcagctctcctgttccattcagccttttatgccataattccttgtctttttttaaaaaaatacttgtccagcctggccaacatgatgaaactccatctctactaaaatacaaaaattagctgggcatggtggcgcacacctgtaatcccagctactcgggaggctgaggtgggagaattgcttgagcccgagaagtggagg

SEQ ID NO: 1880818 - DNA, 4001 bp, Homo sapiens
tatttaagaaggtgttatttcatgcacactcgtaggttttgttcatatatgcacatctgacgtataatttaacatttgtgtaacttcaagcttctatggggagtggcagaagatgcaggaattctattaataccttcgcagatcttagattccaacaagctggataccttaagaaaaataaagaaattgctgtgcttggatcccagatgtccattccaccttttgggacctcccggggggccctcttttcttcatccttcaagacaaggatagtggggtgaacagacagactttccttgcgagggttggctcaggaaggctctgggctcatctcacagccgccccagcgagggtcggggaggcaggtgctggctccggtggggtctgcggcagagcaggactggagcccagggcgcagctgcacagctcaacgccggttcgcgccctggtttacagcgttgggctgggtcaccccttctttcctagcttgctgctgtgtgttccctcggtgtaggaatcaggggagtgtcttctggaggccactaaagcaggaatagcattttcatgttagcgtgcacgggcggtctccgcagcccctcctcgtgccggagcctgtcctggggcctgcggggcggctccgggcctcgggccggcgcaggcgggcggcagggggcgctgtgcggctcggcgcgggggcggggccggggccgagcctcccgcgtgcccggcctctgtgcgcgctcgcgccccgcccgcgcagccgcttctccccgcgcgggctctcggcaggcgggaggcggcagggctggcattgcagtgcgggccgtgcgggctgcgcgggcgcggggaggcgcgggcggcaaactgcgggcacccggcaccccgcagccagtaccgggcggaggcgtcagagccgcgcaccgcggacgagcaggcccaggtagagtgacgcgcgtcccctttgtgtccgcatcgcccgggccggccgcggagcggggagggcgggacgcggcgctgcgcggccggccttggggctcggggcttgcggccgcgcctgccccgctgggtcctgccccggcgcccggtggcagcgggcggggggcagcgtcccgggcggggactcgcgggctccgttcagaggacgcccgccctgccctgcccgtgtccctgacctcgtccctgctctgctcctgccctgccctgcctctcgcaggcggcgcccgcgccccagggcagtgggcgcttagggacctggcgtccccctgcctgccctgcgcggtcgcgggtctgcgctgcggcgcgggacagggcgccccgggccagggtcccgcgggcgagctggcggcgggggctttcaaggttcgcggccccgcccgcagaccctggggctggagcctcggccccaagaggaggtctgggaaaggacgacgcgtccggggcatcgccaccggcggggaaggtcggaactggccaagaggatgccccgcacatcccctgcgcgcggggtccgcggctgctactgcccctggtccccaccgcgagccctttcccggggaatgagccgccgcccgagccccggagttccctgcgggtcttacccaccccagcctccggccgccgaccccaagccccctgcactgtgcttggctcccagctgtttggtcgcttatgccatcctggaggcttcctggtcctggggtgaaggggtgacttctttaccctaatggtcttcgtaggcaggtctcaggatgtccactccaaagttcgtggtcttttttctagagaataataatttttaaaatccattgaactggccgggcgcggtggctcacgcctgtaatcccagcactttgggaggctgaggcgggcggatcacgaggtcaggagatcgagaccacggtgaaaccccctctctactaaaaatacaaaaaattagccgggcgcagtggcgggcgcctgtagtcccagctactcgggaggctgaggcaggagaatggcgtgaacccggaaggcggagcttgcagtgagcggagatcgcgccacagcactcccgcctgggcgacagaacgagactccgtctcaaaaaaaaaaaaaaaaaaaaaaaaaaatccattgaacaaacatcctgcgctgcctcctgcaggatcaaggctggggtaacagaggagtgaggtaaggccccagggaactatccccagtggatccctgctgccctgcggtgagagggggtctagctcctgcactaagagcctgggaagaaaacacttcccgtaatggggcctgggagatggaaggaggacatgccccagtgaatggggctggggttgagagttgagcctggcagataagatggatttgtaaatgaaatgccaggtagaaagtaagttggtgtagacgcctgtggagctgtgggagcccccaggagggaagggagggagtcagggtgtccctgcaaagggagtcccctttgcaagggagggggtgtctgagtcaaagcttgcaggtggggcaggtcagaggtggcaggaagggcctctgtccagagagagctgctccagcgcaggaagggggagggacaaggtgtgtgacaccgtgaactttcccaggggattcacccagtggctccaaaggagacaacagccttttttattgtattctcttctccggtactgagattagggaaccttgttttttgcacttttctaatgccttttacatttttgtttttatttttaaagcgtgcaaaggaaatgtgactagaggggtcagaagaggataaatcatgaaatctttgaattctaggccaagactttgggtttgactctgtgtcagtgggagccattgatggttttggaggaggagggtgatctgagccctgctttagagtgatttccgcggtgttgcgtggaagggaaggcatggtgtggtgtgccttactgtggcttccgagtcagacccccactggctgtgggcttccacctgcatcaggcatcaaaggctgtggatggattgaggacctcatgagaaaatgggtgcaaataacccaattttaatgggatggaaattttccagacccagtgcaatttgatttttgcagtttgtgtttttaaagagctcccgattctaatgtcagcaactctggaagaggaactaatgaagggcaaactcaaatgcacgatgcaggcacccccaggtcatctgtgccatgaggatttgggaaactcaaagagcattgtaaaatgcatatattttataaatagattccagtgccctcagcttgctagttggtaatccctgtatccagactgttgctagagtaagtcacgtctcctggggattcagtgtggtttgggactttgaagggacctcacactgtttggctgaagctgctgaggttcaggggtagaagtgccactctggcaggcggcggcagggttgggagctacaagctacgttgcctgcctctgagaacattctttcccctgtggtccaccacgtggccccactgcctacttttgttcacatttctccctcctggaagcctttccctctgggggtagagatgggaaggaagcctgcccttggagactgacaatcacagaaccaggtgggccagcacccacctggcctatgaacccttgttgtaaccatgggaacctcgtagcttggaaaggaggggtcaggtagcccaggccacatgaaaagctgtggctggtccagccctggcatcagcttttctggttctgtctgctgtcccttttttcccatacctcacttgcaatagaagaggatgaagccgtgctcgctgccctgcacgttgggtggtctggaaccattcaggatgatattgagccctcagactctcttagagcaaggaacccctggcttcacaggatgtgggatctcagaggcagcccagaggcggggaatggaatggagtgcttctaaggaagagggactctccgtgttttctctggggaattttctaacattgagatcga

SEQ ID NO: 1880819 - DNA, 4001 bp, Homo sapiens
aaacttttttacagaaaaattacaaatatctcattattatatctaacattaatgtggtttattacaattaatgagccagtattgatgtattattattaactagagttcatgctttattcatatttccttagtttctacctaaggaaaaatgtcatctttctgttgcacactcttttccaggatacctcattacctttagttgttatgtttcccttggctcctgttgctgtgacagtttctcagagttcttgtttttgatgacctggacagttttgaggggtactggtcaggtgttttgtaggatgcccctctattggaatttctctgatgttttcctcatgtttagactgagcttaagggtcttgggaaggactgtcacaggcaaaatgccgttttcatgacatcatatgacgtgtacttgatgttgacctccaccatctggctgaggttgcgtctgtcagttttctccgcaggatagttactcctccacttcatactgtactctggaaggaagtcatagtgtgaaacctaatcccttttagctggaaagtagagtcattattttaaagtgtttataccattattatattatttaaaaaatctgtttacaaattgttctctttataaaagttttaaaaattattttcttcaatattgtcaagtagccagtttcttgcaagaacattttatgtattgtggggattattgggccaatttagattccttcagttttgaagcagtagatttcaaagctgaatagaaaagtctgcagtttttgcttttatcagccgccagaggcaggcaggcacaggctgtatacaagaaatcctaactgttgccccgtcctgtttggttgttgtgtgaacattgggcagtgcccggctttgtgttggaagcatgtttaatgaagtctcacagtgcaaaactgcttcatacggaggaagggtttaatctgactattggaccattccacaaaaagctcactatttcacatttctttttctttttttttttgagaccgagtcttgctctgtcgccaggctggagtgcagtggcccgatgttggctcattgcaacctccgcctcccaggttcaagcgattctcctgcctcagcctcccaagtagctgggactacaggcatgcgccgccacgcccagctaatttttgtatttttagtagagacggggtttcaccatgttggccaggatggtctctatctcctgagctcctgatccgcccgcctcggcctccccaagtgctgggattactattttttttttttttttgagatggagtctcgctgtcgcccaggctggagtgcagtggcgcgatctctgctcactgcaggctccacccccccggattcacgccattctcctgcctcagcctcccgagcagctgggactacaggcgccggccacctcgcccggctaattttttgtatttttaggagagacggagtttcactgtgttagccaggatggtctcgatctcctgacctcgtgatccgcccccctcggcctcccaaagtgctgggattgcaggcgtgagccaccgcgcccgacctggattacattttatgtgaggtgcaaagacctactgaaacttcgtctcctattgaaacttgacctagactactgggctgactcagcataaggaagttacagaacagttgatgatcggcgtaaagttaaaggggtgaagttctgttgaaatccttcccgtttaatcaccgcaaaaactgaaagaactttacttgcgacactaaaaccacgcgtcttgtgcaccctctactggtttaaccacaaagtactagtttatttacgaattactgctgtttgaactgataagtctatgaaaacaggttttcatttttccaaaaattgcaccaaaataaagcaaaagctctagttgatgcgggtgtgttgttcaggcgttagcagtactgccctcactatgcgctcattggacagtagcgcaaccccaagaaaaggatggttataatagaaagtccctgggctgcaagcaggaagcgccaatacctggtagggttgtggtaattaattcgtgagcctcgccctagtcggtctggtagctagcttacctccagcctccacagctttcgacgacaccccaattctttgttttctgaggctcccgaagggtcgcaaaagcggcggctcggttttacccagaagaccgcgcgtcggccgctcgaaaatttgcatacgcttttctcgccggggcggggctggcgggggcgggaccgcggcgcgctcttgaactccacccgcagctaacccgggtttggctacgctgtattgccttttatttcgtttctcctcaccgagtattttccattatagctgtacatagctctttttgtggaagatcatccttcttcgtgctaatctctttggtcctccagtcggcatgcgtctggactctcggactgcgtctgggccggaaatgtctaggcctccccggagcgggtgggcgggagcgctgccccgcaggccggctgctaacaggctcccggtgtttcccgctgcaggtggttctgctgggcatggacatcctgtccgccctggtgacccggctgcaggatcggttcaaggcgcagatcggcacaggtgagctgcggcacttgtggagcggacccggccccttcagacccccagccttccctcggcctccccggctcccaaaccctcccggcagccaccctgcctcccctccagccccctctccctcccttccgctcctcccaaacagccagtccccgccctcccccgcagcccccctaagcactcgcagcctgggtcggccgccccgctgccttcccttccagctggactcccctggcctctgggcctgcgggcgcccttaccctcccccatacctttgtactggcttcactgtgttctcacacggaacttagtaatacgtgttctaatatgaaatattagtgccatttttatttcttatgctaaattagctgtcactctttagtgccaaccaagtcatattttaccctgaccccggtcccctttaatgagaggcagttttccttgagaaatcctataaaaccaagccagttgtatttttctccagatgattatggttggcatgactattttcaccttgattgtaaatgtcattacaaatgtatagtaaatgttcactcttattttgaagggaaaacagtatgtcagcaaaatgaaacaaaacccacagatttcatagatttaaatacctctaaattcctgacctccggtgtttcatgggggtagtataaacactaagcatctctatgcaaccatttccttatggaatttctctgttttacgttggtacacatgtattctttactgttaactttccgaccaatatgctccttctgaaaaggtcatgagcaccgactgtttacaaatttaaaaaaagcttttacttttagacatttgatattttaatagtgttccattttcctcctaaattagctgaattattcagggatatctcatgtaatagaggtttacaaactcttaaaataagctgatctctggtctacaggtgcacttggaccactggtgggagggtccaccctgggtatgtcggggaagatggagagctgggctctgtctcatgtgtgtatgggcgtgatgtaaaactaaaaatacacaatagtgatgaaacttaagatttattcataagtgcccactccttccacccccaaacacatatactggagcccctctccttgtgttttacctaaattttcctttctgttgactcttcctctcaaggtcttccatttttatcagcttacaaatacgttgggaactggctggaggaacgtggggtaaggaggaagacaaatagtgtatctgtccatgcaaaggattttgcagactcttttggtgactttcatggacttcagcaaggagagtagagctgtgagcaaagatgagtggttttagaatgagatacatcatttagg

SEQ ID NO: 1880820 - DNA, 4001 bp, Homo sapiens
atcatgtgggtttttccaattatttgctgctatttgtttctggaactgatctgaaatagatagcattttgatgtgtgacctttaacttaccaaggcagacagaaaacaggaaaagggtgggagtccctatgactaaaacgtttatgttaagtccatgatggatattccaggtgttctggtaggcatcttcctggccaaaatttaagctgaatttgagcgcaacgtctaataacggctggacttgttttccagggacctcaaaggtattttcttagataggtcatgttctggggcttttgactctaatgcaatgtgggcaatgcaatgaccatgttattttagagacatttacaggtcactcagggagtatgaaggaggcaaacactttggctctcttatatctgtcactcacaggaagctggtggcttaaagtttttaagacatttgttttggttgagttctccaccagaagttgagcaaggcagaattgcaagggcaggtccaggttttgtgatgtctgaagctttagacaatataagttgtcctatttaagaaagataatataaaatcataaataaaaaactagatatgaaaatgagtatgtaacttgaagccccagctaggcacagtgtctcacacctgtaatccttgcacattaggaggctgaggtgggagccttgctcgaggccaggaatttgagactagcctgggcaatatggcgagaccacccctctttacaaaaaaaaaattaaaaattagccaggcatggttgcgcacctgtagtcagtcccagtgactcaggaggctgaggcaggaggattgcttgaactcaggaatctgaggctgcagtgagctatgataatgccactgcactccagcctgggtgacagaatgagaccctttaaaataaaaataataataaatagttagaagccaacccccccccccccgccttgcaactgggggatcctacagcttgagcttaattagcttcttataaatgcacctgtgtaataatggaagcaacattttaagacaaaggtacttgtgctataacgttgatgagtgggacatttctaaacatttaccagtatgagaaacacgtacatgctaaatgtaactcgacatagacattaaatgccaagtgttcaggctgcagggaagtgagactgggggaagacaaaggagaagggaactggtgactattaggtacccagggagccttcagttagttggaatgtttagaaaactgggaatccttgaatttaccttccaaattaatcaaaacccaaaagatataacttattggtcatcaaaaatctttccaaatactgtttttttcaaggttcctgtaggtttaacaatttttaaaaagcgagtgtaatttaccatgacattgagattagaaagaaagcaaataaattacttaagggggtaagaacctataaaatatgtgtcttctccactagtagcaagccctctatggcttgggtgactgaagttgcccccatgcctgtttggaatgggtgctggcctccttacctgccactcagagatcacttgaccactacagtcacggtggggataccagttaataggtcatttgtggtgaagctggtaaacagtaagtgctcaataaaaacttattaaatgaatgaatcaaataaataattccactttgaacaaacgaggccagacttaaagcaatttttattcctaaagattctgcaactgaattttgtcaagacttctttatttatttatttatttattattattatactttaagttttagggtacatgtgcacaatgtgcaggttagttacatatgtatacatgtgccatgctggtgtgctgcacccactaactcgtcatctagcattaggtatatctaaaaatatggaacgcttcacgaatttgcgtgtcatccttgcgcaggggccatgctaatcttctctgtatcgttccaattttagtatatgtgctgccgaagcgagcacttgtcaagacttctttgcgtttgagaattctgtcatgaatatggcctaggtttgatggcaaaatgattaagaaatgaaatggagttaattttcattgagtgcctaacatatgccaggtatcttgcttgagttttgcatatttacttatttattttaaaatttattttttttcaataaaccacctacaaagcttctggatgtgtattatttaagctttgtaaccattttgcacttgaggaagctagaactcagacttaaataatttgtctatggcctcacagggagcaagtggcagagccagaatccaaacgcagatttgtgagtgcacggcttttgctgtgacgctgtaacctctcatttggcctgttctttccagccaatgtgaaagacacataaaacagtgatagagagaggggcaggaaagactatgaagatgggacagtacagtgagaagtcacatcatttagggccttaaattgcccatctgtaagcccagacgtttggactggatgacctctgagtggggtgaccacacggccccattttccaaggcaacccagacttatacctgctttgccactgcaactattagcaccccttccactctcaaaaatgttccattgtggatcataaattctaaggttgccccatctgcgaagttctggctcttaatttctgttatttcatactgaacctaataatacttctctgatgactgaagcacggtaaaatttcattttccaggcctggaggtacagggaggatggtaggtgaggtgacccttatgtagaagttgctttgcatttctgatatggatattttttcaatctaggagctagtgctcctttcctttaaaagtacactagtagatccccttctagtggatttggctccagttaatttgggatcattatataaatatttgtttcctacttcacactaatagtggctactccttattgagtgcttacactaaggctaaatgctgagtgcattatctcatttaatgcatatattaatgctataagatagttcctcaccttatagataaggaaacaggtttagtgaagtgacttgcaagtaagacacggagccaggtcttcctaagctcttagccattcttctatattgagatctgtatgtatacatacagcagataattaagaaagttatcagactcctaaattcccattggcctttcctgtatttatcagtatccatgccagtctttgtaatttcatcttccattgcttcagccatccatctttacctcctagtacaaacatctgcctcaagtaaacagattttgactaagatgcagattctcggaaaaaacgaagatgggattagcaagtaggtacaatgaatatttacttacttatacaaacctttttttgtttgtctttcttttccacagtttaaaaccgaaaacagacacttgtttttttgtttatatttacataaacaatacttaaaagaaaaaccaccagttgacaccatatcattctgcttttctttattgtctggctaacttacaaagatgcagatgtctagggtagtctctaccctaccacttacactatcctgatgacacagatagcaaaatgtgtctgtttacatagtgcatggtatgaaaaaaaagtttttcttcctctacggtccttgactataaggagggaaaaattaatttcatgccaacatttttggggaactttaacaatcatcccatttctgctactaaaataacaaaactggtattacactttaaaatataaagacctaacagtttttacaaatatgcaaataatctactacttagacataaaaaaaagttgatttcttttaaatcacaaagtaaggcaccattggattaaacatttctcctggcttttactaaataaaatgcatagtgaaataaatactgaacactgagttttaatactgtaatacatttcaatataaaataagaggtgaatgttaaaatactgtattacatgttga

SEQ ID NO: 1880821 - DNA, 4001 bp, Homo sapiens; identical to SEQ ID NO: 1880820

SEQ ID NO: 1880822 - DNA, 4001 bp, Homo sapiens
gtcttcctctagaatcacctgtaggaagtctaattgggaaccagatggcataagaaatccagtctgcagagttccagccccagcatcgcagaagacaaaatggtgtgtttgaagctgagagataatagcttaataatcgatggcttaataatacttgcttttattccctctatgatgatgtattcaggttttctccttcttaagtctattttgactgtttgttttgctattttcctccatatttctaaatgaccattcaggattgaacccagcaatcagtaaaaataaacaggtttttttgttacctgaaaaaagtctagggatgtaggttgtccagggatggaatgccgaactttaatgtcaggaactcaggctctattttgttgcactgcaattctcagcaaatgattcttcatcatgtctacttcccagctagcaggaagagggaagggaaaagacatgacctctctttttttttttttctgagacagagtcttgctctgtctccagcctggagcgcagtggcatgatctcagctcactgcaacctccaactccctggttcaagtgattctcctgtgtcagcctctcaagtagctgggattacaggcacgtgccaccatgctcagctaatttttgtatttttagtagagacgggttttcaccatgttggccaggatggtcactatctcctgacctcgtgatccaccagccttggcctcccaaagtgctgagattacaggcgtgagccaccacgcccagtctacgtgacctctccttttaagggcactagacgtggcccatcccaatctttttttttttttttttttgagacagagtcttgctctgtcacccaggctggagtgcaatggcacgatcttggctcactgcaacctctgcctcccaggttcaagcgattctcctgcctcagcctcccaagtagctgggattacaggtgccagccaccatgcccggctaatttttgtacttttagtttcgccatgttggccaggctggtctcaaacttctgaccttaggtgatccacctgcctcagcctcccaaagtgctgggcatgggccaccatgcccagccttttttttaagagacaaggtctttctctgtcacggagttcggtagtgtgatcatagctcactgcagccttgaattcctgggctcaagcaatcctccctcctcagcctcccaagtagctcacttgattactttttttgtagagatgggggtctccgttgcccaggctggtcttgaactcctggcttcaggcaattcttgtcttggcctccgaaagtgctggggttgcacgtgtgagacactgtgcctggctttattttaatttttattattaattaatttattttttgagacggagttttgcttttgttgcccaggctggagtgcaatggcgcgatctcggctcaccgcaacctccgcctcccgggttcaagcgattctcctgcctcagcctcctgagtagctgagattacaggcgtgtgccaccacgcccggctaattttgtatttttagtagagacggggtttctccgtattagtcaggctggtctcgaactcccgacctcaggtgatccgcctgcctcggcctcccaaagtgctgggattacaggtgtgagccatcgtgcccggccattatttttatattttttaaattaaatttttttattatactttaagttctagggtttgcacaacgtgcgggtttgttacatcatatgtatacatgtgccatgttggtgtgctgcacccattaacttgccatttacattgggtatatctcctaatgctttccctccccactccccccaacccacgacaggccccggtgtgtgatattccccttcctgtgtccaagtgttctcataaaaatatggaacgcttcacgaatttgcgtgtcatccttgcacaggggccatgataatcttctctgtatcgttccaatttttagtatatgtgctgccgaagtgagcactattttttttttttttttgagacacagtctcgctgtcacccaggctggagtgcactggcgcgatctcggctcactgcaagctccgcctcccgggttcacgccattctcctgcctcaccctcccgagtagttgggactacaggcgcccgccaccacacctggctaatttttttttttttttgtatttttagtggagatggggtttcaccatgttagccaggatggtctcgatctcctgacctagtgatctgcccgcctctgcctcccaaagtgttgggattacaggcgtgagccactgcgcctggcttttatttttaatacggcacttttttactctgtctggtatcccccagtccattatcaccctctcctcccctttttccaacttttgcagatggtgaaacttctgttttctgctgaatttgtgcaggggcactcacctgccagcatagggggaagggatggcctaagacattcaataaacttgttttcagctccaccatactcacacccactctcagaagaaattagcatccctgactcccaagaccttgcggagtttggcagttccaatcaacttcctgggttgttgttagcaacctgcgacaccacaagggcttagcagaacagagaaagctaaaaccaagctggttgttggtcatatctgcttgccttcttccaacagttggatatttttcatttgccattaactctcctctcttgttcttagaagttgataatatttatactgttactacaaaggattttgtgagattcactgaatacttgaccagtcacacaaagcatgattatcattcactactgggctataaggatttcagctactatcttgcttctccttttttatagttgctaaagcaggcatcataatgatggctgctggcacttaaattaccttccaccagttcctatcaaacataaaaacctgtatttatggctgggcgcggtggctcacgcctgtaatcccagccctttgggaggccgaggcgggtggatcacctgaggtcgggagttcgagactagcctgaccaacatggagaaaccccatctctactaaaaatacaaacaaaattagccgagtgtggtggcacatgcctgtaatcccagctactttaagtagaacttctcaactgccccatgtagttgagactgtcattttatcactgggtaaaatgataccatttttttcccccagagatggggtctcactatgttgcccaggctggagggcagtggctattctcacatatgatcatagctcactatatcctcgaactcctggactcaagcaattctttatctcagcctccccagtagctgagattacaggtgtgtgccactgtgcccagcaatgatatcatttaatcaaaattagattgccattctcattttacaggttcaggaaacaagattcagaggctaaattatttgcccagtcacacagctaacagatggagacagatctttctccattagactgtaggtatgcactgttttgttcagatattaggcatttgcaaaccatattttatcagcaagtgcaatttgtctttcacggtatcctaataatttacagattatattcttgagactggactctccaatttgccagtccctcccacatcctttcgttttgcattcagcctactcttcctttcctatctcctcctatgggcttgaatcttggggtccagtgctgttcattaccatagtcttaaagctcagcagagggcctgacagtgtatgtttcacatttgctgactgccagcttctcatcctgtcttggtcacatcaagcaatactaaccacagggcacaaatagctttcatctaatcttgtctaagaaaagttgcttcctaatacttggaattcacataacagttttcattctacaagcaaacatccctcctagttgtctttttaataacagtattaagcgtgacacctacagtcccagccactgaggtgcgaagattgctt

SEQ ID NO: 1880823 - DNA, 4001 bp, Homo sapiens; identical to SEQ ID NO: 1880820

SEQ ID NO: 1880824 - DNA, 4001 bp, Homo sapiens; identical to SEQ ID NO: 1880820

SEQ ID NO: 1880825 - DNA, 4001 bp, Homo sapiens; identical to SEQ ID NO: 1880820

SEQ ID NO: 1880826 - DNA, 4001 bp, Homo sapiens
ggccgcaggctgtaaattcaggggttcccaagaaccccctcaggttcaataatatgctagaacaactcacagaactcaggaaaacaatttcccctttatgtttaccaatttattataaaggttacaactcaggaacggccaaatggaaaagtgcacagggcaaggtactggggtgaggtggggcttccatgtcctctcagggcaccccaccctacctacaccaactccccccacagatgagtggatgatgctgaaagttccaattctctaactgctcagtcttgggtgcacagcatcatcctgaggctagctagggatgggagactatccccacccaaagtcatggaattagcacaaactcaggtgtcagaaaagggacaccttatgggtaacaaaagacactcccatcactcggcagactccattggttttaggagctctatgccaggaacccagaacaaagaccaaatatatttcttattatactgcattgaattaaaagcaattcctgagggtgaataagatgaagacacgtaaagtaaaagttattttaaaaatgttttttaagccgggcgcggtggctcatgcctgtaatctcagcactttgggaggccgaggcgggcagatcatgaggtcaggagatcgagaccgtcctggataacacggcgaaaccccgtctctacgaaaaatacaaaaaattagctggggtggtggcgggcgcctgtagtcccagctacttgagaggctgaggcagcagaatggcatgaagccaggaggtggagcttgcagtgagccgagattgcaccactgcactccagcctggacgacagagcaagactccgtctcaaaaaaaaaaaaaaaaaaaaaaagttttttacaattcacagataacctaataataggaagtatctgtcaactgggtgagaattagtaacaagtagtttacctcaccctatttccttagatacataaaccctgaaagcagcttagtaaagggcacaggtggtggttccactatcagtacaagatgaactacaccattaaaagatgaattcctacatgttttgcagatctgcctcagaattcagactgaaacctagattagattgtatctaccgaaagccctagagggacacaggaaatgtgatatgtacatttttatggctctaagcaaaatgtctcgctttagaacatgcatgttcagcagaaaccccacaatagcactccctcctgttgggcctatcactgtatcactcccctataagggacaggaagatatctccctttcctcaaagtcaagtggttagcctaccacaccactcccacatcaagtggaccttttttttttttttttttttttttttttttttggtgaaaagagatatgtatatttagaattagccagatggactcagtttggatgatcccaattttgttggcaacatccaaagcatcataatcaggagccagtggaacatatgccttcatctctccatcagggtgttgaccttggccccatcaatgtcacagagcttcttcacagcctgtttgatctggtgcttgttggctttaacatccacagtgaacacaagggtgttgttgtcttttatcttcttcatggcaaactcagtggtcagaggaaacttgatgatagcatagtggtcaagcttgtttctcctgggggtggtcttccgaggatatctgggcggcctccagagtctcagtgtcttgggccgctggaaggtgggtgacatgcggatcttcttttttttgtggccgtggacacctttcaacactaccttcttggcctttaaagcctttgctttggcttcagctttaggcgggccaggagcttccttcttcactttcggtgccatcttctgaaaagggtctcaagtgtatctttgaggtaactctactgggtttgaaactttatttcttcctagactttagctcggtccagatgaagtggtctcaaacaccgaaggaaggggactggatgaccatcagtactctgcatcagtcacaaaatgtgatccccaagccagggcatcacctggcctgttggatatgtaaattatccccactcaaggcctactgaatcagcatcccgtgctttaacaagccctctacttttcaaaccactgttctattccagacactactgaattgttctgtaactcctgctatcagcatatagttttttagaggactcaagagattcttctgtcccacagaataaggaagtaaaataataagtaggataagataatttccttcattaccttcctccaacagatgggtttcctggtatcttgtaaattcactgaatgcaattcctgcccccccatccagtatcatttaacctggaagcagcatctttccttttcaatattttgccctggtttcttctagaccacaggatgcattcctgagaattccaaagatctttttaacatgtttgaattacctcactagcaatgctctctgccaatgagctttacatcttttttttttttttttactttactgaatactgaaaaagagtatacactgcagagttagtatgccttcagccacttagcagcagtaagcccttgggcaagcttcttaatctctctggaacctgttttatcatctatacaatgtagacagtaataatctctctcatatgattgttatgggattaactgttaatatatgccggcatttcccacagtgcctggcacacagtataagtactatattgagtgcttgctattattatgactacagttactgagggacctaggtaaacatcctagaaaggttaagacaaatgatggatactaaggacagctggaggctctcctctcaaactgtaggaaagaccacatgcaaagaacaaggaactgttctgtagtttgcaaacaaaatggtcctttagaaaggagataatacatagcctggaatcagaaagtaagactcaagatcaaaggtaactggccatcactagcatactggcctaaagactcaaatgaaaatacaagaaaaagaggtgagagattaaaatacaaatcactttactagcacaagccagggtcatgatctccatagagttccatgttaatgaatgataatgaagccccaattctagagtgactgattaatcattcattcaggccagctcaagaaagatctttaaatcaacaccactcaagagacaaattatcctaaagcagctgaatagtttttctgtagtacattgttagctgtacccccaacatccattctcctcttcctcttttctgttatattccaatctttctagccaacttgtttggttgagactgaccaaactttcactctaaggggtgcatcctgtttagaagttaacagcacatgagattctccaacaccagcgggagaagcacatgatccaagtcatgatcaatcacgccagtgagactgatatatccgggccatggtaagcagaaaagcatcctcttttctgctggatgtccatagtccaagggggccagggacctggggcagccatcttgggactacaggatggagcctgcttgtgaacagagcctgcactagaaaataaagccagagtagagagaaagaaactagatcctggtcacaccatttaagtccaggagtaagtcttgcttaaagactgaatttgcctactgtgtgaccaataaatcctctttgtcacttaaaccactctgggttaggtttcctttgtccacaatcaagatgactctaaatgatgcatgcttcataatcagattccactataaaggcaacaaaaatgtgagttatgtagttagaattaacagtaaacttaacttctcaagtcatgactttgatttacttgtcacaattaaagacattagaaaaaaatcatttggaataaacttcatctgaaatttcatttgaaatctcaaagtacagatgcaggaccttgaaaaaactcggttttgatacttggtttacatatattcagtaca

SEQ ID NO: 1880827 - DNA, 4001 bp, Homo sapiens
actaaaacactgcctagcgcaggtgcaccatcaaccttattcactaaatacacctctgtatatattcttcatctttgattgtggaaatgatataatcaacataaaaatgttttatagattggactaaagacctttgaggtctcttcacaggatcctatctggcggacccccaaatctgccaacacagaggtcatccgtaaacatgtgcaggacagaggccagacaaaaccatctctctcagcctcaaagtggcctggcagtcacatgtggggtctggcctgtgtgaggaagtcaggctttcggctccaggcaccctactgcaccgcaaaaccaagttctgcctaacaaacaaaaaacagcctgctcactctccctaatatcccaggtggtaacctaagagcattatgctagacacccctcctcctccaccctccatgtccaagctatcaccaaggtcctagcaatcttacctcctaaatgtctcccaaatccacttctctcccttcaatgtccaggccaccagcatgacttctgcatgtgtgtagcagcctccgcgcaggacgtaaagatgcaaatctagtcgtaggctctctgaaaggaaaattttggggacccaaaattactaagctaaaggaaaagtcaagctgggaactgctcagggcaaacctgcctccctttctattccaagtcacctatctcctcactaagataggtgcatatctgattccctgctttggagaggctaatcagaaactcaaaacaatgcaacctttgtctctcacctacctgtgaccttggaagccccctccctgcttccagttgtccccacctttctggatggaagcaacgtacttcttacatatattgattgatgtctcatgtctccctaaaaccaagctgtgccctgaccaccttgggcacatgtcgtcaagacctcctgaggctgtgtcacgggtgcacgtctttctaaattacctgaaaccatctcagatagggttcacacatccctttcccgaaccctcccaggagcccctcgtgggcgcccaggtcctgcctgctgttgtggcccaggctcacctggagcaactcgactcttcgttacagcctcgtgaacctttcagttcctaaagctgtctagcctgtgaaaggaaaatgaatctgggggccccaaaatcactaagctaaagggaaaaaagctgggaactgcttagggcaaacctgcctccccatctattcaaagtcacccctctgctcactgagataggttaatatgtgatagcctcctttgcggaggctattcagaaacccgaaagaatacaacagtttgtctctcacctacctgtgacctggaagccccctccctgcttcgagttgtcccgcctttcccgagggaaccaacgttcatcttacatatattgatgtctcctgtctccctaaaatgtataaaagcaagctgtgtcccgaccacctttggcacatgtcaagacctcctgaggctgtgtcacgggcgtgcgtcctcaaccttggcaaaataaactttctaaattgactgagaccgtctcacatattcgaggttcacaagcccatgcatggggacgtcccctggggtagcgcccctcctccactgagctcactcgcttcctccttgtgtgttttcttcagaagaaatttcacagctacttggtccacacctgtctgccccacaggaacctctcttctccacaggcacatgggcggcgtacctgctgggctgtgtggagaggaccgggttcctctcctgattcctgctcagttaataacgaatgtcgacaagtcgagaaaattgctcaaatttaccccatcaaagaattaaaaactggtgaaagcttgacctgcgccccccacccctgacgtgctcaccgctccactccctctaggcgggcggcacccgctgaagcctcagtaccacacccacagccaggagccccagtcccgcactcggccgcatgcgcactccctgcggccctcccgccaggcgccgcgctgggcagccagcgccccggcggggtccttcaggccttcggccgggcagcctccctcggggtccttgcgcggttgcgtagcagctgcgaggacgcggggcgagccggaagtggagtgcgctgcggtgcgagctgggccggcggggtggttcgagagcgcgcagagtccagactggcggcagggcccgaggggccgacccgcagcgtccctggtctctccagccctcactcggaaccgcacgtgagggcaaatccgccccggtggctggcttagcacgcggggacagcccctccgaggcctccctagcggtgtgggcgagagggcgtccgggtcgggggaagcacggaaaggtggcttcgcgaggctgttgtggggggcgggacgggcagcctggcgatgcctggacatggttggtggccaaaaacatttatcgaaagatagcatacccacttagatggcgaggacatcgacaagcaagtcttcgcccgtaagcggtggctcacgcctatagtccagggatgccgaggagggaggatcgcttgagtccaggagttggaggctgcagtgagccgtgatcgcgccactgcactccagcctgggcgacagagtgagaccctatctctaaacaaaagaaagaacgtcttcaagcatggagccatgaagctggatttggctttctgtcgctctctctacagggtacaggtgaaagggggcagacccctcatcatgctttccaggcatctgccacttcccaggaattgtctccctggataaacaaggcgaagtccctggctgtgcagaagcagtagctgtgtggtggcacagtcaggaaaactcgggggccctgttggtattttctacccctgacccgtgtgcatacttctgtcgtagctctcaccacagtagactctgctatcattgtgtcttccatcctctgaaccctgtgcaaggtctgctcatggtgaatgcccagtaaggctcacctattgctgctatctcatcatcatatcatttctatgtgcccccctagctaagagtctggactgtggttacattctcaggaatgtctgcaaagtcatatttaggtgtgaggagagtaaaacagagctagacataatgttgcacacagcctttggcactggatgcctggtgaatgtcttgtgcaaatgggtaacgtgaggagcagcatttggggtgcgcaggacttaactatttgtgtataacatattactgatgcctgtgtgtcatcctctgctactccaagtctagtagccaattgcataccatatctcagtctggcactgagggaagcagtctggatggaggtacagctggagatttggttgaggggacttatctctgacaacagcctcttgttgatcttcccagacagtgacaataccctcccctcccttgggctggacccctctctacagctaggagccaatggcagaagacaaaaccaaaccgagtgagttggaccaagggaagtatgatgctgatgacaacgtgaagatcatctgcctgggagacagcgcagtgggcaaatccaagtatgttgggagattagggaataaataccagccccagagagggtccaggtcatttaaaaagtcctccagaggcagaggagcatggcttcttggggctggtgaaggagcagtcttggctggagcccagatgttcatgggggaacgaggggaatcacatgacccgttgtgtgtgtcgggtggagggggcaggtcataaggactgaggaatttgaatgtttcctctgagccctgagagaacgtgtggagcaactgaggacattgtatgtggtttgtgggctgagggatggcaagggcggggagtgggaatggaaagacaaaagtgactatgccaccgtgacagattgggtaaaggtggtaaagatgctttcttggagggactctctgaaatagagaaaactgggtagaactgacgattgactataatca

SEQ ID NO: 1880828 - DNA, 4001 bp, Homo sapiens; identical to SEQ ID NO: 3680

SEQ ID NO: 1880829 - DNA, 4001 bp, Homo sapiens
gttcctgaagccttataagctggagctgggcaacttagtgtacatttcaagggaaaaccttcatgcctgatgtgcgtgccacacagagtttcaccaaaatacctgatgccataaccagagatatttaaactgcaaaccagagtgagaagttgatgacttcacgctgtggacagctttccccaaaacactgaagaagactcctcatcgtggtgaatctcttacctctcttaatttctccttgcttatgtctacccctttcacttggcagcattatgctgtaattaggatttcacagccagtagcttctgtgggtaacttgagggagtgttggttctgtcacatcaaacccaaagttttacgtcatctaagagatccgttaggccacccagtggctgactttagcagcatccttaactcaactgttggttcaaattggaactgtggtcccttttatagagttagacttctagactcactcgttctcaccccctgttttaatttaacccagtcgtaggatgctagataatgtgattccttgtgacttggactgtgagcccaggaagaaccctgagtctcactgcccaactctctccttacacaaaggaggatgcagagcctcctttgtgtaaagtccagagagggaaagacttatatctggccacacagcaagggaaaatcccagctctattttgtaggccagggtgtgaagatgatggtgtggcctccaccgattgagcagtccctgggcgacgacactgtgctaattgtttaatatctttgtcccattcaatccccacataaccctgggaggctagaggggaacctggggcacagagagggtaagtcttttatccagcatcacagaggttcccaggatttgaactcaggtgtgtgtgcccacagggcctgtgttctgggccctgacttggtgtgagcagccccgtgagggttcatgccatgtggacactaggctgggagtgtccccatgttccccatggagggcccccagcctcacccgggtactcatcctcctcgagacacccactcatcttttcctgggccccagctgaatggaaatgtgtgttctttgaggagaggttgcagaagtaaagcgcggccccaaggctggagctgagcagatgctgcgtgtgtggggggagcagggtgcctggttttaatactgcctctctcctgggggatctcatcctcttctcctcccaatggatcctggggcccagacggggacactgtggccctgagagcaggtggccttattctgagatcctagagtcaagaccaggcatggagcggaaaacccaggtgtcctgcctcccgggctgtggctgctggagtttggggtggcgtggcagtggtacagcagtgggacacagtggagggaaggggagagggaaacggaggtaaatgagggaggtggctggggcatgggattcagggaggacggggtcaggagcccagagacctgggtctccatcctggcctggctacacactcactgtgtgatctcgggcaaatcactcaccttccttgagcctcagtttccccacctgtagaccaaagattggactgatggtctcggcagccccttccagcccagatcctgtgtgaaatccatgaacggctccatgtgtctcctcctctccctcgtctctgccaggcattttcctcccctggctcctggcatcacactccttctatccccgtaagttccaggggtctccctgctactcacccaggagagcctggctggctggggcacgacagcgcggctctgctgccagagtccgtccctagtgactgcgcagggaagaagtggtagaggcaggatccagggcgctggggcagaatggtgagatgggggatgggtcctctcaggcccacctggggtagagtcacctgttggccaaatgggggctgatccattgtggtagctgggactgctgctagtttccttttcgttttcagcacctgctcttgcttttcttccttctcgccaccagggggcacagggaggccatggagctccgcagctgctattcctgtggttgtctcttccgtgtcgcttggttgggctgtgaggcagcgctccagagtggggaggggaggtcgagggccccaccacgctcctccttcctgtctccacctcagtcagctgaggcggtccccctgagtgctggtcatcagtgccgaccccccaggcctgatcccattcccaaaaggatggatgtgagaccaccagtgagatcctgtgcgcagcaatgggccgggcgggtttccccggtgggctggggtcccccaccctggctgtgctctgcctccttgagcctggggtctttccatgccgggtcctcgtttctccaggctcggctgctccaggggctagtattagggaagtggagcaggggcctgggaggacggctgttttcacaaaccccaggaaccgcatctaaaaaccagcacaacggatgcccgagggtttctatcctcggctccgtcctgcacctatatcccccatgcggaggctgcttcccccatctctgtccctcatctctgcctcttcctcattgtctgcctttatcttctccctgtccctctgtcacgttcttggtgtgtttctcaccttgccccccaagtcagactgtctgaagtccctgtcccaaggactccaccactgccgccctcccttctcccctccctgaggtgggcttcctcactggctgtgttcgggacctgtattgcagacccttatcaggccccacagtgggggctcctgtcgctgctggacataaaggcagggactctgtcggggccaggctggggtcgttgctgctcgcctgccaatgtcgcaggcgctctgggctgagctgtcgcaagggctgggggcgggccggcttctggggctcccgcgtctccgcccctgcccgccggggcgccaggccggatgggctgcactgtgagcctggtgtgctgcgaagagctgcggcccggaccactctgcggtccccagcccccggggagtccctgggtctcggcgcgggctgagtgctgggagtccgggggtttggcctgtgcagagagaaggcagctaccgcttcaggtaggggctgcgggaatgggtgagggacgacgccccgagtcgggagctggcggttggcagagcccagggcacctgacacaggttaagtagccagcccaggacggtgctagtctgcttgggaagtgcggcaaggcaggtggaccaagggggaggaaggaccacgaccgggtgaaggggcctccagttgggtagagggctcccctgggtctcttgtgcccttgggaggagggtgatataggacctgacccctagaagggcaaataggttgggtgaggttggtttaggagtcacccaggaggggcaggcctggagtgctggggcaaggtagggaaagagttaatcttcctcgagctggaccaaggggcagctctggcagtgtcccttcatttaggaggactctggagttaggagggtgggggccccactggagcaaggacttccccaggatggtggggacaggctggcctctcacccctgccttctctgtgctgggtaagtctcagagactagcaagtggggagctgacctggcagtggggacaggtctgagctgggaggcaggtgtctgctctggaggagtctgccagggaaccatcaggcctgggataggtgtggtgctggtttcttcctgggagagtaggaggaggtgtttggggtcaccagggatgggtaactcctctctaggtccctgtgacctcaggactcgctgttggtgggtcttctttcttcaccctgtgtccctgcctccccacctcccacacagccagctttgacatggggcaggtgcctgttgggccaggtaaaggtgggcagggacagggacagggagtggggctgtgatggagggaggagccggggctctggaggtggatgatcaaggggagaaa

SEQ ID NO: 1880830 - DNA, 4001 bp, Homo sapiens
atcttgattcccagccgggtgaccagcttggtctagggagtgaaggaagggggtaaaggggagaggaggaagggattcgtttcctgtctgctttcttctctctgccttctcagaagctgtgctgttacagagaaaaactttctaaactacctccccatttttctggaaggtgttgcacacatctccccttccctcaatacacacagctttctctaccccctgctcctcccactttccggaaaaatgtaataggtgtgaacatcgactaagcccagtgtcagtagcacagcaacaagctaatgtgggaaggggtttcgctggtgtttatttctgaagttgctgatatactcgtggcaagggagcttggcttgttgcagagtacgaagccaagcccggggcgcctaggctgtgaacacctcgcgcgaacttggtccggcctctaggtccctggcctcgggcccttatgctctgccgggggccaggatcaggttcctaagaaaacagaagagtcaaataagtgatctcgctactttacgctccctgcccacccccacccccaccaccacttttcttttcttcttttcttttttggttgatggtctgtctgtactgagcgggtatcccagagctgaggtgcaggagtagtgagcgatgccggggctggctttcctagatttaggaaccgccggggggcggaggagagtcgaaggggcatccacttctttggagggaggacgccgtttacttcccgcagacgacgggcgggaagacctcggagctgagggcttcttggggtggctctttgagcaggtaattctgcggcgaaatcgagagcgggtgactgacacgctcggtgacgacggccaggcggggcagcaccctttccggttaacaaaatgattaaccttcctgccttgcctgtagtgggctctcccctcctccttcaccctcccttcctccgggattagggggtgctcttttcaaggagagactggagactcgagatgtgggccctttctcgcctccgcgcggcctttcctcggagccaggctggggaacccggtgaggcacgcagaccagtcccttcgagacgcccgcctcgcggaatcgggttcaccggccctgtcccgcacggtcccctgggtcatctccccctgcaaccacttgtctgaaacttaccagattccaaccttaaggcaggaaaaaaagtgtttcatatacaaactgatcagggtatttgcagataattgcgaatgtcaaatactcgggcgtgatgacaaagtgcagagattgccagggccagagcttggcctgaggggcgggggctgctggcggggctccagggccacctcaggcctgcccagaggcgggcctgcgaggggtagagcagtcagccgcaactgccaacagcccatttaacgaagacggctgcttcttctacccctcggctatggagctgattcatggattcattcacttagtctatactggagctccgctcagggaggaggtgcgagagtggatactgcaccagcccagctctctctccctcactccccactcctgatgcacaaatacctcactgcaagattccccacaggtggaattgctgggcctcagttggatgcttaggcccaaagcgaaggccctgccaggcggtgctcccagagctaatgtcctgtggcagagtaggaaagagctacaagccatttaggacaaacaagtgcaccctttgatactgaggttagtcttcaatagaaataaagagggacattaaaaaaaaaaaaaggaagaggaagaaacgaaatactggacccacccaccccagtcctcctaccgggttgcaggaagccatcctggtgccatcagagcctgggtgcaaacggcccaccagagctgaccctgccaagctctcagtgacagcaaaggtggctgctctcaacagctttcagagcaactcctctgagaccctactgcaggcacactcagaatgtttcaagtgccttggattcttaaaaaaaaaaaagagagagagagagagaaagaaaaagaaagaaagaaagaaagaaaaaagagtggggcgtggagggtggtgttactcttgttggattccacatctactgaaaactgagtggatcaattatgggtgataccatgatgttggtggcaagtctggcttcccaggccagaatcgcaggggtttcaggacctggatgctgagaccgagaggagcagtggaggcagggacaccccattctgcattaggtggcataagctgcagtcactgaggccctggccccggggtcctgtgtcctaggccaacgtggtggtggtgagggggctgggaggggtatattgcggtagggatgctgaaagaccttgacctgactgccctctcctttctgagagctaaagaatgtggtggggattcttccaaagccgggagaaggcaagactagtgtgtgctagtgggtgcagctgggctgcagagggagggaattcctgccgactacagggagccctctgtgcttgtctctctcccccgccctcagccctcttcccctttcattgaatgcctgaagtcagagcctacctggaaaccctcaaaattttacactccacttgtccgaggtttccaatgatgacaaatttgaaaaacgcttcggctgaagcccggcacctaaggctgagagttggggggaggggaggctgttggataaaagctccttggaaaagacacacttgcctccccctttttcgccacgcggaaactggccggtctggacaagggattgcgctgggctaaggcctcgggctggggagagctccagcagcctgaaagccgaatccgcagaagttatccacctggctccttagccaccggccaacaagagggctctgggcgtcccgcccttcacgcctgtattagaaaggcctgagtctggccgggagacctgacttgaggtctcttgggaggagcagggggtgccagttctgcaggggacttgcccagttccagtgaggctgatgtagaaaacaatagctctgtcctcagcctgggcggccagccggggccgcacgtgtaagatgtgattctatctgagtttccaaatctaagtgcattgattgaggcccaaagagttcacggcgcataactgtcttaattaaacctgctataaacagacaaatcacttcttgttcttgtaaatagagcttggggagatggcacagggtctggcaaaagccaggcttggggaacattcttaaaaaaggaaaagagtactgagacacagacagaaaaagaataaaactggagtatccacatcttcagaaaatagctcaactgaaaccaaaatatgccatagcagggaagtaatgtgagacaccctaagttcccagagcagctcagtggaggctggtagcccaggatgggaccaatggtggaaaagcagggagccggagagaccacaggttgtttgggggaggacaggtgcccattgctgaggctctgagctactctacttggccctgcactttccttgccaatccttccatctttccctgccactgatctcaacttcctgatactgagagacagtgctgggaggacaagtactctctcaacttggtcagcttgggggacaagggctggtcaccaagagctcagagatagcaacaactggggatgatgggtgatcataggagtccagcgggagcagatgggaagaaaagttgtctgtgatcctctgggaaagcagaaaatggggagtatgtacacccacagctcagattctgctgtccctaagtgccggcaagggctgggggatgatcttgagtagggtcaggtgctccagtgccccagctgttgggtgtccagaagaggttaggtgtgtggtagctctgggaagaatgcgcgagacgtccttcacttggaatgtgcaaagggccgggtctgtctccaagtaactccgggtctccggaagttacctggcaggggcagc

SEQ ID NO: 1880831 - DNA, 4001 bp, Homo sapiens
caagggtgcatcatctcaagttttcagtctgagaacatgcagcaggctctcacctccaaatacttcccaaagcttaaccctgcggtccatgcctccagtggccagtaaccgggaacctggactgaactgcacagcgttgacttccccatcatgtgcatcctgcaagacaagcaccctgtgtcaaacccagtcattctcatcccaagagctcaagatgcgcgaacactccaaatgcctaattcatggggaaacactcatccttaaagacaggtggagccaatcataaactaaactggactcctagcccaggtcaactaagattctattatcattttattcttctagttacagttgcattagagtgcagtgcaaccttctcaaaaagtactcaaaatctgtgtagactgcttaaagttggtccttgcattaatttcatctgttctaacaataatggcctatatttatcttaatagtttaaaagtaaacctagaattaattttggtccagactgagttaatactacttattgatctactagtaattactaatttactaataatattaaatactacatatttaaataatgtatagcacatggcctctcataatacagctttcgcaatgagtcctaatataagtagatggcaaaaacatcaatctgtgttataatggaattctatgtagttctttctggaaacattatgggactagtgtgtactggcagtgtgacctctgccaagtttctgaaatctcagtttgctcagctccagaaaggtttttgcaacccagaatggtgcctgttaatgcataagccttagataaaaatgacagtcgttattttaagagaatttatattcttcacagggaaatttctaatactggcataaacactggcaaaagatggtacttatgttcaggataagaaagaaaaccaagtaaaaaagcatcctggctgggtgcagtggcacacatctgtgatcccagcacttcgggagaccgaggtgggcagatcgcatgagctcaggagttcaagaccagcctgggcaacgtggcgaaacctcgtctcttaaaaactaaaaaacaaaaattagccaggtgtggtagcgcatacctattgttccagctactcaagaggctgaggtgggaggattgcttcagcccaaggttgagactgcactgagctgagattgtgctactgtactcccgcctggataacagagtgagactcagcatcccattctagaatgggaaaagggaataatcgaaaaattcactatactctcttaagaagattatgggcagtaaaatatttttggatgaaatataatgcctagaattggcttcaaattgctccagcataagtgtgggggggaagagatactgcgtatgtttggaaatttctataatagagaaggaaaagaaagactagaaaacatagactatcaatatgagattgttaagtagataatcacttgtctaaaaggtcacttggggaagagaatatgtgatatttacatttgcttgggactaaaaaaaaataaaatgcttgaagtatcacggagggagtgactattaacaggctgggcaacaggcatcactttggtaacttcattttccactttgcctccctcttgtgacccactgctgaaaagtatgacaggtgaccaaaccttttacccccatgaaatttccttttcttttttatggtttctttctccttaggaggtctcagattgaaaacttgagatcatgcaccatcacacccatgactgccactcgtcagtctcctgtgtaactggttttgttggatactcgtcagctgtgagccgatcactctcagaaacacacactgacagaatcccaaattatcagctgctccatgatcccatacacatgacttaaatgtgacgggagggaaaaaatgggctgctgggagttgagggcaacaaagggaccgtgacattcagtgcaatcagaccttttaccaatcatcatcgacctctgcaggtgcccggtgcatcatggaatcacaggagtggagtgggactgggaaggggcgttgatgcgccccatcccaactcctcctccaaagcggaactctctttacaacagtcaaggcagttcatcactcagccagtccactgtgtaactagctaagtccctccttatacctggaacccaaagctcccaccatataaattccatcccatttttacggcaaaatcttccctgctttgaaagctggctcctttcacttacccgctgccagttattaggccagtactggagtcagtccaactctccaggttctgttctttgtgctctgtttcctaccctcctcatgctttgacagttctgagccaggtactgaatgtttccccaggctggttcaatttctgctcaactaccccagctgggatgcaaactacctgctagtactaggacccagctctgaactccgggtgacagccctggtatccatcaccgtggcttctgcccaggactgcttccagtcatagacccctaatggctgggagtcatacagatagggatataattcatgaaaccaacagctgtcctactgaacttccataatacaccactgactggcaactcactctaaactggagccaattggtgacaataattatataaatccctctcccatttttcacaatccctaattacttttcctttgccccatccctcatgctagcaatcctttctcagtcagctctgccattacagaggatggttgtaacaaattttgtcctctgaaactaagcaaaatatatcaatttctcacagctgacagagccaaaaggtggaaaggcttgatataagtaaaacaatggaatgcttagctgcaggcctagaaaggaccctttaattgccaggctctgtcaccatatcaagcgtggtagggttcggggctgaagcatacttacgaagacacacaaggcagtagctggtaccctcacttctttaccagaaccaggatgagtatccacattgtcctgggggactgggaaggaagagacagagcgtctcctaagaaataacataaagacaaatattagacaggattgcagaggtttactgctcatcaaattgttagaaaggactccaagacgaccttgcttaagcagactgcctctgttgatagcctgtccttctagattcttcaaactacagaacaattcacaaaaaaatcaaaagcaccctcactcaaatgagaaagagagccagcacatgccttactctcctgcacactaacctgtggactccaaaacccaacaatgaaaagcaatcctgaacaactgcttacccagtcaataagctgctgggaaactttctcaacttaatgtaacagctagctcagaggtagctctttggtcttttttgcaaaactattttatttctatgcctagttagaatcaacctcatcacttgtgatcaatgtggagtctaacgcatgccaaaagaaagcaacaagagcatgagtactgtacaaagtgttcaacctggcagccctgctctgagggctcccggcattcctaggaacatgcaaagcatcctcgttagcacgtgaacatctgatgactgagggcagtgaagcggtgattggcataattgttaaggacccacactcacatgctggactaagagaggataatagtttcacctggcagcatcagaagaagaatgatgtcccaaaaggggagactcggacagactaaagggaaaggccagagatcagcacgcagcgagattaagaggaaaggaagttgaggaaaaaaggaagaagctaaatgaaaagctgatattaaggcatatgtatactctgcatcactgacacctggtgtacatttaaagaataaaaataagtcatgtacatatacttaggtatacttatacacatttaaaaaggaaaggtcttctaacctacccaaagatattagtgatagaatccagaaggcctccagcaggctgcgagagtc

SEQ ID NO: 1880832 - DNA, 4001 bp, Homo sapiens
ttcaacacactagtcactgacttttgcgttctgccttccctactacagtttaaattacctaaaggtagaaagagtatcctgtttgccttttcttacctgccagctggtgaagggcctagcactcactgcatgctcaataaatgattgctaagctccacagtctacttcatgggaaagaacagccaagtgttaataagctaacactatacgtgtaccgaaactcatttctgccatgtcctgagatcttaaaagcacaacccatgtacagaaccattactgtggagactcttatgtgcctccagtcaggagcttgggtatcataccgaatgtcccagaaacgaattttcttgtcaaaatgtccactcattacacattgctctgtgcagacaatatcattgcaactggatcctgcaaacactgtctttatgcctgaaagaaatgcaaacatcattaatcaagcagaggcaccaacgtggctgtttacataatgctgccaccctctaaccactgacttgtcagagttactcacttaaatgaagctttaaacaagaaaaactatcactatcctcagtgcccctctaaacatgaagccagatctgaaattcaaactatattacataaatgcaggctctgacgtgcaaacacacacctccacgctaacatctaagcatatacacagacagagagactgaatttcctcacagactttgctgcgtagatcccagagtttgagagtccggtcgtgacttcctgagacaatccgcgcattgtccagcaggaacttagcagacagcactttcccactgtgtcccgtgagtgtgtgctaggagagagaacacagccagggtgagcctcagggcgccaggccctgcctatgctggcaaagtatccacagcatccttacctccagagtcagagtgtcagaccaccctgagatccggccaggaacactcaaagcgataagacagcaaaggaaaaagaaacaggtcaggcacagtgactcacgcctgcaatcccagcacactgggaggccaaggtgtgaggactgcttgagcccaggagttcaagaacagcttgggcaacacagtgaaacccccatctctacaaaaaaatttttttaaaaatttgcagggagtggtggcatgcgcctggggtcccagctacttgggaagctgaggcaagaggattgcttgagcctgggaggttgaggttgcagtgaactatgatagtgccattgtactccacctgagtgatagcaagatcctgtcacacacacacacacacacacacacacacacatcccaaacaggacaagaagcaacaatttcattcactgagtcttatccaggggccatgtatctcataggaagcctatctttgagtgttggccaaaggtgaggtatcaagaccaaaaggataaaactcccactaaaaataacattaaaaacaaaaattcaacatcactagcaccaagcttcacgtgctccccatcctcaatcttgaatttgaaatcagctctaccacagatacctgctgtactgtttttgtaatttttctatgtctgaattatatcaaattaaagaatttttaaagcctcgatgttgcgccatgctgctgaaagtcagttccatatttaaagtcagactagacaaggtcaccacaggcataatttacaaaaggaaacatcaggactccttatgtaaacaattaaaacccctgggggattttcaatcagaggtctcagcttgaacaaggcagatcatagccacagataccagcactcccaacaatcaaatccctttgtgactaagctgttggatgccaaccagtgtcttccctgagctcacggaggaacacagaatgagggacatcacggagtgtcagctgcccttctgcccatcgcagcacttctgaagtgcgatggaggagaggcagctggggataactgggatgccgggaggggatctgaggactcagaccttttaccattcatcattgacctctatgcagtgcatgatcaacatttttctatgtgtaaaacaccagaggttcagaaggtattcactgatgttttctttctaattagaaaatgcaagggttggcaaagtggctcacactggtaatcctagcactttgggaagccaaggtgggaggattgcttgagcccaggagtttgagaccagcctggggaaattagtgagaccctcatctctacaaaaaaattcgaattagctgggtgtggtgggtacttatagtctcagctgttacaggggaggctgaggtgagaggactgcttgagcccagaaggtcgaggctgcaaggagcccagatcatgccactgcactccaaaccttagttcccaaagatgagacctcatggttcagggttagattttttttgtgttaacatttttgaaaccaatccttcctctattttcagtggggttaactccactttagcacagaagcgaaaacttcggaccacatatactcccctctcagcttcaatgagggaagcttgtatgagttctcagactgccttatcccacattcaaacctctgaaactgggacagcatcttacaactgctgccagtcgggtgccggctgtgctgcggttgtgtgaaaacctcccactgatccttccgtaagatcaagaaagctccagtaacaaagcctacactagatacagtccatgaataatgattccattcaatataaaacatccactctgcacaaatcatgggcagagacaaaacttgggtaggctacttcttaaattctatctttttttcttttttgagacagagtttcactcttgtcacccaagctggagtgcagtggcgtgatctcagctcactgcaacctccgcctcccaggtttaagtgattctcctgcctcagcctcctgagtagctgggactataggcgtgtgccaccacatccagctaatttttgtatttttagtagagacggggttttaccatgttggccaggctagtcttgaattcctgacttcaagtgatccgcctgcctcggcttcccaaagtgctaagattacaggcatgaaccactgtgcccggccttacattaaattctgaataactattttatcaaaatttcaaatttgtatttatattcactatctgtttctttcttaatgttaagagtaaaatcacatttcacaaacacagggtagaaaaagacattgttcataagtgggatatggcaagtacagatgatcctcaacttatgatggggccagtcttgacaaacacattgtaagatgaaaataccctacattggggaccatctgtatattcatttttacatacttcacaggaacatgttaatctttacacaattatactcttcctaaaaatttatccattactcttttaagcttatagcgtaagcattttttcatgtgatagctgaaaattcatgggctttggggttccactgatttgaacaccctgggtctctgtaacatctgtgaacaggaaacatccttgtgctatcttagtacggactcagcaagatgaatgggatcaaatctcttccttgttgcacctccctttctttaagagtctgtcacagatgctgttgcagtgaacatctatgagcacacagctttcttctcttgacttatttccaggaatgaaactgctgaactaatggaataagggaaagggacgttttgtttcttggctcctcgtacgtattgtcaccttgctctttacaatgtttgggcttggccaggcgcggtggctcatgcctgtaatcccagcactttgggaggccgaggtgagcggatcacaaggtcaggagatcgagaccatcctggctaacacggtgaaatctcgtctctactaaaaatacaaaaacttagctggacgtggtggcgggcgcctgtagtcccagctactcgggaggctgaggcaggagaatggtgtgaacccaggaggcagagcttgcagcgagcagagatcacgccactgcact

SEQ ID NO: 1880833 - DNA, 4001 bp, Homo sapiens
aagattcattgtagttttcaaaggaaagaaacttaaatgggaaatataactttatgttttaaagtaactcaacaaactttggaaaatagaccaataaattttttatgatcagtcatatcatgtcatgtcatcttcagaatgagttgatcacagctaaagatacaatattcatagagtcaatcttctcatttccatagcacagccaataatctgccaatgaaagggcctttagtactcatttgtacaggatgcaaatgtttcggcttggcagcttgaaatgaaagtttcatttttaaaatcaaataaagatcattaatgctcacatgaatcaacaaattctagaagtcttataacatgtgctagctgcatttcccatgagttagactaaataagctgttcatttctcagctatgtttttctgcttttgagatttttaagatgtcatcctataggcaaataaaacaaaaaaataaagagattgctctgtcaacagaactttcctgttctgaggcttacacaaaggaagcttaactagtagctttagtactttgtgaagaaaaaaattatactcaaaaagatggttgtgttataattaagaaagtttttaaaaaatgtttttaaaatagaaaatggagcatagagaagttctagaatttcttccagttgcactgctcactgggagtaggacagagctcttttgatttacagactcctgcttttccctactcttgtgtcttcctctatgacaatactagcttctgctgcaaggaacggatgatgttgggtgacctattgaaatttcagccgcctcctttcttctttttatttctttcttctgattccccaaattcttttctcctcaacctaatacaaatatattacagaataattgacagtcttagagcacaaactaccactattatgagtatcatgagaccattattattattattttgagacggagtttcgctcctgtggcacaggctgaggtacagtggcatgatctccactcactgaaagctctctcccccggggttcaagcaattctcctaacccagccttccaagtagctgggattaaaggcaccaccaagcccagccaatttttagtagagatggggtttcaccatgttggccaggcttgaactcctgaccacaggtgacccacctgcctcggcctcccaaagtgctggggttacaggcatgagccactgcgcccagccgagaccaatattctgctttgagaatttgctgtggcataaaataaaattagctagattaatgttcatagaaccttacagtattcaagaaagtcactaccaacattgccaaatagatttaagctaagcacaaagggaaaaatatagaaaagcacaaatcacacagtcctggtaactgtcttctgaaaagctaatataattatcctaataggtatatttgataggcccttactgtgcagaagtctgtcctaggagttaagaaataataggattcaataaaaacatactcctctttcttccgcaaggaaatttcagtctgaccaatcaggagtttgtgccacacagccagcacagtgttcacctagaaaaactagtccaaccaaacagtgattcagggtactcctgtgactaatttatattctcactcagctggggaaaactcaccctgaggacttgaaattgtgtccagaactggtgggttcttggtctcactcacttcaagaatgaagccgcggaccctcgcagtgagtgttacagttcttaaaggcggcgtgtccggagtttgttgcttctgatgttcagatgtgttcggagttttttccttctggtgggttcgtggtctcgctggctcaggagtgaagctgcagaccttcgcggtgagtgttacagctcttaaggcggcgcgtcgggagttgttcgttcctcccagtaggctcgtggtctcgctggcttcaggagtgaagctgcggaccttcgcggtgagtgttacagctcataaaagcagtgtggacccaaagagtgagcagtggcaagatttattgcaaacagagaaagaacaaaggttccacagcttgaaaagggaccccatcaggttgccactgctggctcgggcagcctgcttttattctcttacctggccccacccacatcctgctgattcgtagagccgagtggtctgttttgacagggcgctgattggtgcgtttacaatccctgagctagacacaaagattctccaagtccccaccagactcaggagtccagctggcttcacccagtggatcctgcacgggggctgcaggtggagctgcctgccactcccgcgccctgtgcctgcacttctcagcccttgggtggtcgatgggactgggcaccgtggagcagggagcggcgctcatcgtggaggctcgggcctcacaggagcccatggaggcggtgggaggcttaggcatggcgggatgcaggtcccgagccctgcaccgcgggaaggcagctaaggcccggtaagaaatcgagcgcagcgccggtgggctggcactgctgggggaccccgtacaccctccgcagccgctggcccgggtgctaagcccctcattgcccggggccggcagggccggccggctgctccgagtgcggggcccgccaagcccacgcccacctggaactccagctggcccgcaagcgccaggcgcagcccgggttcccactcgcgcctctccctccacacctccctgcaagctgagggagccggctccggccttggccagctcagaaaggggctcctacagtgcagcggtgggctgaagggctcctaaagtgccgccaaagtgggagccaaggcagaggaggcgctgagagcgagcgagggctgtgaggactgccagcacgctgtcacctctcaaaatgacccactgaaaagccatattttactgtcttatctccctctccttgactctgagaaacaaggggctgaaatccagtataactccacctaaatgtattctccttagctcaggtgtgctgacttgtttctaataccacccagggattcagggatactattagtggtttactgttaagcagcaatatcataacagggaatactttccttggctatgggtctgtgttttgaaatactatataaaatacttataagcattacatctgattatttaacacagcagcagtctttccttataaatacacacacacacacatacacacacacacacacacacagggagagagagagagaacaatggaagagagaagaatatctgtctcataccaacatcttatgttgtatcatttcccaggcaactgatgattaaagataaatatatgcaagctgtacaatgactgtaaacagcctatgattcaggaataaactactttcatgaaaaactaatggccagaatgcctctctatatatgtactaagacttggaaggaaggaagaaaggaaggaaagaagggagggaggaagggagggagggaggaaactgaagaaggtgagaagagacctatattttcctaccaaattaaatttcctgcattaaagggaaaagaaaacctggaggtgatattttggttggcctcatacatcaaaaggaacattgttcagttacatctggtatcaaataaaaagtgttcatgtaactttaagattgactgagccccaataccctcttccaaccatggtgagtgatactgcaaactccctggaatccattttctatccgtttgttcagtatttgttatgcacaaccacttagctatttgcatcacacaatttgtattttatcatgaagttcaacgtccatgtgctctgtgtcttcttgtgtgaccctaaagcaactgagggaggacaccatgttgtgcagtctccatcactgggtatctactgcatctactatctccagctaatccaggagtaatacacagttgtccaaaatagaacttcttatcattagcatcttcaaatcatgcacaaagtttaacag

SEQ ID NO: 1880834 - DNA, 4001 bp, Homo sapiens; identical to SEQ ID NO: 3704

SEQ ID NO: 1880835 - DNA, 4001 bp, Homo sapiens; identical to SEQ ID NO: 3712

SEQ ID NO: 1880836 - DNA, 4001 bp, Homo sapiens; identical to SEQ ID NO: 3713

SEQ ID NO: 1880837 - DNA, 4001 bp, Homo sapiens
ggaatcaaatcataattaaatgaccatcaccatgtgctttaacaatattcaccatatgtttaaaatagttatttcttggtatctggacatcactggacacagtagaatgattttttcacagtcagaaaaacaagaatgaaaagagaagcctctggatgctacccttgcagagacctaaatattaaaccaaatagattatttttcctactgtatagacattttttgttttgttttattttgagacagagcctccctctgttacccaggctggagtgcagtggcacaattctgcttactgcaacttccgcctccggggttcaagtgattctcatgcctcagcctcccaagtagctgggattacgggcgtgcgtcaccatgcccagctaattttttgcatttttagtagagacagggtttcactatgttcaggctgtttttgaattccgagcctcaagtgatctgcccacctcagcctcccaaactgctgggattacaggcgtgagccagcatagacatgtctggccctgcatagacatttattcgttattcacaactaacctaatggaaaaaagcagccagcatgacagggctacctgcaacgtgttccctggaagacctcttggtaacactgctgtttacatctcacaaatgcaagggtggagtcagaaggaggttatttcatgcaacagccttcctttgcttcatggccaacgcacaagagcctgaagcctgcgggcaggacagatgaccaggtgatcattggggagtactgcccactgagagtgcagcaggaaaggtgtctggaaacaaagcatgcaaagacacagagcaagtcactcattcatcaggccaaagacacgaggaagacatgagtctcagagaagtgctcacctgtacttctgtgacaaatattacccaatgccacaaccacagccacctcgtgtcccgaaagtcagctccattcctgccactgtgcttagcgcctaagatatactcttcgcttcatcctcacaacacttcaggggtggcccttaagcctaaacacctttaggcccaactcacggatgggcttggagatgtttagaaatttggctttggctcataccctccaatatgtagcctctagattcaaaccaaagcccgctggcctccaaatcctccacactcttaattactatacagtggaggaaaaggaggaaacacatattttaaaatgacaaattttgaaataaaggtaactataaacctttgaaaaagaagttaaatcgcaaacagagttcaattaggcatgtttgaaaagtcatggcacacttgttctgtgattctgctgagttttatccagctcagcttaagttattcgcttggactcttgtgtaaatctctctaccttctcaatccaaaggtcagtactaattttagatttcagtcccagaaaaaaacaagtgtctgaggaaggaactagggggccaaaggcataaaaccatgattcaaacgtaccacacagatactggcctctttctgtatcatgtgttttggttgtgatactagggctatcacgcagcacggcgaggaggtagtcttgaaaggaggagtgtgctttgacacaaatttcttctcaagaaggtataaacattgatgggatgtaaatctttgaatatccatggtatcagctcacggttcacacatctacagacccgggtccaggctctggcactgacacataaaggctgtgcgaccctacatattcacagggtgtgccactttggcatacaggctgtgtgaccccccacatactgcgtgaccgtggaccctttatctctgccacacccttccttcccaactacatgagtgggaatgatatcagcatctagctgagaggcaggcacgaggctctaggagaccacatagagattccgttggggggaaaacagaaagaaaggcagctggggaacgccaggcagcacggtcctctccactccctttcctcctaaccaaggattgaccatgtgatttgggattcagccaatcatagaacctccctcctccgcccacagccattggtacacggaagggcatgtgaccacgtgacctagcatcagccaatcacaggacctcactcctctgcccacagccattggtatcgggacgagcatgtgaccatgtgacttagcatcagccaatcataggacctcactcctctgcccacagccattggtacagcgaacagcatgtgactgaaactaagccaatcagaattcctccctaggatttccaccccccaccccccccgccggctggaactggctgaaaagcccctctttcctcctcactgaggaggctgtagggaggtaagcctggagctacctacagtcatggtcccggagaggacaaccacaatcagcagacagaagcagagatgagaggcaaggagaaagagaagaaagcctccaagtcctcagtctttggttccagtcatcttcagggccagagtcacctctcccatgcttgagtgggcagtgtcagccaacagctctccgccttgtttccgagttattttgatttgggtttgttctcttgtaagcaaaagataatgcagtagttaatagttcctataatcttaacagtgaccaaatcctcagtaagaataacttcttgagtggatttcttatttaaaaactgcagaaataaattttagtagaggaagcaaacattgcctttatttacatagcactttccccaaaggaagaaagaaacatccattttcatttgtagtcaccttattcatttccgagtgggctttgtatttggcattaaactctttcacatacccacatccaccttcaagatttggcccataaaaacttaggataaaaacaagtggttattttttctatagctatatttgctggaactacatggagggcgaaagttggggtaggggtaagagaaggcactgatgctatttttggtatgctctcaagagaaattccccaggttacgagttcacactaggggttgggggtggggcacggtttacaaaaacaaagtgcatttaccaagatttgcagccgtaacaggaaatcctttctgactcttgatgggattttttcttttatattaaagtctcctcatattattcttcaaagaattaaataagaaaaatggaaaggcacaatggatgtaaattccaattctcaaatgatcttctgaagcaaaggataatgtcttacgtcaaactgtggcaaaagcctgggtgttcctgatctaatcttgaactagggtgtccaccccaacctttggaggaatcctaggacatgtttgccaaaacatacgagtggaattacaaatagaggattgcttgggctcagtggccatcctcatgcacagaaagaatcccagaagggatgccgacttccctggactgggcttacatccagacctagaaatctaacagcagaataaaggcaagactcactgactgtagaaatagacttggcctgttggatgggaggtggtatttctcaaaagagaaataaaatcatactaatctctcagtattcttaaattgggaacttgcagacaagagataacctaaagatgtagtttattgcatttgactccattctgtatctaagggtattttttaaaaacccaacattggttttcagattaggcgtgcaatctactcatgaggaaagatggtttgcaaagagaagatgggcacatttatgtgtggagaacaggttgacaagattcaagtatatgggacctaatttatttaaaatttttataaatgctctaagtgggaatacaaactaaatcttcatgttggcccatgatgctgtttctgaatataatgctgaatgattttataggcttaaaaaagtgagagacaagaactttaaggtgtatgagcacaggataatgcatttacgaaaaaattttatctagacttaacacttatgagaaagccacatcaaaaggaaactgagccaagaatt

SEQ ID NO: 1880838 - DNA, 4001 bp, Homo sapiens
cagcccttcccgacgggaacgcaaagcggccacgagggggcagcgcacggcagggaatcttcgccgccgaccccagcccaccgccaaacttccctgctgctctcggtcctcctgtacgtacttccgttgctctgacgctcccagaagccggggcgtcgggaaggagagcgcgaattcaccctcctctgcgcctccgtaggaaaaaattggagcgggggttcacgagactgcgccgcggcgggcgctagagcccctcgcacagcgtcgccaagggtgcggcgtggagccgggcgcctggcgccagggtgctggtcggcgggcagcggcgccagcctccgacccgcgactccggcgagccaaggctgcgccgggaggagtcggcgcgggccccggggtgcccccttcaactggagcgccttcccctcctgccttgcggcgcatccccacacctacaccggaacgaagctccggggctgtcacttctgcgcgcttctcggaaaggagtctgaactgggagcgctccggggggtcgtcggggaggatgcccgggcgtcggctgtgtccccaagctgctcgccggcgctggcgaggaaggcagtcgggataacgccgcccaaactttccttcgcagcagcgttggcaggaaacgtccctctctgaggctcacgaaaagccgaaaaagactcggacgcttggaggaggcagggccaagcctgcgcaggagaggttccccggagccctggagatgtcctaggggaccaggctaatcgccggcttgcgcccaagcgaagggaagtcctgcaggcacggcgcctccttccctgagccccgcagtgaccgtgacctccgcgcgcacccccgcgcacgtgctcgcggccgaggaagaggaacggtcctgctgaatcctctggaggacagcgactagcgagcaggccaggggcgcatggaggtgccgcgggggcggtgcggctcgccagctgcgcggaggagcgtgcacgccgcgccccggcctccccggggacctggccggccgctgcccgcacttcctgccgctggtctcccaggcgcgagccgccgcttgcagcacagaacccgttgagcttcgtgcccggcagcacccccggtcccccgcgcggggcggacttgcggcgggacaggtgtagcccgcagccgcaggcgctgcgctcaggactgggcgggctcggctggccggtccccgccacgcaggccggtccccgccacgcaggccggtcggtgagccacttcgcaccgccacagccctagcatcgggccaccagccggggtgaagaaagtcacggcggagcccggctccccagtcctgatgctggctgccggtggcgggctccacgccggccccgggacctaggcagccgcgcgagaccgctgcgggcgcctcccccatgctgctcggagcgtcctggctgtgcgcatccaaggcggccgccgctgctgcgcagagcgagggcgacgaggacaggccaggcgagcgacggcggcgtcgggcggcggccaccgccgcgggggcgggcgaggacatggacgagtcgtcgctgctggacctgctggagtgctccgtgtgtctggagcgcctggacaccacggccaaggtgctgccatgccaacacactttctgccgccgctgcctggagagcatcgtgtgctcgcgccacgagctgcgctgccccgagtgccgcatcctggtgggctgcggcgtggacgaactgcccgccaacatcttgctggtgcgactgctggacggcatccgtcagcggccccgcgcgggcaccagccccggcggcagcccgcccgcgcgtcccatcccaggccagagtgcggcccccacgctcgcgggcggcgggggcggcgcggcaggcagcaccccgggttccccggttttcctctccgcggccgcgggcagcaccgccggcagtctgcgggagctggcgaccagcaggaccgcgccggcggcaaaggtgagtatctgtctcggcggaagtggccacggcacgtgggagtgtgtgggtgggtgcttgggcgtggggggcagtgatgaggtgcggaggagaccacgggtggtcctgcgttggcccactccgctgttgctcttcctccaacttcgcttgcttggtggcggcatccggcccctgggcagctcgccgcttgttcacgtgtgtcccatcctcctgtggagtgggcacgccttcctgtcccgtcgctcacccccgattccttggccggacttgttaccctgcctcttaaacttagcatcgcccttgcgtctccctagaaacggggaccttcttcctctgggtccccagacactccctctgcacaccctgggcctgcctagagaaaagttagcccttaacgtttctgacagggctctgatggctgctctgggaagcccgcgggcctcctgcctgcggtgtggctaaggaggggagggcagaaggcagagtgggactggggtttggaggaatgcttctagtagtctggaaggagttaatctggaggccccaggagccttttgacccagcccttttggacttggcagtgtctaaccagaagccaaggtcttctcctgggctcccaggcagggttgcattcccacgggggtcatttatatttattattattatttttggtacagccgcattttagggccttcgctgcttctgttttagacgaaagatcttctctggatggcttcaatgatttggttttaaaagcttcttacagcttcttattacacacccttgccaccttgtgaacagttaccaggagagagggcatgggatgctggtttaaatgagaaaagaaaggacccgggttttgttaatttctttaaatggagaaaagcacttaaatgttaaaaaaaatacattatctattggaataatcatttgctttagaaacacaactttattcctctacttttgaccatttaaggagttggtgatgcctagtccttccactatgtgtaatcctgaaatgctgggaacattctagcacctggattaggcagtactgcaaatctctaaggttaaggttaggaacttaaacccttggatgttgagcttgagttaaatgccatactttgctgcaatgggtttttttttctatggatcaggaagaatggggacagtcaaggatagtcactgggggtcacttggggggcactgctgaaggggaatttttttctttggttttaattgtgattaaatccagctaaatgcttgcgttagaaattttcaaacttttccttcctggccttgctgtttttgatgtaaggtatttataattaaatatctttatttgcagaataagtgggttaccttcttctgttctgataaattatgtgatattcggagccccgcttctagtaaaacgctgggacattctgatgaccatctgtttacagatgtcctctcagtttatcttgggggactttgtgtttgaccaggaggttaggaggtaacctctgacatgtgacaggctgaagctttgatgccactccgggaattctgtggcatttgtagtaccttttagaacttgtcaaaggggttgaagcttggaactttttagtagtgacatttagtattagcaggaaattgatgttttactcaccatatgttgagacccttggttgactttctttatgggtgcatagtcatgttcatgactttttgtgtttttgggatgtttctggatgttgtttaatagacgagcacttatttaactaataagcaggagtcccgcatggtgtattcacactacactagcactatactaccatgctgggataatagcattaggtccagcacatgcttcgggagtgggaaggattgtaatagcatatcaggcattgagcaaccctatacagttggttgacaaagatttcggctgaaaattacttttggtactttactgtccattggaattgcttgactcctgccaggaaagttgaatgctggatgttg

SEQ ID NO: 1880839 - DNA, 4001 bp, Homo sapiens
cagacatgtccaccatgtgcaaaaagtgctctacacacagctgtccagtttcctagctgtttaccatgtgtgagtagcaggagccatttcgctgccctggccagtagctctcagtgcattttccatttgttcttttatgatgagcaatgctgaccacatttcactctctctatcaaaggtttctcatgcaccttgttatttacagggggtttctctctgtttcttattaatttatacattaaaaattaatatttttttggaatatgagttaaaaacattgactctctgttacttgtcttttgaatttgcttttttttctgttttttcttaatgaaatcaaatctgtcttctatcttacaagggtcttttaataaaacacagtaattttgaagttcaaatgggaaaataaacaagcaagaagagctaggaaaaaatatgtaataggagaacaatgacagcccagccttgacagaacctgtgacacattacaaagcctcaataattaatacataatagcagatgcaaatataggagaaaaatcaattcacaaagaagaaaattcagaaattaacccaaatatatttacaaatttagtatataataaaaatgacacctcaattctatgttgaaatgatgtattgcatactagataatgttcatttggggagaaaaacaaaaattcattcacagctttgtgttacagaaagataaactccaaattcattgaagatttagagtgtcaaatatcaaattataaaagaaccaggaattatagaattttttttcaatttcatagtggaaaagacccaagtatggcaacaaaatttctatatttctatatttttacatgatcagcaattatttgtacaacgtacaaatacattgtaaaatacaggaaaaagtacagatatgaaaatatgaaggataaaaagcatctataacattaatactcaccaatactactgtctgcattttgatgtatgcttcaattgattcctattgcgaaacatgtagactgattccacttttagcttttatagccattactatcaggtggtaattatcttgggagagatgctctagatgctcaatatgttttaattacatttatacatatatctagatgctggatacatttgaattagttcactggagtggaaacttgttctttctgctgctgaatatttcatctactttatttcagaggcagcacaacttgtctgcttacattgatgctgcagccatagtatctggagtggattgggtgacccgaggctgctgtatcaggacgacattccttttggtgccacagcagggctttataaccaaagctggtccaataccagcatctgatgggggacttgtataggagctgccagaataactttttccaaggcacttctgtttccacttgctgtgggatttttgtctccacaaggggagagtctgagagcaaagccttcataggggaacctggcagaaggtggagagagcacctgggctctgcaaagccagactgaagtcacaagccgctctggacttcttcgtcaaatggaccagcaacatctttttctgttaaagcaatttagactagattttctgatacatgcaactgaagcactgtaaataatacatgaatcttatcccctcagaagactttctactttgaactctctcaaccaagcagtattagagcaaataagcaaattcctcagttgagagttaatcttgcaaacatcctgctgtagggaaaggtcatggcctgatctgtaaacacgggaagagagccattggacttgggaatcagatgcagcctcacacggctgcagaccgcaagactcatcctagacacagcttatgtcactgtgatccagctgttgacaaggctggtcacagtgaggacatcttcagtgtgtcagctgaactacagaaaatgttacagattctaatcaacttctgataaaatcatgcgtggtcatagttacatgcagtgaatttctctgtcagaacaaaaagaatatgcaaataaaaatttagacataagcctcaaatcccatcctcagcatcaaatgatggctcacccatttttcctctgctgtaccataaggcatatagagcatgacctgatcagagtgctgatgtcccattctatcatactgatgaagacacaggtcattactaatgaagcctcttaaacctcacatcatggttagcatctgcactctcataaacgtcttaagtcccttgaatcaggcaaaatctctataaatatttaagttttttctaaaaaaagagtggctgccaaacctcaagctaagaaactttcaaataaagttttctttaaaacaaaagttaaaatgttttaaattttcatagtaacacattttttttttaaattagaaggtcttataaaataccggaaagacaatttttactttggaaacctcaaaagcataaatcagcttaagatctggaaataattttaggtattgatcgcagttctataaactcaatgctagagtcactggggacaaacagggacatgagaatcctactcggagtaaattgccacctgaggtgacaaagctgactacggtttccaatctagttgtacacggagggtcaggaatgaaagcaagaagacccaagggcccctctccaccactttccttaccagagttcagattcccaaacttttgcttcccttatattattttcttcaatggactctaattatgaaaggaatacttacaggaaagcaagcttactaaatttggttttccaagttcttactgattacatattaatcaaattattaaaccttatactttatgtgaaatggaggttaactcattaaactgataaaattccatctaagatcaaaggaacttgaatgctgctaaaggtatatttagaataaactaaagaaatcttagccaaaagaaagtgtatgtatctaatctttagagaggctttcaaatgttgctttaagctacttttattaacaaaactgcattttgaactccactgcttgacaactatggcctttgtttcttaagtcaattcttacctttctggggccttggtttaactacttcctttgttttaaggacacaaagcttgtcagttctcaaaataaaaacctgtctctctggtcagatcattaactccctagtcaaactttcagactaccgtctgaacatcaagtgctagcctgagcttgtttccagtcccccaaccccaggctgtggctggggaaggaagaggacagcgaaagctttctctgctccctcgggagacaggaaagccctttatttattcctgcccttcctcttctccaactgaagagtgtgatcttggtacagagcagttccacacatgccacactggtctgatcttttagagtaaaaaatgggatcttctcagagaaaatttttttaaaaacttcatgtgcttaggtctcagagcagagaattttgtcttatcatgacgccactcactggcaaacaagctggcgtgcacagggacttgtgaggctctcagcagagtcagggtagcagttatttccctttgactgcctcaacttcctatgtttgtgttgacatgccagatccttatttctgcggaatgagaaatctcttgagaataaagttttcctaaacagaacaaaagtatcaaatcacttttgatgagcaaacattattttaaacttttttttaacttacaaaagatgaggggtaacatttactagttttacagaaattttctttaaacagaacattagtgaaccaaataaccaattctcctcaaacatgatagacaggatggaggttatcactttgatcattttaacctccaacatagtaatttgtaaacatcagtcgctgcacaagtattttaataacaggccagcccacgggagtaaacagcaccttagcctcgagacctgttctctcaactgtgtgtacagattttctaagtcgttatgaattcagatattc

SEQ ID NO: 1880840 - DNA, 4001 bp, Homo sapiens
ctttctactttgaactctctcaaccaagcagtattagagcaaataagcaaattcctcagttgagagttaatcttgcaaacatcctgctgtagggaaaggtcatggcctgatctgtaaacacgggaagagagccattggacttgggaatcagatgcagcctcacacggctgcagaccgcaagactcatcctagacacagcttatgtcactgtgatccagctgttgacaaggctggtcacagtgaggacatcttcagtgtgtcagctgaactacagaaaatgttacagattctaatcaacttctgataaaatcatgcgtggtcatagttacatgcagtgaatttctctgtcagaacaaaaagaatatgcaaataaaaatttagacataagcctcaaatcccatcctcagcatcaaatgatggctcacccatttttcctctgctgtaccataaggcatatagagcatgacctgatcagagtgctgatgtcccattctatcatactgatgaagacacaggtcattactaatgaagcctcttaaacctcacatcatggttagcatctgcactctcataaacgtcttaagtcccttgaatcaggcaaaatctctataaatatttaagttttttctaaaaaaagagtggctgccaaacctcaagctaagaaactttcaaataaagttttctttaaaacaaaagttaaaatgttttaaattttcatagtaacacattttttttttaaattagaaggtcttataaaataccggaaagacaatttttactttggaaacctcaaaagcataaatcagcttaagatctggaaataattttaggtattgatcgcagttctataaactcaatgctagagtcactggggacaaacagggacatgagaatcctactcggagtaaattgccacctgaggtgacaaagctgactacggtttccaatctagttgtacacggagggtcaggaatgaaagcaagaagacccaagggcccctctccaccactttccttaccagagttcagattcccaaacttttgcttcccttatattattttcttcaatggactctaattatgaaaggaatacttacaggaaagcaagcttactaaatttggttttccaagttcttactgattacatattaatcaaattattaaaccttatactttatgtgaaatggaggttaactcattaaactgataaaattccatctaagatcaaaggaacttgaatgctgctaaaggtatatttagaataaactaaagaaatcttagccaaaagaaagtgtatgtatctaatctttagagaggctttcaaatgttgctttaagctacttttattaacaaaactgcattttgaactccactgcttgacaactatggcctttgtttcttaagtcaattcttacctttctggggccttggtttaactacttcctttgttttaaggacacaaagcttgtcagttctcaaaataaaaacctgtctctctggtcagatcattaactccctagtcaaactttcagactaccgtctgaacatcaagtgctagcctgagcttgtttccagtcccccaaccccaggctgtggctggggaaggaagaggacagcgaaagctttctctgctccctcgggagacaggaaagccctttatttattcctgcccttcctcttctccaactgaagagtgtgatcttggtacagagcagttccacacatgccacactggtctgatcttttagagtaaaaaatgggatcttctcagagaaaatttttttaaaaacttcatgtgcttaggtctcagagcagagaattttgtcttatcatgacgccactcactggcaaacaagctggcgtgcacagggacttgtgaggctctcagcagagtcagggtagcagttatttccctttgactgcctcaacttcctatgtttgtgttgacatgccagatccttatttctgcggaatgagaaatctcttgagaataaagttttcctaaacagaacaaaagtatcaaatcacttttgatgagcaaacattattttaaacttttttttaacttacaaaagatgaggggtaacatttactagttttacagaaattttctttaaacagaacattagtgaaccaaataaccaattctcctcaaacatgatagacaggatggaggttatcactttgatcattttaacctccaacatagtaatttgtaaacatcagtcgctgcacaagtattttaataacaggccagcccacgggagtaaacagcaccttagcctcgagacctgttctctcaactgtgtgtacagattttctaagtcgttatgaattcagatattccctacatctcaataaaaacacctaggagaacaagaaatcaggacatgcatctcctgtaagcagaagagaaaccgagcacctgctctcttgcgggggggcagcttcgtgtcactttccaactcagcctccacaggagcatgggcatattggttcaaatgaagtgtaaaggacacatctctgtccacagtgtaaatcctatttccttaaggtggtcaaccgattgagaccagttccacacttccttaaagaaggaaaaactcagcagccagcgccaaggcccagcgatcagagaggacccgtgctcgccgcgaccccgcgctcgccctgtggccccgcgaccccggcgccaggtgttggggggaccggcccttcccttccgggtgtgaggggctggcccttctcttccaggttggggggctggcaaactcgaacctcgccggcgccctagccaaggcctcctccccgcgcctgccgcgggttccacgcacattccaagcgcgcgcattcgacccaaacttcagagacgcttctgtggaacggaaggatggtcgctgacacctcgccgttcaaatatcaggaagttaaaaataacacgaccatcgtcatcattccaaacttcggaatagcttttctaaaaatggaaaagacggtggctaaacttcaatcaaaatcgctgtggtcaagaaagtcctggaagctgctctatcttaactttgggcggtttgcggttaacagacgcgcgacctagaaaccccagaggcatcgccggttttcccgtcctcctcctcccaccaccgcccagctcttgagaggggagggtgctgccggacaggtgggtccccgggtactcactgctgcccgcccggccgcggcgccccgtcccgaggctgcccaggaagaggaaggcgcgctgccccgccccgcggacaaggaggccccagcgagggcgtacctgcggcaggtgacgaaggaggcggcgcaaaacacccgccgtgtacgtttcgcgggacaaaaaccacgcgcccgccgggccgcgctcaggccttcgccctcagggacttcggaaccgccccgtcctcaagatcgaaaagcccagagccccgcggcggctccaagcacggtgttgggggtgggggtctcagggagcgcccaggcccaaggccgccctggtccggcgtggaccccgcggggctcaaggcaggttccccgcgtgacccgcccagcccctctatgcgaactcgaacgacaggcaccacagcccgccacgtgcgcgagactcgcgctgtgccccaacccaggtgggcggcccgcggagccgcgaggcctgagcccgccctgcaggtgacccgcggcccttcctcctccaggtacccctctcctgcggccccgtcccctataggtaacctttacctcccgcggctccttcccctccaagcgacccgcagccccgccccctccaggtgactcccccccgccaacccccgccaccacacacacacaccccctcgccttccgcggccctactccctccaggtgaccccacccccgcagctcctcctcctccggacaacctgcagccccgcccctgcaggtgaacggcggcccagtccctgcaggtgacccgcggaccctccccgcccgtcctactaccgtcat

SEQ ID NO: 1880841 - DNA, 4001 bp, Homo sapiens
agaggacagcgaaagctttctctgctccctcgggagacaggaaagccctttatttattcctgcccttcctcttctccaactgaagagtgtgatcttggtacagagcagttccacacatgccacactggtctgatcttttagagtaaaaaatgggatcttctcagagaaaatttttttaaaaacttcatgtgcttaggtctcagagcagagaattttgtcttatcatgacgccactcactggcaaacaagctggcgtgcacagggacttgtgaggctctcagcagagtcagggtagcagttatttccctttgactgcctcaacttcctatgtttgtgttgacatgccagatccttatttctgcggaatgagaaatctcttgagaataaagttttcctaaacagaacaaaagtatcaaatcacttttgatgagcaaacattattttaaacttttttttaacttacaaaagatgaggggtaacatttactagttttacagaaattttctttaaacagaacattagtgaaccaaataaccaattctcctcaaacatgatagacaggatggaggttatcactttgatcattttaacctccaacatagtaatttgtaaacatcagtcgctgcacaagtattttaataacaggccagcccacgggagtaaacagcaccttagcctcgagacctgttctctcaactgtgtgtacagattttctaagtcgttatgaattcagatattccctacatctcaataaaaacacctaggagaacaagaaatcaggacatgcatctcctgtaagcagaagagaaaccgagcacctgctctcttgcgggggggcagcttcgtgtcactttccaactcagcctccacaggagcatgggcatattggttcaaatgaagtgtaaaggacacatctctgtccacagtgtaaatcctatttccttaaggtggtcaaccgattgagaccagttccacacttccttaaagaaggaaaaactcagcagccagcgccaaggcccagcgatcagagaggacccgtgctcgccgcgaccccgcgctcgccctgtggccccgcgaccccggcgccaggtgttggggggaccggcccttcccttccgggtgtgaggggctggcccttctcttccaggttggggggctggcaaactcgaacctcgccggcgccctagccaaggcctcctccccgcgcctgccgcgggttccacgcacattccaagcgcgcgcattcgacccaaacttcagagacgcttctgtggaacggaaggatggtcgctgacacctcgccgttcaaatatcaggaagttaaaaataacacgaccatcgtcatcattccaaacttcggaatagcttttctaaaaatggaaaagacggtggctaaacttcaatcaaaatcgctgtggtcaagaaagtcctggaagctgctctatcttaactttgggcggtttgcggttaacagacgcgcgacctagaaaccccagaggcatcgccggttttcccgtcctcctcctcccaccaccgcccagctcttgagaggggagggtgctgccggacaggtgggtccccgggtactcactgctgcccgcccggccgcggcgccccgtcccgaggctgcccaggaagaggaaggcgcgctgccccgccccgcggacaaggaggccccagcgagggcgtacctgcggcaggtgacgaaggaggcggcgcaaaacacccgccgtgtacgtttcgcgggacaaaaaccacgcgcccgccgggccgcgctcaggccttcgccctcagggacttcggaaccgccccgtcctcaagatcgaaaagcccagagccccgcggcggctccaagcacggtgttgggggtgggggtctcagggagcgcccaggcccaaggccgccctggtccggcgtggaccccgcggggctcaaggcaggttccccgcgtgacccgcccagcccctctatgcgaactcgaacgacaggcaccacagcccgccacgtgcgcgagactcgcgctgtgccccaacccaggtgggcggcccgcggagccgcgaggcctgagcccgccctgcaggtgacccgcggcccttcctcctccaggtacccctctcctgcggccccgtcccctataggtaacctttacctcccgcggctccttcccctccaagcgacccgcagccccgccccctccaggtgactcccccccgccaacccccgccaccacacacacacaccccctcgccttccgcggccctactccctccaggtgaccccacccccgcagctcctcctcctccggacaacctgcagccccgcccctgcaggtgaacggcggcccagtccctgcaggtgacccgcggaccctccccgcccgtcctactaccgtcataggaccgcctccgcaggcgcactggagccgattgcgcaggcgtggctctcacacgcgctgccctgttggcgttggtgcgggactgcgcaggcgcgcggggcaagagggtggcagtgcgcctgcgccgcgtcggcgtgcggaacgccgcggtgtctcggcgcctctgcgcgcgggaagatggcggaacaggctaccaagtccgtgctgtttgtgtgtctgggtaagagggcgccgacttactcatgttctgacgtcctctggagagttggatcgggcttgtgcgctgtaggttgtgccgccggcctaggaaccatgagggggaggaggccagggactgggaggcctagggtgttctaggagtgtgccgcagcgcccctgttccccatccgccccgtgcacccgcccagcctgcccgctaaacctgggtcccctcgcgcctgccatatatccggggctcttggcatctgcagccacagcccctacaagccaaggtactttctttgcgactactagaatccctctcgttcccctccaatgggcccaggtaggcctggaggttgtcggactgatgtggtctcttaggggcctcctgagtcctatgacaacattgttttgtttgctagtttccttagcccatgcttagatagggatctgagttaaagggagatgaagttttacggtttcgggtttcttgattgtaaaagccaagcaaaggagacctggaggtccctatataactttggcccatgaaaaatgaaagtgtattttattaatggcttttcaggaactttccagcttaaattattttcactcctagaatttcaacacttagcttgccttacttcaaacataatttattttccgtttggtcttcagggatcttcctttggtgtagcactacaaggttatattcctcggtgcctccaccctgagaggaaggcctaaattgtcagtagtccggttacttaaaaccttctgtgagtttgcatttcctgcagtttctgtttatttttacagactcctcactttatctcctgtaccttttcctgctcacaccctcgggacactgccttccagaacctttcgttgttcggtagcacttcacatgcttactgagccttcatcgctgggtgcccattatgcattttgcctggaaagcctttttattttataaagtcaaacctaaatatttcctcctttgctttcccagatcatgagttgcttccttatcgacatcttttattacacaaattttactataatttgtgtaatatagtaaaagatgtaatacagaaaaggtgtgattccttatcgacatcttttattacacaaattttactataattatttgatagtctgttgaaatcccagctgagtttaattttgtcgatggcaataactgtggcttatttttcattttgttttcagctttaggacaatatatgataaacgctgactaggttttgtagaagttaacttctgtgaaagacgaattagaaggcttaccttgtttcacattggtagtgggcatcatttgatttttaagactcattgaaggctgaatgatgaaatcaataagtttattaaacagtagtttggttaagga

SEQ ID NO: 1880842 - DNA, 4001 bp, Homo sapiens
cttatttctgcggaatgagaaatctcttgagaataaagttttcctaaacagaacaaaagtatcaaatcacttttgatgagcaaacattattttaaacttttttttaacttacaaaagatgaggggtaacatttactagttttacagaaattttctttaaacagaacattagtgaaccaaataaccaattctcctcaaacatgatagacaggatggaggttatcactttgatcattttaacctccaacatagtaatttgtaaacatcagtcgctgcacaagtattttaataacaggccagcccacgggagtaaacagcaccttagcctcgagacctgttctctcaactgtgtgtacagattttctaagtcgttatgaattcagatattccctacatctcaataaaaacacctaggagaacaagaaatcaggacatgcatctcctgtaagcagaagagaaaccgagcacctgctctcttgcgggggggcagcttcgtgtcactttccaactcagcctccacaggagcatgggcatattggttcaaatgaagtgtaaaggacacatctctgtccacagtgtaaatcctatttccttaaggtggtcaaccgattgagaccagttccacacttccttaaagaaggaaaaactcagcagccagcgccaaggcccagcgatcagagaggacccgtgctcgccgcgaccccgcgctcgccctgtggccccgcgaccccggcgccaggtgttggggggaccggcccttcccttccgggtgtgaggggctggcccttctcttccaggttggggggctggcaaactcgaacctcgccggcgccctagccaaggcctcctccccgcgcctgccgcgggttccacgcacattccaagcgcgcgcattcgacccaaacttcagagacgcttctgtggaacggaaggatggtcgctgacacctcgccgttcaaatatcaggaagttaaaaataacacgaccatcgtcatcattccaaacttcggaatagcttttctaaaaatggaaaagacggtggctaaacttcaatcaaaatcgctgtggtcaagaaagtcctggaagctgctctatcttaactttgggcggtttgcggttaacagacgcgcgacctagaaaccccagaggcatcgccggttttcccgtcctcctcctcccaccaccgcccagctcttgagaggggagggtgctgccggacaggtgggtccccgggtactcactgctgcccgcccggccgcggcgccccgtcccgaggctgcccaggaagaggaaggcgcgctgccccgccccgcggacaaggaggccccagcgagggcgtacctgcggcaggtgacgaaggaggcggcgcaaaacacccgccgtgtacgtttcgcgggacaaaaaccacgcgcccgccgggccgcgctcaggccttcgccctcagggacttcggaaccgccccgtcctcaagatcgaaaagcccagagccccgcggcggctccaagcacggtgttgggggtgggggtctcagggagcgcccaggcccaaggccgccctggtccggcgtggaccccgcggggctcaaggcaggttccccgcgtgacccgcccagcccctctatgcgaactcgaacgacaggcaccacagcccgccacgtgcgcgagactcgcgctgtgccccaacccaggtgggcggcccgcggagccgcgaggcctgagcccgccctgcaggtgacccgcggcccttcctcctccaggtacccctctcctgcggccccgtcccctataggtaacctttacctcccgcggctccttcccctccaagcgacccgcagccccgccccctccaggtgactcccccccgccaacccccgccaccacacacacacaccccctcgccttccgcggccctactccctccaggtgaccccacccccgcagctcctcctcctccggacaacctgcagccccgcccctgcaggtgaacggcggcccagtccctgcaggtgacccgcggaccctccccgcccgtcctactaccgtcataggaccgcctccgcaggcgcactggagccgattgcgcaggcgtggctctcacacgcgctgccctgttggcgttggtgcgggactgcgcaggcgcgcggggcaagagggtggcagtgcgcctgcgccgcgtcggcgtgcggaacgccgcggtgtctcggcgcctctgcgcgcgggaagatggcggaacaggctaccaagtccgtgctgtttgtgtgtctgggtaagagggcgccgacttactcatgttctgacgtcctctggagagttggatcgggcttgtgcgctgtaggttgtgccgccggcctaggaaccatgagggggaggaggccagggactgggaggcctagggtgttctaggagtgtgccgcagcgcccctgttccccatccgccccgtgcacccgcccagcctgcccgctaaacctgggtcccctcgcgcctgccatatatccggggctcttggcatctgcagccacagcccctacaagccaaggtactttctttgcgactactagaatccctctcgttcccctccaatgggcccaggtaggcctggaggttgtcggactgatgtggtctcttaggggcctcctgagtcctatgacaacattgttttgtttgctagtttccttagcccatgcttagatagggatctgagttaaagggagatgaagttttacggtttcgggtttcttgattgtaaaagccaagcaaaggagacctggaggtccctatataactttggcccatgaaaaatgaaagtgtattttattaatggcttttcaggaactttccagcttaaattattttcactcctagaatttcaacacttagcttgccttacttcaaacataatttattttccgtttggtcttcagggatcttcctttggtgtagcactacaaggttatattcctcggtgcctccaccctgagaggaaggcctaaattgtcagtagtccggttacttaaaaccttctgtgagtttgcatttcctgcagtttctgtttatttttacagactcctcactttatctcctgtaccttttcctgctcacaccctcgggacactgccttccagaacctttcgttgttcggtagcacttcacatgcttactgagccttcatcgctgggtgcccattatgcattttgcctggaaagcctttttattttataaagtcaaacctaaatatttcctcctttgctttcccagatcatgagttgcttccttatcgacatcttttattacacaaattttactataatttgtgtaatatagtaaaagatgtaatacagaaaaggtgtgattccttatcgacatcttttattacacaaattttactataattatttgatagtctgttgaaatcccagctgagtttaattttgtcgatggcaataactgtggcttatttttcattttgttttcagctttaggacaatatatgataaacgctgactaggttttgtagaagttaacttctgtgaaagacgaattagaaggcttaccttgtttcacattggtagtgggcatcatttgatttttaagactcattgaaggctgaatgatgaaatcaataagtttattaaacagtagtttggttaaggatggttactaaataatattccattcccttgtatagttttggttggtattgtcgattatgctggcataatgcatcatggttgctgttaatggggaagtgtatccttgcatatacagtagtcccactttagctgtaggggatacattccaagactccccagtggatcccgaaactgtgggtagtaccaaacccaattgctgtcaattggaacatgtgtctgctcgtttcttacacccacaaatgtaataccgttgccaccttaactaagcatttaaaactgtggtcgcaacttttgcagtttgaggcaagacagcagacgatcaggaatttctttttccttgtttacattttca

SEQ ID NO: 1880843 - DNA, 4001 bp, Homo sapiens; identical to SEQ ID NO: 3731

SEQ ID NO: 1880844 - DNA, 4001 bp, Homo sapiens
cagcctataatccttcccctacgagagaaagggatcgggaagaaaacatgaagtgtctgtttttgtgtcccaacctttgggctctttctgggccctcagtgaatgaccgcccagagctttcagctgcgtggagaaggactcatggccaggaggagaggaaatatatatggagtggagagagcactgaaatggggcttggcaggtcttccctttggaggaatatttttctgccccagtcgtcgtgttgaagacctgctaccccacggctgtctctggctaagtgagccagtattggcccctcgccggacccagggcctccctgccgcccggaatcctccaaggaggcttgcacttgtcggcttgctcttctccccggccctcagaggcctggcactgcgggagtcaaggcctaagcagggctccagctcggggtttaggggctgggacactcacagccccagtcacgttaggtttcccatttaaattctctctcaacctctctttctctcttccctcattgagatcaccaaagtggtgtggacacggcgccttgcccccagatctgcatcggaatgcagaaaagatctttaaaaaaaaaaaaaaaaagttttgaattcctcaatgatttttcttctggaaaggcagcttaggataattatttcagctttattgagggcagattagttgaagtctgggcgctgcgtttcaatacgcgttgtacacgggccgacaatgtggtcattgttggctactgtgtgtgaatccattcaacatatacactttttaacaccaaaccgagtcctgtctaaatatacacagtgctcagggaaagacgtctctgaccccgacaaatctgcgtaaatcacacttccatagttacagaagcctcacaaagggaggcccggctcaagatgctgattacagcttcttaaaagcaacatacctaagaataaatacccatgcctggcctaggggctgtggtggccagaggcagagagggccctctgtgttctatgggccttttggcgtctgttttaggctttcgatgttactttccctagagaaattagacagtttaaaaataataatggtaattattattattttacaatacgagcaaacaagcaattttcaggccttattcacttcatccgggtggctggcctccaaagtttgagtgccctctggggctggcaggcaggaccagagctccttctgttgtgtggtgaggagtgggcatctgtaggacttttctgggtccagagggctcttgggcttctcggctcccgcagctcctccaccactcctcagagaggcagctgaattctgggaagaaacaaagagttgagttgcttcttaagatggaaagaagtgtactgtttggactgttattttaaaatacagggtggtgggggaaatcgaggctccttggccggggagggagtaaagagaagcctaattgatgaagagggagttgaggtgaatgcggtccatgggcaccgatgggggaggcaagagcggcctccagcaccctgggaattgggctcaggctccctggcgccagataccctcggaatccgggatccccggctggcgccacggcccgctgggccaaggtcggtgcttggtgggccccatgatctcatctctcctttcttccttgccactattagtgctcacataggcagaaagaggcggcccgacgtgcaaaccatgtgcaaaccgcgcccgctgggctggtcagccgtctttccttgcctgccgacctggactatgtggagcctgggggaccctcttgcctcccaacaaaatcccctctctaattgcacatcccattcaacaactctgcccagggcttttcgaatttctggatcaacttctttaggaaaaagggaagaagaagtctcagagacagcggtagagaaaagaggagagagagggagaagagagaagagaggagggggaggtagcgagattaagagttgcaaagataaaaaaaattctctttatccccccacttctccctccttccctgctctccccctccccccgccctctggctaagtggtaaaaccgtccttacgttctcggtattgattggcagggctgacagtgattggcagtggttgccgtggcaacgccacaacgacacgccacagaccaatagaaaagcgaaacaaaatgtttcaatgctgcactcactgtggatttaggggagatattatgaggctgttgtcattagggcgattgcggtggaatcgctgaatcttgactcggcggtggttggctctccctctcctctctccctctccctctccctctctgtctcgggttctctctctgcgcgcgcgcaccgggccgctctcctacctccctctctatgtggctgcgcgggtgtgtgtgtgtgtggatgtgtgtggggtgtgggtgtcccttacgcccttcctcctctccctcctcctcctgctcccccctcctttccttctcctcctcccccctctcctctccctcctcctggtcctcatcgcccctctcctcctcttcctcccctctctcttcctctccctgaattttctcctctcctctcaggtcagtccatggtattccgctcccccctagacctctattcctcccacttcttgttgccaaacttcgccgattctcaccaccgctccatacttctggcgagtagcggcggcgggaacggtgcgggaggcggcggcggcgcgggaggcggcagcggcggcgggaacggtgcgggaggcggcggtgctggcggagcaggcggcggcggcggcggcggctccagggcccccccggaagagttgtccatgttccagctgcccaccctcaacttctcgccggagcaggtggccagcgtctgtgagacgctggaggagacgggcgacatcgagcggctgggccgcttcctctggtcgctgcccgtggcccccggggcgtgcgaggccatcaacaaacacgagtcgatcctgcgcgcgcgcgccgtggtcgccttccacacgggcaacttccgcgacctctaccacatccttgagaaccacaagttcaccaaggagtctcacggcaagctgcaggccatgtggctcgaggcgcactaccaggaggccgagaagctgcgcggccgcccactcggcccggtggacaagtaccgcgtgcgcaagaagttcccgctgccacgcaccatctgggacggcgagcagaagacgcattgcttcaaggagcggactcggagcctgttgcgggagtggtacctacaggacccctaccccaaccccagcaagaaacgcgaactggcgcaggccaccggcctcactcccacacaagtaggcaactggtttaagaaccggcggcagcgcgaccgcgccgcggcggccaagaacaggttagtggcggggcccgcggcctggctacagcctcagaggcctgggaaggggagaggggttgagatggggctagcggagcggccgctgagagccagggaagccgtgactcctggccagtcggagaaagtttccgcttgtccgggacgcgcggaagagggggccgggctggctgtgggtgtattgattgctttgaccaagaggggctttcgtcagggcagagagtgtgtgcttgcgacccgagtacccgcagcccctgggagacttagccctgcgctgcacccgtgcctgcctcctcagccctgccgccagctcggcgatcctctggagcctagagacagggagggaaggaaagcactctttgccatctggttcttatttctgtgcgttgcaaaaccccgagagaaatccactagcgtcagagagaggaaagtgaacctgggtccctatcacaaggggaaaaggccagaggccactgcgcagcgggcctgtttccccgcaacgctgcacgttgcctgaccgggagcaggagagccgggctgggagtggagaggcctagcgtgtgcgtgtgcgtgtgtgtgtgcacgcccgtgtgcatgt

SEQ ID NO: 1880845 - DNA, 4001 bp, Homo sapiens
cccggccctcagaggcctggcactgcgggagtcaaggcctaagcagggctccagctcggggtttaggggctgggacactcacagccccagtcacgttaggtttcccatttaaattctctctcaacctctctttctctcttccctcattgagatcaccaaagtggtgtggacacggcgccttgcccccagatctgcatcggaatgcagaaaagatctttaaaaaaaaaaaaaaaaagttttgaattcctcaatgatttttcttctggaaaggcagcttaggataattatttcagctttattgagggcagattagttgaagtctgggcgctgcgtttcaatacgcgttgtacacgggccgacaatgtggtcattgttggctactgtgtgtgaatccattcaacatatacactttttaacaccaaaccgagtcctgtctaaatatacacagtgctcagggaaagacgtctctgaccccgacaaatctgcgtaaatcacacttccatagttacagaagcctcacaaagggaggcccggctcaagatgctgattacagcttcttaaaagcaacatacctaagaataaatacccatgcctggcctaggggctgtggtggccagaggcagagagggccctctgtgttctatgggccttttggcgtctgttttaggctttcgatgttactttccctagagaaattagacagtttaaaaataataatggtaattattattattttacaatacgagcaaacaagcaattttcaggccttattcacttcatccgggtggctggcctccaaagtttgagtgccctctggggctggcaggcaggaccagagctccttctgttgtgtggtgaggagtgggcatctgtaggacttttctgggtccagagggctcttgggcttctcggctcccgcagctcctccaccactcctcagagaggcagctgaattctgggaagaaacaaagagttgagttgcttcttaagatggaaagaagtgtactgtttggactgttattttaaaatacagggtggtgggggaaatcgaggctccttggccggggagggagtaaagagaagcctaattgatgaagagggagttgaggtgaatgcggtccatgggcaccgatgggggaggcaagagcggcctccagcaccctgggaattgggctcaggctccctggcgccagataccctcggaatccgggatccccggctggcgccacggcccgctgggccaaggtcggtgcttggtgggccccatgatctcatctctcctttcttccttgccactattagtgctcacataggcagaaagaggcggcccgacgtgcaaaccatgtgcaaaccgcgcccgctgggctggtcagccgtctttccttgcctgccgacctggactatgtggagcctgggggaccctcttgcctcccaacaaaatcccctctctaattgcacatcccattcaacaactctgcccagggcttttcgaatttctggatcaacttctttaggaaaaagggaagaagaagtctcagagacagcggtagagaaaagaggagagagagggagaagagagaagagaggagggggaggtagcgagattaagagttgcaaagataaaaaaaattctctttatccccccacttctccctccttccctgctctccccctccccccgccctctggctaagtggtaaaaccgtccttacgttctcggtattgattggcagggctgacagtgattggcagtggttgccgtggcaacgccacaacgacacgccacagaccaatagaaaagcgaaacaaaatgtttcaatgctgcactcactgtggatttaggggagatattatgaggctgttgtcattagggcgattgcggtggaatcgctgaatcttgactcggcggtggttggctctccctctcctctctccctctccctctccctctctgtctcgggttctctctctgcgcgcgcgcaccgggccgctctcctacctccctctctatgtggctgcgcgggtgtgtgtgtgtgtggatgtgtgtggggtgtgggtgtcccttacgcccttcctcctctccctcctcctcctgctcccccctcctttccttctcctcctcccccctctcctctccctcctcctggtcctcatcgcccctctcctcctcttcctcccctctctcttcctctccctgaattttctcctctcctctcaggtcagtccatggtattccgctcccccctagacctctattcctcccacttcttgttgccaaacttcgccgattctcaccaccgctccatacttctggcgagtagcggcggcgggaacggtgcgggaggcggcggcggcgcgggaggcggcagcggcggcgggaacggtgcgggaggcggcggtgctggcggagcaggcggcggcggcggcggcggctccagggcccccccggaagagttgtccatgttccagctgcccaccctcaacttctcgccggagcaggtggccagcgtctgtgagacgctggaggagacgggcgacatcgagcggctgggccgcttcctctggtcgctgcccgtggcccccggggcgtgcgaggccatcaacaaacacgagtcgatcctgcgcgcgcgcgccgtggtcgccttccacacgggcaacttccgcgacctctaccacatccttgagaaccacaagttcaccaaggagtctcacggcaagctgcaggccatgtggctcgaggcgcactaccaggaggccgagaagctgcgcggccgcccactcggcccggtggacaagtaccgcgtgcgcaagaagttcccgctgccacgcaccatctgggacggcgagcagaagacgcattgcttcaaggagcggactcggagcctgttgcgggagtggtacctacaggacccctaccccaaccccagcaagaaacgcgaactggcgcaggccaccggcctcactcccacacaagtaggcaactggtttaagaaccggcggcagcgcgaccgcgccgcggcggccaagaacaggttagtggcggggcccgcggcctggctacagcctcagaggcctgggaaggggagaggggttgagatggggctagcggagcggccgctgagagccagggaagccgtgactcctggccagtcggagaaagtttccgcttgtccgggacgcgcggaagagggggccgggctggctgtgggtgtattgattgctttgaccaagaggggctttcgtcagggcagagagtgtgtgcttgcgacccgagtacccgcagcccctgggagacttagccctgcgctgcacccgtgcctgcctcctcagccctgccgccagctcggcgatcctctggagcctagagacagggagggaaggaaagcactctttgccatctggttcttatttctgtgcgttgcaaaaccccgagagaaatccactagcgtcagagagaggaaagtgaacctgggtccctatcacaaggggaaaaggccagaggccactgcgcagcgggcctgtttccccgcaacgctgcacgttgcctgaccgggagcaggagagccgggctgggagtggagaggcctagcgtgtgcgtgtgcgtgtgtgtgtgcacgcccgtgtgcatgtactcgccctcctgtttcagccgaggagaatccctttggtcctctaagctgggaagcgggcacgagcagcctcgttgccggcaagttggccacaaagtcacaaaattgtatagggcttgaccaacatcacaggagctgggcctgggggaaggagaaaaagaaccagagggaaagaagtggataggcgaaaggagtggggagagaagggagaaagaaaagaggaagttgggtgaaagccctgatgtggagcctgtgtctttctctatccagccaggaaggcccagggcctggtgtacttcagggagcaggacccccagctgctgacagctgcccgtgggtgggggctgggtgtgagtttctggaggtgtgttc

SEQ ID NO: 1880846 - DNA, 4001 bp, Homo sapiens; identical to SEQ ID NO: 3742

SEQ ID NO: 1880847 - DNA, 4001 bp, Homo sapiens
ttgagtcagcaagcataaatgtggatgcaaccactcatgggcattgtaacagtgacctatacatgaaaactcattatttttactcatttgtccaaaagcactctgaaccttctactaaatggtgacattgttttgcatcctgacagttatttcactagaaaataatatttacagaaagaatttgaatttagaaaaaaagccacgagttacactttcaaatgtaagaaaatatgcatagtctctctaagtaaccctccctaaaagatacaagaaaactgtatgaaacaataaaaaggatcatcctttcagttttaacttcaagtggcaataattcaacgttttttaaaaattcaatagtatttaagatactgcttttagaaagcaggagattgtaacggctagagttactacaggttaagagttaacattgtggctgtaatgtaacatcattcctggaccaaaggtacataccgaagtaagttcagaggaagcaacccatatcacatcaacaagcagaagaataacaatcccaagagccattcgcctgcgctgagtgaaaccactgttctgggaattcattcggttcatgacaaatacacacaccatttgcagtctgttttttagaaaatacagatcacattagagatgattttagaaaaacaaccattaaaaatgagaacattagtataacagaaacatttgacttttgttagctaatgttcagtgtgaaagttacatagaggataaacgtggaatctaccttgtcttaagagcccttctgagatcctcaagagcaatgccggaaaacttggcagatctcagtctaaaaggaggtgaagaactcagcacccctaaaaacaaccatgaaattatgctatgaaaacgtgaataactcaaggtaagattcatcacatcgttttttactcttcatcttcaaactcaaagcaaatcaatgaaaaggaccaaaatgtgttaaacatacttgccacctttctcagtactttcatggtatccactgcacgcttcagattatacttagagagatacgcgatacggggcgggcagggagggggagtaatatacaacatacggcacatttaagaacagttaactaccagaaaatagcttctctgagtttcacaaatacggaactccattcacctctccatccagaggaatccatccctggggacagcgtctagacactgtttctaaaagtgtcttttctgtccctgatctgctggagtggaatttggttatcggagagtaagtgatttgctgtgggtcttgaaggcacctttccaatctcttcaagtggtaaaagaaaaggattctccatgctcctccacccacctctatcaaaacatccagtcattttaaaagaaacagctgggaaaagaaatcatccttctgttttggagcggggaagacagttaaggcagcgacgcctccccggggagccgaggcgagggcgcacgcacggcttcctcaattgccagcggtgggcgcagggctccggcgcccctgtcagctcccgctccctccgcccctagagaccttcacggtttcggtcaaggcgctcctgctgccaccgagggcaggaggtggtgctgctggtgggcactccgtcccggtttgggctccggtgatgtcggggcccttccctgcctgcctacctggccttcctgccccgcgatggcgtcgtggcggcaccatgagcggaccggtcaggccccgcagccgcccagcgccacggccgcggcctcggactcacagagctgtcaccgcgcctgacatcgcgccgcactggaggcccagctcctgaagacgcggtgcccctcagggagaggctcccgacaccacccaactccactcggcccaggagggcgtggagcgggtgaggggaagggacggcacagtcagctatggccgcggaggcccggagatctgctctggccccggccccgcccccggcttgccctccgcgcggccccgcccccagtccccagcccggaagcggtggcgcgcgggtgacgtcataggggcgcgacggcggactgcgcgcggtcgcgtatgcagcgaggcttggcggagctaggggaagtaatgcgaggctctggtcgccgagcgagggctcgcggcggcgaggcgaaagaagagagaagataggaagaagggaagtagggcgaggtggaggaagaagaggaaagcgagcgtgggtgtctggggcagagcaaaggacgagggagtggctaaacctccgcccgccttagaacgaaagctggccgttccgtttcacaaactgcgaacctgaaacttcggatatccctttctcgatgacagccgaaacgcaaagtggcttagagtacttttgattcttgaaaccttttgtatataaacaagatctcagctctaggagttacaacctacatcctaggccaagctacttcaacttctctggtcctcggtttccttgtctacgataatgatagtacctgccacattggttttttgtgtgtatgctaggattgcatgagtttacatatgtgaaggacgtagatcaattcatggcacataataagaacctcacagacgtcagcaattttttgttcgttcgtttgttttgagacagggtctttctctgccacccaggctgcagtgcagtggcacaatcacagctcactgcaacctctgcttcccgggctcaagcgattctccagcctcagcttccagtgtagccgggactacaggcgcaagccaccaatgcccggctaatttttatattttttagtagagacagggtttcgccatgttggccaggctggtctcgtactcctagtcttaagtgatccgcccgcctcgacctcccgaagtgctggaattacaggcatgagccctgccaaatgttggcagttattaaactgtatagatttgttccttaaatattttgactattccatgagaaaggtttgtccagcatcttgatttctatctacaaaacaaaaacaagactaaagggttcagtaatttaacatcttggtcagatggcgtgaagaaattaaattttcttactcctatagtcgcgatgtagtgtacctcttaccttttaagtctcgtttcagtgaagttgaatgcatattctagcaactaataaaacaataccaatgaacattttttaattgatcgaatcagtttcaaactatcagcatcaaacacctctaataagtcattcagaaacctattgtgcagagtaaaaaaaaaaaccaaccaggccggtcgcggtggctcatgcctgtaatcccagcactttgggaggccgaggcaggtggatcacgaggtcaggagatggagaccatcctggctaacacggtgaaaccccgtctctattaaaaaaatgcaaaaaattaggcgggggtggtggcgggcgcctgtagtcccagctactcgggaggctgaggcaggagaatggcgtgaacccgggaggcggagcttgcagtgagccgagatcgcgccactgcactccagcctgggcaacagagcgagactccgtctcaaaataaataaataaataaataaatccttaaccaactacttggtattactacttaggggaaatttggttgcagacattaatcacattagtctggcaccagtttgttttttatttcattagcattctttagggtatcagcccataatacgcctaagaattctttatgctacatatttgatgtatagtcttaaaaaataagagcattataaatctctctcagaatctaagagtcaggaaagctggataccaatgctttatctgactacaacttgttatgtaatcctgaggatcattccactctctactgtgccttagtttcttctataaatatgggtttctgaattaaaatattgtaaatgatagtactttgttaagttaccattattaccacctgtttccagaccatctgttaaaggacaagctgtggatattcttgtaacggataaag

SEQ ID NO: 1880848 - DNA, 4001 bp, Homo sapiens; identical to SEQ ID NO: 3754

SEQ ID NO: 1880849 - DNA, 4001 bp, Homo sapiens; identical to SEQ ID NO: 3757

SEQ ID NO: 1880850 - DNA, 4001 bp, Homo sapiens
caccctaaaccactaaggaaatcagacaccactgacactgtttacaagcaaagaaattatacagagactagaccattgcatgcacccagaatcaaagccaaagtgccctaaccaaccaacaccatagatacatcttcaggagaagtcctcccaagaaagcaaatccaaaaaattagaagaagccgctgttactccagatgcaccagatatcaatgtgaggacacaaaaatcataagaaaatatgacacctccaaagaaatacaataattatctagcaacagattacaatgaaaaaaacttacaaaaatcctggaaaaataattcaagataattaaagaagctcaatgagatacaagagaacacaggtaaataatacaaagaaatcagaaaaacagtttaggatatgaatgagaaatttaccaaagagatatcataaaaaataatcaaacagaaattctggaaatgaataattcaatgacctaacagacatttatagaacatttcatccaacagctgcagaatacacattcttcttaccaacacatggaacattctccaggatagaccatatgttaggccacaaaacaagcctcaacaaatttttaaaaatggaagtcacatcaagtatcttttcagaccacaatggaataaagctaaaagcaataacaagagaaactttggaaactgcaaatacatgaaaattaaacaacatgctccagtatgaccactggatcaatgaagaaattgagcaaatcaaaaaatatcttgaaatacagtataccaagacctatgggatatagatggaagtacacagcactaaatgcctacatcaaaaaagtagaaagatttcaaatatgccatctaacaatgcacttcaaggaactaaaagagaaagaaaaaccaaacacacaagtagaaggaaataaattttaaaattagaacagaactaaacaaaagagaccaaaaacaatataaaaaaatcaataaaatgaaaagttggttttttgacaagataaacaaaatcaatagctagaccaaccaaggaaaaaactagagaaaacccaaacaatcagaaatgaaaaaggaaacattacaattggtactacagaaacaacaaagatcagagacaattataaacaactatatgccaacaaaggtggaaaacctagaggaaatgaacaaatttttggacacatacaacctaccaagattgaatcaggaatagaatacctatacagagtaaggagcaaagagtttgaatcagtagcaaagtctcccaacacagaaaagcccaggactagatggcttcactgccaaattctacccaacttgcaaacaacaccaattcttctcaaactatcttaaattgagaaggagggaattcttcccaactcattctacaaggccagcattatcctgataccaaaaccagacaaagacacaacaacaacaaagaaaactacagaccaatatccctgataagcatagatacaaaattcctcaaaaaaatactagcaaaccaaatccaacagcacatcaaaaagatgaaacaccacaatcaggtaagatttatcccagggatgcaaagatggttcaacacgcacaaatcaataaatgtgatacatcacatcaacagaatgaaggacaaaaaccatatgctcttctcaatagatttttaaaaagcatctgataaaattcagcatttcctcatgataaaacctctcaacaaagtaggcacagaagagaacttacctcaacataacaaaggctgtatatgacaaacccacagtaaacatgatattgagtggggaaaagctgacattctttcccctaagaactagaaagagttcctaggggaaagagtttcactttcaccactagaattttacttaatgtattagtgcattctcacactgctataaagaactgcctgagactgggtaatttataaagaaaagaggtttaattgactcacagttctgcattgctggggaggcctcaggaaacttaacaatcatggcataaggaaaaggagaagcacacaactttgtagggaggaaggtcagagtgagcacaagcaggggaaatgccagatgcttatgaaaccatcagatctcatgagaactcactatcatgagaatagcatggaggaagctgcccccaagatcccattacctctacctggtcctgcgcttgacatgtagggattatggagattacaattccaggtgagatttgggtgggaacatacagccaaaccatatcacataatattagaagtcctagccagaccaatcaggtaagagaaataaaaggcattcaaattggaacagaggaagtcaagttgctctctttgcaaataacttaatcttatatctagaaaaaactaaaaactccattaaaaaccctcaatttgatatatacattcagtgaagttgcaagaaacaaaatcaacatgcaaaaatcatagcatttctatacatgattagtgacctagctgatgaagcaatcaagaaaacaatcccatttacaacagctatagaagtaaaatataatacctacgaatcgatttaaccaaaaaggtgaaagacttctataaggaaaagtacaaaacactgatgaaaaaagttgaacacaaataaatggaaagacatcccatgctcatgcgtcagaagaatattgttaaaataaccatactaccaaaagcaatctacagatccaatgcaatccctatcaaaatactaatgtcatttttcacagaaatagaaaaaacaatccaaaaatttatatggaagctgaaaagagccagaatagccaaagcaatcctgagtagaaagaacaaagctggaggcatcacaccacctgacttcaaaatatgttacaagactctagtaaccaaaattgcatggtactagtataaaaacagacacataggccagtggaaagaaacagaggccccatacataaattcacatagttacaacaaactgatttttttttataaaggtgccaagaacatattgggaaaaggacactctcttcaataaatactgctgggaaaactgaatatcaacatgcagaagaatgaaacccgatccctatctcaccatatgtaaaaatcaagtgaagatggattaaaggtaaatgtaaaacccaaaactataaatctattagaagaaaacatagtgggaccaggtgcagtggctcatgcctgtaatcccagtactttgggaggccaaggcaggaggatcacctgagttcaggagttcaagaccagcctggccaacatgccgaaaccatctctactaaaaattcaaaaaaaaattagccaggcatggtggcatgcatctgtaatcccacctactcaggaggctgaggcaagagaatagcttgaacccagtaggtggaggttgcagtgagcggagattccatcactgccctccagcctgggctacagagtgagactccagctcaaaaaaaaaacaaaaacaaagcaagaaagcaaccaaggaaggaaggaaggaggagaggaaataaggaaggaaaacatggtaacattggtctaggttaagattttattatggctcagacctcaaaagcacagggaacagaaacaaaatagacaagtgggactttattaaattgaaaagcagctcagcactttgggaggttgaggagggaggatcacttgaacccaggagttggaggctgcagtgaactacattcatgcgactgcactccagcctgggtaacagagcaagactgtctctaaaaaataaataaactggaaaacttctgcatacactagaaatcaatagagtgaacagacatctgttgaatgggagaaaatatttgcaaattattcatctgacaagggacttagtaatcagtagacattaaagtaaactcaacagcaaaacaaataatctcataaaaaagtgagtaaatgtcatagacatttctcaaaagaagacatacaacaggtaaatgggtcaacaggt

SEQ ID NO: 1880851 - DNA, 4001 bp, Homo sapiens; identical to SEQ ID NO: 3767

SEQ ID NO: 1880852 - DNA, 4001 bp, Homo sapiens
ctttcatgggcagcgactgaaagaatgaggcccagaggaatttctaggaaatttccaagaaaggaaattcaaacccgagaattcccaagaggtgtctcccacacccctgttatctgactctgccatggccaccctcccccgtcacaggtctctgcgtgccatgcacctagagtccacttcatggcgactctccaacacctattttctccaggagctgcttcggaccccgtttgttttttgttttgttttgtttttctgacagcgacagcccttgggcaacgctaatcattccaagcaaattctgtcatgccaagacctcccttaacagcacgcgcccacttgttcccaactctcctgccaattgggcttcgggagcctccaaaaccaaggctcggagatgtggagcacacaggggaagggtcgagctgggacccacacccggctcttacacccacaccgcctgttgagcccaaggctcaacttcaacacaaagctctccttccctcaattccttcaacgaaggttaaccttcagcgaacacctaccggaccgggacagagtgtacgagccgcgcgggaaggtggcacaaaggcatggcccagaggggtggcagaagactcaaccggggccctccactccccagcctgccctgcctgggcagagccggctggccggcccgagtcctggggctcgcggaggaacggagatggcctccgcaggggctcggggaagcccccagggcgccggaccgtctcaggcgcgcatcccgcgccactcacctgtgggatccatagcgtcgctcgcctcagagatggaagccgccattccgccacggcgccgaaagtcgtcatcaagctgcgcgcagagccacgccccgcggccgggcgggaaaagcgcttccacctctttgggccgttacctcaaaaggcgcgtgcgcaaagcgaaggccggccgggcggggaagagaaatggcgaggcaggagtgcgggggagggagtggtccttagctgaatgcgcctgcgttgtggcggcctccggcgccccaaggtactttctccccagcaaggaatccgcgtgcgcgtaagcagtattgttgattagtgccccccccttccccccgcccgccccgaaaagcgacccctagtggtgcaccggtgcggaccagaaaattgcacgctttcttgaaagaggcatttaccgagcgcccaatgtatgcctggcactgggctgggtgctgccacctaagcgagcacgaccaatgcagtctatcagggaggcccagatcgccaagcagcggacccctgcggtccgccatgccactcccggctcctagagcgccgctcagcacaccgtgagcgcccaataactgttgggcttcaatgacgccgcggaggcggccccgtccccgcgctcccgcccctcccgccagggcagcccgggaggccagacgttgacgctgcagggagagggtggtgggcgcagccgctagggggcgcggcggggcggagcgcacctttccgcgggccgcggggatggcggcgcagggcgtagggcctgggccggggtcggcggcgcccccggggctggaggcggcccggcagaagctggcgctgcggcggaagaaggtgctgagcaccgaggagatggagctgtacgagctggcgcaggcggcgggcggcgctatcgaccccgacgtgttcaagtgagcggggcgggtgggggccgcatgctagccagacaccccccgacctctgctttccgggtacgcccggcccgctggtcgggaggagcccccgcccccgtccttgtcgggtcttcagggaggtggccgcgccgggcggagagggctcaccggccccgcgtctgtccccgccaggatcctggtggacctgctgaagctgaacgtggcccccctcgccgtcttccagatgctcaagtccatgtgtgccgggcagaggctagcgagcgagccccaggaccctgcggccgtgtctctgcccacgtcgagcgtgcccgagacccgaggtcagagctgggcccgctgtccctgccccagtggcgggggtggcgggcggggagggggcaggcgcggcacagcggcggcgtggccctgagtggccaggcctgtctgtcggtctaggcccagcacctgcagggcccatccgtgggctctgctcctgggcttcgctgccagccttaggaggcacgtccaggtcaggtggacgcagagtgcgtaccccagggtggtccaggctgggtagggctcctccgcttagctcccctccacctcttcactcaggccttcatcctacaacgtcgggaatcaagacagtttggggctgggcgccctggctcacgcctataatctttgggaccccagggcgggaggatcgtttgaggccatgagttttagaccactctgggtgacagggtgagatcctgtctctaaatgtttttcaaaagacagtctcgatctctgtcctgtggtatacagcatccagggaagtgcccagggaccagggcaggcagaggtcttcctgcctttaccccacctgggcccagttcctgcgcaggggcttggccagtcctggtcagctttccctctgatgactgcaggaagagagtcagacgcggaactcccagggtgcagaggcctgcggggtctgaagggcctcctccctctccagtgtggtgactgggctgaggagattctgggactgagagtgtcatggtggagcctctgtccctgctcatcctctccgcatgttgcttctgctcccgatggctctctctgaaatgcagcacaacctcctaggccaatggaagaaggcccagagctggctccctgcctggaagcacgaggagacccgcacaggcatcctgagaaggcgtggagagcaggctgccttcatggggggagtgccagggcctgggcacccacacccgctgacccaagagggcccgggcacctgcgtgctggcctcttcactgaccttcgctctgtctgctctctttgtgtctctctctgacctccagaggcctcctttctctctgccaggaacagtagcccccctgcaaggccctccttttcctccagcccgcagcctgcggcctctccggttctgctccacagcccggctgccacacactcgcctctctctccaggccccccgggttccctccgcctctcttgctgcctgttctctccttttgcaggttgcgtttattggcttatctctgggggttggtgctctcccttgtttccatggaaactgcctggccccaggaggcccaagcagctttgagctccaagggcaggaccatgcaggccatcgctgccctgccgcttagccacagggcacgatttctgactcggtttattagagacatagtgtggcagtctctagaccccacagtcgggctggcatctggggacaggaccaacacccccacaccccagaggcgaactgtggtgagtgtaaagagcccctctccaagggaagacagccggccagagtgcggtgtgctgtgctggagagcacagccccaggcgtgacaaacacctcggcctcttagaagttgtcccttatctggacaggaagtctggaggctgaaacagagactcccaccttcccagagtctcctgggcagtgccacacagatgccatatgctggccccgtggccacactccagcactcagcccccttgcccacctcactcctgagttagcacactttccaggtgtcagcaggtgtgatcaggggctcagagccagggtcctgtgagagcccaggggtctttggttgcacctcctgcgtgcacttcctgacagcgcccacctcactgccacccagagctcggacccaagggagggtggagaggggctgagggacaggcctggagtaggggtgtatgcactgcaggctgagatgagcaattgaggggcaagtgtccagcaggagggagaaactgggaacagagtccttgtcactccagggga

SEQ ID NO: 1880853 - DNA, 4001 bp, Homo sapiens
ataatacaagggctacacaaaatgaaaagcaagaaattaaaacatgtcactggagaaaataaccttcattaaaaggaagacaggaagaaagaaaagaaaaaagaaaagaacacaaaaagaccagaaaaaaaaaataataaaatgacaggagtaagatcttacttatcaataataacattgaatgtaaatggactaacctctaataaaaacaaatagaatggcttagtggattttaaaaaatgagacccaatgatccattggctacagaaaacatgattcacctataaaggcacatatagactgaaaaaaaaggaatgaaaaaagatattccatgccaatggaagtttaaaaaagagcaggagtagctatacttatatcagacaagatagatttcaagacaaaaactgtaataagagacaaagatcattatataataataaagaggtcaattcagcaagaggatataatgattataaatacactttcacctaacaatggagcactcagatatataaattaaatattattatggctaaatagggagatagacctcaatactataatagctggatacttcaacaactcatttcagcactggaaacctcattcagacagaaaatcaacaacaacaaaaaatttggacttaatatgcactacaggccagtaggacataatagatatttacaaaacatctcatccagtgacggcagaatacacattcttctcctcagcacatgaatcagtctcaattgtagaccacacattaggcaacaatgcaagtcttttttttttttttttttttttcctcagggagctgttccgactctttttatttttttatcctgaagggaaagataaagggcgggaaagggcgtcaggcgaggcgaggcgagaggctcgaggttctaaggggatggtcagactgactgatggacctcagggtggcccctctgccccaggacaggcctagaagagcatgtgaccccctaggaaacacccagagactgagcggaggaaacagctcccaggggcagagctcccagcaggcgcaaacccagaggagcagaggacgattcggagaaggaaggaaagacgctgggaaagagccagggatgacaggaagagaaggagacggggaagggccctgaggcgagggaggcagggcctccgaccaggagcgaccagagaggatgtgacagagacggaagtgacagaaaaagactccacggtcacaggtggagcggccgacggcacaggagactgaggcaggggatggggatggcgacaggactgggggaagacagcagcgaggacagtgcagaagtgggatcaacagcgacgaagaggatacagtccgaggcaaaggggagaggaccagagagagaagacagtgaatctgatgggagcgaactagagaggggacgaagacaaagatcccgggggccaggacagagatcaaggagtctaggaaagacgggagacggccgagcgcgagggcacacccctgtaatcccagcactttgggaggccaaggggcgagatctcttgaggccagcagttcgagaccagccttgtcaacatggtgaaactccgtctctaccaaaaataccaaaattaggcaggcacggcggcgtgggcctgtaatcccagctactcgggaggctgagacaggagacttgcttgaacccaggaggcggaggttgcagtgagccaagatcacaccactgcactccagcctgggcaacagagcaaggctcggtctcccaaaaaaaaaaaaaaaaaaaagatacattgaagtaatttaaaaacacttaggaagatgtcatttcttcctatcaaggcatcctccctttatgttttgttgttatatagggaacgataaaaaaattttttttttcaaccaatgtggaccaggttggcctcaaactcgtaccctcgcaccctcgcctccctgagggcccgagggccagcgcaaccggccggagccacagtggctccgggtgttggggctgtcctttcttccctttgatcttacgcagggtgacggagccaatcacgagaggctcacccctgacgtcacccagtccccagggccagggagggccctgcgttccatggcgccccctggagggaggaaggggaactgtatctgagagagagcagccaattgggaccgctgactcgggctgggttcccacgccacgtccaacaatgcaagccttaaagcataaaaatattgaaatattatcaagtatcttctctagccacaatggaataacactaaaaatcaataataagtagaattttggaaactatacaaataaatgaaaaataaacaatatgctcctgaatgacaagtgggtcactgaagagaataagaagaaaatttaaaaatgtattgaagcaaacaataatggaaacacagcataccaaaacctttgggacacagggaaagcaatactaagaaggaagcttataggtataaatgcctacataaaaaaagaaaaaaaaaaaaccttcaactaagcaacataataatacgtcataatgaactagaaaagcaacagcaaaccaaacccaaagttgatagaggaaaagacataataaagatcgagtagaaataaatgaaattgaagtaaagtgaagaaaataggttattataacaaaaagatacagaagattaatggaaaaaatatcaattttagaaaaaataaacaaaattgacaaacctttagccacactaacaataaaagaaaagatccaaataaataaaatcggagatgaaaaaggagaaattacaactggtaacttcagaaattcaaagaatcgttagtagctattatgcacaaatacatggaaataaactggataatttagaagaaatggataaatttctagacacatacaacctaccaaaattgaatgatgaagaaatctaaaacctaaacaaatcaataacaagtaataagattgaagctgaaataaaatgtctcccagtaaaaaagtaatccaatgccttcattgctgaattttctgaagcatttaaaaaaactaacactaatcctacacaaactagtccaaaaaataggggaagaaggaatacttccaaactcattctatgaggccagtaatactaccctgatactaaaaccggatagagacacattcaaataagaaaaactacaggccaatatacccaatgaatattgacacaaaaattctcgacaatataccagcaatccaaattcaccgatacattaaaaagatcatcatgatgaagtgggatgtatcccagggatgcaagagtggttcaacatatgcaaatcaatcaatgtgatacatcatataaacagaatgaaggacaagaaccttagggtcatttcaattgatgctaaaaagcatttgagaaaattgaatatcctttcacgatcaaaaagataaaaacctaaaaaaactgggtgtaatagtcagggctctccacagggacataactaataggatagttgtatatataaattgaagttttaaggagtattgactcacgctatcacaagatgaagccccgcactaggctgtctgccagctgaggagcaaggaagctagttcgagtcccaaaacctcaaaaatagggaaactgacagtgcagtcttcagtctgtgactgaaggcccgcaagcccttggtaaaccactggtgtgattccaagagtccaaaagctgaacaacttggagtccaatgtcagagggcagaaagcatccagtatgggagaaaggtgaagactggaagactcagcaagtctgctgttccatcatctcctgcctgctttattctagttgtgctggcagctgattagatggtgcccacccagattgagggtcggcctctcccagtccactgactcaaatattaatctcctttggcaacaccctcacagacacacccaagaaaaatactttgcatccttcagtacaatcaacttgacactcaatattaaccatcaca

SEQ ID NO: 1880854 - DNA, 4001 bp, Homo sapiens
aaatgtgaaaaaaatatatgaaaagataatggaaaacaatatagaccaactaaatacaatctgttagtattggatactgattcaaacaagccaacttaattatgagatatcagaaacagttaaacactaatggatatttgataataagaaactattgttattttttcctctcttatgataatggtgttacagttgtattagaaaaaagaagaaaaaaaagcagtccttaaaaaaaaatagtttttttttttttttttttttttttgagacagagtcttgctcttgttgcccaggctggagtgcaatggcacgatctcggctcactgaacctctgcctcctgggttcaagcgattcttctgcctcagcttcccaagtagctgggacgacaggcttgcgccaccatgcccagctaatttttgtatttttagtagagacagggtttcaccatgttggccaggatggtctcgatctcttgacctcgtgatccacctgtctcggcctcccaaagtgctgggattacaggcgcgagccactgcacccggccaaaaaaatagctcttgtactgatgttcctcaatcagatgacagattcctcatggcctgagtaaaagggtgaaaggggtgtgagtgatggatccgcttctcaatgctttagtatctacatctatgagaaacagtgatgtaatgtttaatggctctctgggaagacacctttacctagtgggccttttcacagtcatgactcagatatgcaagcaagggccacactctgaccaccttacctgctgagtctgggcctgctgctgctggtaaaacgtgcctgccggctgctgctgtgctggcggtggctgttgctgctgctgttgctgcttgaggaagagttgctgctggtgctggggtgtggcctgggcctgagcgggcagaccctgggcctgagtagaaggcgtctgctgtggagtgggaggagcctgtggctgcttggcctgagtttgcggcagaggctggctgggtggggcttggggttttggttggggaacactggctaaaaggccaggctgattgctggatcctgcaatgagaataaagtccatgtaagggttccaaatgcttccacacaaaaatggctttctgtcttgccaaaacaactaatagggggtgacaagtgtgcagagtatctcaagattcgtgtcctcctcactgtctttccacatgctctgtcccacctggaatgtctttctatcttcttgctaaattatgtgcttcaaatttttcaaaacaaggttcaatattgcctccttaagaaagtcttcccttattaatcatcccatttagtcaattacaactttagttggcaccccaaatgtctacatattcaactggcctttggtacatatgcacaagctttgcccctcttggcatgcagcatgacaacatcattccctggtgttctacatgtagcttatcccagtctggatgcgtggctataagtagatggccaccaaattcaccaaaagcagcttcctggtagggttcagttactcgatattttggatcaatcctttttatgaaacaaagcttacttatttcattagaaacagaatgccaaaacatgagggggtgttagatacttcaagagacaaagcattaaagaaacaatattcttctgtgaatgtcaaaagagaggagtcttgtttctattttttttttaggcatgtatgaaaataactcagtttctttgtatctcagcccatcagaccccaaacttcctaaaattgaaagtaagttgtctgctagtccaagctcttcagcctctttagtcctgtctcttccaggcatctttaactgttgatgtattagacccaagcaggcatttttgtaggctgggaggcaaatgaataaaataatgctttctacccaatcatctcccctagcccatttcaatgtcccaaagtttaattaacagaacagggaagctgccctggactgaactcaacactttggaagagtcttatttctttaaaggcaaagggaaatatatgaaataaagagggaggataaggttccaaactgcaaaaatcagggccaagtctagaaaaagcgacaaagggctttagtggttttggagatccatctcagaattcaaggaggcctctccttttgccagccatttgcgatacaattcttttctttttttttttttttttttgaagcggagtttcactcgtcacccaggctggagtgcaatggcacggtcttggctcactgcaacctctgcctcccaggttcaagcgattctcctgcctcagcctccccagtagctgggactacaggcgcacaccacaatgcctggctaattttttgtacttttttttttgaaaaacagggtttcatcatgttggccaggctggtctcgaaatcgaactgacctcggatgattcacccgccttagcctcccaaagtgttgggattacaggcatgagccaccacgcccggccactgccatacaatttcaagggcagcttcctcctgttcctcaaggaacactgttatctctgtgtgcctctggagtccaatcctaaagcaaaccaggctttccaagacttctctgttgtccagaataacaaagaggtgtattgagtttcaaaccaatctagatacaaacctgcagcctgaggtgggggctgaacagtggccctcttccggggtgtcagcgctggctggatgggaaggattcctgggttcggctgagtctgcccagctttaggcctctggcggggtgcaattgaagtctctgtggtgggaatgggatctgtcagtctagaaagggaaaagagaaaggttcatattaaagtatgggaaaaatggaagggagtgggcagaggacacaatgcttccgcttccacatcgacccaaaccttccaggtctgtttaatcgatgcttcccaaagaatctcccacaggatgccattgttactagaccttctgaaagtaggcttggtgggcaaatacatttttaacacactgatcaaaatatactgagtggctctccttctagcagaacttttcatgtgcgaatatgcaaggacaatctcaaaaagaatgctatatagtattctctttgcattctcaagcttatttcttcttgtggcgcttttacctagtacctcctaggatttcccaaaataccctttgggtaataatgcaaagagaggtttgaggcacatggttttcagatgcgaagaggattcaaacttggctgcaactagctgttaaagtggtctctctaaaatgaaaagcatgcagatgagtgaatccaacatgggaactggaaggaaaaagtaaataattcaagtcaaagggtttaaaaataaaaaggaagtgtcacagaaactccatttcttccaatatacatactatcttttttccacagtaacagaagttttagctgggcacagggtcacccagagtaaaaatcacattgcccagtctcttttgaaaacaggtgtgaacctgtttctaagtcctggcattacatgagatgtaagaagattatcaggtggcagtttccagaaaccataagaaataactggttcaagtcctctgtcttcctctttgactattccttgatcctgctgctaggagcagagatgttgccatattgatccatgcagccatagctacactgtaggaatggtgatgtggttagcttgaagaagtctagatccctgagggcctcatggagcagaactgccatgctggccttggactacttacctccagactttgtttacttgagagaaaaaaataaacatctatcttctatacgcagctgtcactttggactttctgtaattcacagccagatcgacactttcaaactaatatagggaagactgcttgctccctgtgaggggtgcagaagcccaggtgctaacttccactcatttacagtagtccaggcagctagctactacctaactcagatcagagttggccgtcct

SEQ ID NO: 1880855 - DNA, 4001 bp, Homo sapiens
tggcttatgcctataatcccagcactttgggaggccaaggtgggtggatcacctgaggtcaggagctcgagaccagcctgaccaaaatggtgaagccccgtatgtactaaaaatagaaaaattagccaggcatggtggcgcatgcctgtaatcccagctactcagggggctgaggcaggagaattgcttgaacctgggaggccgaggttgcagtgagctgagatcacaccactgcactctagcccaggcaacagagtgagactccatctcaaaaaaaaaaaaaaaaaaaaaattgacctaaaattttttgatcatttgagatcagcaattcccaagcactgcttttgtaaaactactatttaaaaaaatgtatcaaatgttagccagaccccaaattccctgttaagattaaacggtttccaatacttgaccatctcttcactcaacatactaccctcatcccagtatttacctgcagcatgagaaccaatcagatttccaaatccaagtaaaatattccgcctctacaacccagcacctatgaatcttcacagcaaagtcaagtttttctgggaagcctgggaaccagttacctatataatccccctcccaggacacagtgctactccaaatcacattcccaacacttaaaagatggtttctttacatcatgagtcattattttaaatttgtaacctgttaagtagttgtaagtcatgccaaattctgggaagccctccctcctctgggttaggtgtcttctagcagtgtcacacatctcacatcaagttcccagtgcaaagatgctaggttacaacaaatcacatcatcaggcactgctaaggacatcacaagtgggtaaagttgcactacaattttttttcttttgacaggaccttgctctggcacccaggctggagtgcagtcgcacaaccttggctcactgcagtttcaacctcctgggttcaagaaatcctcccacctcagtctcccaaatagctgggaatacaggggtgcactaccatgtccagctaatttttatattttttgtagagacaggatctctccccattgcccaggctggtatcagcctcctggtctcgatccagccacttcagcctcccaaactgctgggattacaggcatgaaccaccacacctggcctgcactgcaattttctaacaacaatgccaaaccaaatttggggtatttaggaatcacatattcatttaattccttcccccaaaatgaaaggaatatatacaccaccctcctatgtaacatactcaagagccaaaggtaatctttcaatcttttatttaaatgccatgatccaggatggattttagatcttgttgaaagcagccacatccatggactgcacatagtcctcaaaagcagtgatctgctcctccagcatatctgttccaactttatcatcttcaactacacactgtatttgaagtttcttaattccgtatcccactggaactagtttagctaaaaagagcattaagaaaaatcctagttagaaaagtcttgtaggaaaggttgaaactgtaggcaaattccagatgttagtttcaaaaaaaaaaaggcaaagcctaaactcacatgagccccagactaagccgtctgcttgaatgcttctgacgcactcctctaatttcgccatatctgtctcatcatcccaaggtttcacatctagtaagatggaagacttggcaacaagtgcaggttctaaaaacaataaacagcattattcaaataatgaattgtatttttttcaccctactccaagacacaaacaaatccatctcaatttgttttgagactatctccttagccaaacaaaactacagatacatcttgtgtctgtcacacatatatacccactttctgttttgctaagaaagaggtgtttgtgttaacagtttctttcccacagaggaatgccacaactgctaccataagaacagctgcagaccagtagctgtggaagaacctgtacaggttttaaaatattgacctattcaaggaatgtggaggaaattacttcaaggtcaagctttgaaaaagattacttacattaacatgaaatgaagttaaaaacaaatgacctacttttggctttctttgattcatattgtgcaagacgttcttcccttagcctctttgcttcttcactttcctgtaaagaaaaaaaattaatccacttcagaaagctggttgttcctctgcttaaagctagtggggtcatcacaaaaaagactggcttaatcagaaaaaagcaaatccatcacgaactcagccgaaagatggtgatttgattttattcatcatgcaaccagtcagaatttgaaaaaggcatataaattaaagccaggattcaaatccaggcaatttggcttaaccacattgatacaattgctgatcgatgtattctttttttttttttttgggacggagtctcgctctgtcgcccaggctggatgcagtggcacgatcttggctcactgcaacctccgcttcctaggttcaagcaattctctgccttagccgcctgagtagctgggattacagatgcctgccacatttttttgtatttttagtacagacagggtttcaccatcttggccaggctggtcttcaactcctgacctcgtgatccacccgcctcagcctcccaacatgctgggattacaggcatgagccactgcgcctggccgatatgttctttatagaagacgccatacctcctcatcatcagatccaaagaggtcaatgtcatcatcatctttactatctgtagctccacttcctgtagtgtcttccacatcggcaggaccatatttgcccaaagctttcttcactcctggcaggcttgaaaaacatttaaattcaaccactattgagctagtataacatccttttccagaaaatacaaaataacttgttttaatcactacttatcactagatcccttttgcaatcataatttaccctttcacatgcgcccaggtaaacactgtcatatgttcaactcctcacccgacaagcattagtaccatgtgagacattattttcaatactcactatgatttactctttcagtatgaacatttctgtttgagatttcattaagtatgctcagttccattcttagtgaactggagtccacttccccaaacttccacccttgttggcagtttcagaagaatggccaaggactgaatgaatgagccaccctctcaccccagaggtgggccccccaggtcaaggtcgaggcacattggcagggcagtgtggggaaaagttgaattgctgctgtccatgttctacctgttctgtgaaaaaatggagggcttcagtctcttggccttctaaggttacagaaaaatttagcttacaatatcccaacaaaactaaagtagcctgggtccagttttgtcatgtgaacatcctgataaacttcgagagcagtcttattcttcagctctatacaaagatgattttacctggccttttccttttcgtaagacttgatgtgattataccaacgtagggcatgacacaagtcggcaggcggtgggctggacacggcttcaaatactgccacatctgcttgtgatggcacatacctgccaaggacacagaaacattcacacacacctttgaaaaacaaacgccagcgaataaataataaataccgtatgcatcacattaattagtgggcactaaccccagcagggttgctttaatgcttttcttttcttattagctccttcaaatcaaaccatatgtttgggtcaccgcgctatcctgagaaatgtctgccactaagtagacctcaaatactgcaatgtctggcgttgctctatctacagcttaacatgtattaactgggcagcgatgcggaaacacctggctgaattaagtgtaaataaagcacattttaacctttccttgctcgtgaaccgctccccggaggccgggctcgc

SEQ ID NO: 1880856 - DNA, 4001 bp, Homo sapiens
acatgcaagatataaaatgaactagagaacttttttggctcattgctgagcaacatttttatttttagaactaccctaagaattgatgtaactatactgagagaactggggagggtaaaagaatgaaatccttatatatcataactggaagttcataggttacacctaaaattgatagatgaagcaacagcaatataagaagagtgtttcagaatactgtatagaggttaatatcaaaaccaacatctcaaaaagctgacaacagaaaggagggtgaggagacaggggacacagggactttattataggcatttccctgccaattaatttttttaaactctgtattacttatgttggtacaccaatatcatacatatcctcccaccatctgagcttctcttattttcttctcagttttaccgttatttccagcctgacaaaattatctaagtagaattatatgctgcccacctaaataaaatgcacttatgtttttaaaatgcaatgataaaaatttctaaatgcctcatataaagtatgtagctttaattttaaaagtaatactaagtaaacattcatgaggaatctacatgtcaaaataaaattctttccaggttaggttttagaattccatctagcaacaaatattccagtgggtccaatatcatttccctagcccaattctgctgaaagaatgaaaggactattactccacagtattcaacctcaccaaaaattgttttatgtatgagctaatttatgaaaagaactactttaaacactggtcaatatcaacagtccattggtccaacaaatttcttgatgccaaaataaaaggcagagccttaaagagtgaaccacatacatttaacctatttaaaagcaacggcttctaaaactattctaaaaaacaaaatttattaaaacaatgaaaaaataaaagtaaaagcttcaaacattaagcacaaatgacaaatataaaagatactacttttagcctggaaacctgacagagaacctcaccctggctggcgtccagagttcttatatagaagaaattcctgaaataaagttaaaaagttgataggtaggagacagcaaagagctttaaatacctgttaaggaacgtggaatttccaagatataaacctaactcagttttgtaataagcttaaaacaagcaaagaaaaagaaaaaaaatcaacacttaacaacatgaagaattatgctctgtggtatcggtgcttgtcatacatgatattcctttgcagatccgtatattccctttccctaatttagtcttgaatttattctcctattcctttctcttcccattttctgagttagttttcctcctattctattcccaatcattaaattaataaaatgatgataatctggtaaacaaacatgtgttattaacctccctaatctttttttttttggggggggggacaggaagtagaatgtattggtattaagagggggcagcacagtggaagccctcatgagtgcagggccagccacttgtccagagggccatgaatggcgacatacttgaccccacagccatctgggatgagccgcttctcagccaccatatcttcaaattcatcggcattgaacttggtgaagccccacttcttccagatgtggatcttctggcagccggggaacttgaacttggccctgagcaggacctcaatcacatgcgccttgttctgcagcttggtatggatggacataacttggccaatgtgaaccctggccacagtgccctggggctttccaaaggcacctcacatgcctgtttggaccctacactggggtagtgcaaggtcagaaacacgaacatacatctgaaaggcctgtctccaaggtcccttagagcaacctatacaacaaacaggccgcatacactaccaaggaagctgctgtttacagccattgcacactggacccccataaggaaaggaattcagtcagcttaattggctgcaggacctccgtaatcttacagccaaagttgtgacagctatatgactgttaaacagcacttaaaaatgatgacacagataatacttgatcacacagagactgaccatagttaactgtacctgagaaatcagaccatgaagtataatttttgtaaaatttaaaactgtactgttctcagtctcacaccatggatatacaaaagaagttgtaagctgtcgctctgaatggtggcatgtttttgtttttaacttcaattctctgtagtttctcaaagttgtttttttttccctacaatgactgtatcatttaaataagaaaaaatatatatataaaatactaaaatctttttttttttctttttttcttttctttttttttttttttttagacaaagtcttgctctatccccaggctggagtacagtggcgtgatctcagctcactgcaacctctgcctcccgggttcaaatgattctccttcctcaggctcccgagtagctggggttacacatgagcaccccacgcctggctaatttttgtatttttagtagagacagggtttcaccgtgttgaccaggctggtctcaaactcctgaactcaagtgatccacctccctgggcctcccaaagtgctgggattacaggcatgagccattaccctgggcctaaaatctttataatgcttataaatattaaattcttgttaacatacttttttttttttaagatggagtctcactctattccaggctggaatgcagtggcacaaatctcagctcactgcaacctccgcctcccaggttcaaacaattctgatgcctcagcctcccgagtagctgggattactggtacacaccaccacgcctggctaatttttgtatttttagtagagatggggtttcaccatgttggtcaggctggtctcgaactcctgacctcaggtgatccacccacgttggcctctcaaagtgctgggattacatgcatgagcaaccacgcttggcctaccatactatttttgaagtaaacattctccattacctatactgtagataatacactacaaaaacaatttatgaccactaataatcttacgaaagctttttccctctaggaaacttataaataacatgttgtatgaaatatcatgagtttatctccacgctaaggttcacttatggactcacttggtccacgggccccaagttaagaatgcattttgcagattatccatgctttattagtacctgtttatccgctaattagaacgacaatcttaatctaggccacaatattttctgaagctcaagaaaataatttaggggaggaagagaggaagatggaaatagacaaattttcactacaaggcactgtgatctaactatttttacctgttctcccttctatcagcacaattaagagtatgcacaattaagagtataacattccacttttattactacgagctaacaactgttcatacttactgacaggtgaacaaaattacaaattattcaatgttctccagcttagctttcatactttagcttacatcttttaatttatatttcattttccaaaacaaattttaacaattttaattaaaatatgtgtttattaagtccttttagcaaatacagtgctaagcactttgttttcttacaatctcattaagacagtagtagctttattattattctatttccaccaatgaggaaatgagagtttacagaacttaactcatttgtcatcatcactcgttcacaggtgatgaagcaggactagaatccatgtctatctagatccaaggccactttttttttttaaatagagatggggtctcgccctgtagcccaggctggtctcgaactcctaggctcaagtgatcctccacctcagcctctcaaaagtgagaggcatgagccaccacacccggccaggccacactcttcttaaccactacattctagggcaacatgagataaaccacaggctctcggtggt

SEQ ID NO: 1880857 - DNA, 4001 bp, Homo sapiens
ataaattctggtaacttttcttctggcattaaaagccacaacacaaattctaatattttaatagataatatattagtgtacatctgaatatacatttgccaaaatgttccattagtatgaagttggtctgaagtggaagtgaagtgcagtggtgtggcagggtaacatttaatggccgtcctgggcatcaggggacatggaatggctgagtcttgaccttccattcacagatattgtatttgatggaatggtaacctaagagaaagaaacacactttgcacccatcaatttaaaatgggatagctgtctaattttcaattttcaacagttaccacattttaacttctgcttaattgtaaatgataagtatctattattcaataaattataatcaagaataaatgttcattctaccataaaatttaaaaagagagagtcgttattttcacaacaaataagataaataatccattaacacatcttaatctgtacagaattaccaaatcaacacaaaggacaagagcacaaacagactgcaaaccaagctgttaaagagcatttttagctagattaattctgtaattctggctccccaaaactgcctctgagaatgtagaaagataaagtgaattccacaaagcaatgaattttacaagttttgtactgatggtataaattaacgtgaaatccccctcccaatggccccctatttattcaaaacaaaaaaactagcccttggttttaaaaatgctttcatataaaggatttaaaaattaaaatctgtgactgttaagccaaatgactgaagactgaaaaggagttttttttttttccttagtaagtaaactcctaagtttcaaaattctatggcaaagtcttctattcacaaactataagtgaataaaaacactaaaacaagaattttctacatagtgtgaaattccagcttttgaaaaatgtaaagtcatctgtattctgaatagtaaatacctatattttgaaacatcatacttgcaatataatgaagatattttaagacagtttagattataatttgactaatttagattcataaccaaacactatcattttcttacaagaagacaactggagtacaaatggccacagattttcctattaaccgagtaaattggttaaaaggaaaatgaaattggcaaatttagtttggacttggcttccttgcgcttcgctttttgccttttactaaataaagattggtcatctaaactaatgagttttctcgattgtctgatgaatccaggatggagcagagtgattgacgctacacacctaaaaggatacggtaagaagagttgccaccagcagaagggaaaactcatctgcactctctttagtatgcctgtgagatttctttccaagtatagccaacaaatgacaggtaatgactttctttcttttttttttttttggagaggaagtagaatttattggttagtattaagaggggaagcacagtgaaagccctcatgagtgcagggcccggcacttgtccacagggccacaactggggatgtacttgaccccacagccatatgagccacttctcagccaccatgtcttcaaattcatcgacattgaacttggtgaagccccatttctttgagaagtggatcgtctggcagccagagaacttgaacttggccctgtgcagggcctcaatcacatgctccttgttctgcagcttggtgcggacggacatggtaacttggccaatgtgacccctgaccacagtgccctggggttttccaaaggcacctcgcatgcctgtttgaagcctacattggggtaatgcaaggtcagagacatgaacatacatctgaaaggcctattatcaaggtcccttagagcaacctatagaggaaacaggctgcatacaccaccaaggaagctgctgtttgcagccattgcacactgggcccccataaggaaaggaactcagtacacttaattgactgcagaggtaatgacttccattgtggaaccttggtcctaaatgtttctgtgtacaggataattattttgtaatccttgccaaaattgcagttctcataattctttgtgaaggagaaaatttgttttaggcatttagaaaacgtatcgatggctctaaatgtctccacgtaaaatatgctcattgtaccaccatatacagaatccacttaaatgtccacaaataatgaacaaataagctacgtcacattcataaagtcaaatactatgtaatctttaaaagaatagtatatgaatatatatataaacaattttaaaaagcttcaaagagacatttgtttatgactggatttgcagaggattccattttgtaaattaaatacatttacatactacagaagtgggctagaagcttacagagcaacctatcaagaatggttatttttgaagagaaatgacatctgctttattatttaaaaacttgtttactaaacttttaaacacaagaagccatcaatagaatactagtttacgcattctgagggcagagatcttactgattttaatgccagtttataactactttatatttattttagtgcctgggacagtgtagtgctcaataaatatttcttaaatggaatatggtaactttttacaaacattcataaacaagaaggtatcacttgaatgtttttgaatgaggaacatattacacttataatacagatacttaaaaaaacagcatttaagaatttactgatgtgaatatctactagttgattgtctactcttgaagtttaaagcatttttaggaatttcacatagctttcttttttccataaggaatgcaactataacaatttctatcatttacatttactttaaaaatgtagaaatcgctgccaacctgaaactctttggttgttcaaatttaaactaaggaaatatgaattaaaaaaactaattaaataaacaatacaagccagcaagattctgtgtgacttacccagttttttccttccctccaccttctgttgaaccaaagataaatcttacatttgaaaaacacttaatacatagtgataaatatcaatatcattcactattttcagaccttacttgtaatagggtaataacttgatttttagtaaatcagagaccatcaagtactgaaagccaaagttgttcttatgtcaacacaggccaagggtaatgaattaatctgtcttactctttgtaaataatttgctgattaataaaccttaacatcacacaatttataacatactgagcttgatttattaatgctttacttgaagaaaagactaatctctgtgactacatgtgggttgagtaggggtaaggtatgcaaaaaatcccttctgaaacatgaaaaaaaacatggcatatttatgactacatttacactagagcaatcaactagataattgttctattgtgaaccaaccattataatgaaggttaattgcctgcgtatgaaccagagccataagacaagtgggtacctggagttaaattgaacatttgggtgccaagatatagagaaacacagagccaactttctgatgaacaatctaaacctactatcaaaatcactggagattttatttggcaatataattgttgttctataaaacaaatgttagaatttaaaagaaactagaagaaattttcagtacagaacagaaacataagacttaagcaaagatcacaagaaattaagagcctgcctgtgtccatttttacttccttttgcaattttttgaaatagaatatatgtatagaaaaattcactaaatgtaaatacgcagcccagtgaaaaacaaatgtgcatacaatgcaccactcatgtcaagagaaaaaatacctccacgttccctattaatcttcttttaaaattgtggtattttcttcagcatagattttagccttattttgaatatttttattgcattacaataaataacatttatctggattactta

SEQ ID NO: 1880858 - DNA, 4001 bp, Homo sapiens
aaattcatcacaatgttgatagtcccgcctctcacgtggccttgtcttttactaaaaagggaggttgagaggcaagtacttaagaccagaaagaataagcaatatacgtagtgcagaacaaatggctttttgggggtttactggatgggcagtttcctccccagccccaaggttccaaagtgtccactggtctatccatctagcgtgagttctattccagaactgctttttgggagatgggagtctcgctttgttacccagcctggagtatagtagtgtgtgctcagctcactctgcttcccgggttcacgtgactctcccgcttcagcctcctgagtagctgggactacaggagtacaccaccatgcccagctaatttttgtatttttagtagagatgggctttcaccatgttggccaggctggtcttcaactcctgacctcagttgatctgcctgcctcggcctccccaagtgttgggattacaggagttagccactgctcttccctgaagctcttccttgtcctaggaaacctgactaatctgttcctgcacctctttccagagtggtcttcaggacataatcctcagacctgctaaaagtaggagaagctgcagcagccttcaagtcagcaccagggctgcaggagcaggtcccctcaccagcatttcaaccaagttagttagggctgggatactggaaacacgcactaagccatttccattgggatgggtgaagcaagtggcagagctggctttgccatgctctccagtgacattccaggggaaacactctttaggaagtaacacgtctggcaccagagttgacttttaatttgtcctaaagccgctgaagcaaaaaccatgataaaacattctgctttcttttcttttacaaccccacgaacgcaaaaaaaaaaaaaacaaaaacaaaacaaaaaaaagaaacaacaacaaaacccaaactatttgtaggaaaaaatggttttgtacatgggatgaaacaatataaattcaaaacttacagataagggttagctctatcactcaactctttaaaaagtttatatgaatatccagtcaaaaccaacacggtattgcccttgaaatgttaactagacggatttccaaggagaccacaggactgtatactgtcttggaatgtcctcagaaggctctgtcattgatcaggtaacagtaaaaaccccagagtcctttctttcaaatggaaaagggaaagcagagggacagaagctattcaaacttcgtcttctttccttgtggcttgtggtcacctcctcctcctctgcctcctcggaagcctcctcgccctacaggaggaaggcaagacactgttaaaagaatgggtacaaagctcctcctccccagtgattaggaaccgtgacagggcacagggtctgaagagcacatgctatgtggtgtcattatctctgcgtgccttacctccaaagcctccccggcctctgccaccaaatcctcctcggcctcctctaccaccacctcgtcctccaaagccgcctctgcctccaccacgacccccgaagccaccttcacccttaggtttggcccagtccaaggtaactttatttccatcaatttcaccgtcttccatggcctccttggcagctttggcatcctcctcactgttgaagtctacaaaaccaaacctagaacaccaaatgaaattgcccattataaaaagcacctactacacatgtcccaagttaactgtacatgctggggagccatcccacagaaagtagccttgtttatttgggaaaagataccagtgacagagtagctctctatggaaaactaactggtgtgacagcttgaaccccagaatgtctcacaatacagctaaatatacctctgtaaagacagaaggtaaaataatgctagttctgtgaattctctcttcttctcgtgcgaatccataaactgccactgatagacagaaaggagctcaatgagaagacacattagactcaaggtctgcacagaacaaaaaccccttcaagtggaagcagcactcacgcttccttcccttaccctttggaggacccagtttcccggtcagtaactatccttgcccgaacggagccgtcaaatgactcctttaatgtctcttcagtggtatcctcagacaggcctttgacaaacagagttttggatggctctgggaaggaaaaaaaaatgtgactttatgtgaagtcacagttcgtaacactgaatttgcacaatgcctagtatgactactagccaagaatacttgttatagtgaaaaagcagttaaaagcaactaagccaactagtccttaattaaagtaaaggctattctgggtttacattttttaattgccattgcatagttgatatcctgccccagatcttctatggaaagtgggagaagcaacccaagcaggtggggcccagtggatggggcaggaaatcatgggcaaacttgctactctgagttgacacagctggatcagaacttgactatctagaggaattttcttgagatttcatcaattatttctcaggtaatcagtcatcatatccagttattgttcactcagtagcaacaggaaacacagaatttgtgcaaaaaataaacaaagcaccgagagtgctacccccaaccacagcaccctaaccaggtgaacttacggcttctggcattaggtgatcccctgggtccttgcaactccagcctgattgctctgccctcaatttcccttttattacaggaatttaaagcttctttagcgtcttcgaatgaagcaaactctataaatgcatacctgaggatgaacagttaatgcttagagtaagttaccaggcacatgctccttcactgtcacatgatgctgccaagccccttctctcaagttggtacctaaatgatgatctttattttacactcatttacgtagctaaaattatttggcttttctgacaggatcacatgaccttacgttcctttagacctctaagacatatatagcctataactgatgatacaaaggtattatcttaccctttagatttgccattttggttctggggtactttgataaaagttgctttctcaaatacttcctgaagagtttcttctgttgcactgtaggagaggttgcttaaaaccagagtttttgattcacctgcaaatagagatgccacattcctaagactctgaaacagtggttcccagcttcggtcacaacagtaatatcttattcctaagaatttcagtgcttgagttaatatacaaatactcatgacgtaagctaaatccatttctgttactcaacatattaagtacctagtacgtgttgcaatgtcctgctggttgttcttacataggctgatgactggtctgttttcctagaatcatctgagttcaaaacgcacatggtcaagtcatttaaagtataaaacatgcctacaaaggaagcttgatttgcctactgtattccaatgcaaaatgattttagagctctcattcaagattggaaattactattccaaataagagtatgacttggggtatcatgtccttgatcttcacctacatttgagtaactttgattaaaaagtatttataaacttatgaaatacaaagacacaaaggagttccctccaccaattctgaaaccttgtaacaagcctaatttcttaccactccaagtgctattctttccacctctatagtcttgattttgacctttctctccagtatagtacagggaaatagatcgcccatcgatctctgttccctgcttttcttcaaaggttttctctgcatcagcttctgtcttaaattcaatataagcaatcctgcaatggagggagaagaactcatggtttttaaaaccatattaacacaaatgcttttacctcagcaacacagaacttgcttcagatctgagtacaataaatgcccttagttttatgccacttttcaatcaaaactc

SEQ ID NO: 1880859 - DNA, 4001 bp, Homo sapiens
gctcttccttagaccttgccaaagttttccacttgcctggcactctcagctgcactgccagcatgggcctcatatacttacagaagaagaaacttcattaattttctggtccagaatgtccttggcagtaaaaccttcatcgaggaagtggcagtcaaactcttcattaccaaagttgttcatgatttcttgatgttcctctgaaatgcaacaaaatgcaaatagagtggagaaattcacttagaagccttagcaatacaattcttaagattaacctgcaacataaatgtaaactgaatacttacatggaaaactaagagatggaattgaaagaaatatttccagcttctcacaaaggcaactctccaggaattccaaatccctctgcgtgtgcccttggaacagcagtgacaatctgagaaataaaatagggaatttgctgtctaccttaggaacacatcgagttgaagatggggcactggctgagcacacgcagagctaatcatgccccggatatgaaccactcactggcctggtcatcctaattattactaggcataaggtacatgattccataaaccttggcagtataaggacacaacaaaaaataccaggtttttccaaggcagcacactaagcatttcaaatatttgtaccaaaaaaatctagcatgcaagtttcagaagcttatctgcacttagctcactgatatggaaaaaagtcttataatggtctgatttatttcagagcagtttcagttccttagaaacttaaaatagcattatagacttttttattttttttgagacagagtctcacgctgtcacccaggctggagtgcagcggtgcaatcttggctcactgcaacctctgcctcccgggttcaagcgattctcctgcctcagcctccccagcagctgggattacaggcgcctgccaccatgcccggctaatttttgtgtttttagtagagacaggatttcaccacgttgtccaggtgggtctcaaactcctgaccccaggtgatccacccgcctcggtcttccaaagtgctgggattacattatagcctttatacacagccatacaaacatttcctacttccactaagtcttagaatgatttttactgaccaacaggcatcatggaaatgtctggagcatttgagattttacgagttaattttcatgtattagctgggtatatacttcttaaaaactgtaatcttcaagtcaacttatcacattgtattacagttgctgttacctgatcagaattcagtattttttttttttttttttgagacagagttttactcttgttgcccaggctggagtgcaatggcatgatctcggctcacctcaacctccgcctcctgggttcaagcgattctcctgcctcagtctcccgagtagctgggattaccggcatgtgccaccacacccggggcctggctaattttatatttttagtggagatggcgtttctccatgttagtcaggctggtctccaactcccgacctcaggtgatccgcctgcctcagcctcccaaagtgttgggattacaggcgtgagccaccacgcccggctagaactcagtattcttaaaccagcgttgcctaccaagtttagcaattccgggaatgccaactgtccttacagtcactctcgtatttgcttagctatgagaataatttggggctaacttcaccaaaaaagaaaaacaagcaagaacatcactctagtaacaataaaagccactgtattttgctttcatcaaatgtggcaccttgtgaaccagctttcttaaaattatttattttaacctttaaaaatttctgccaggtagagctttcttcttttccactgtgcaacccacttcagtgccagcagcctacgggcacagaggccaggcaatggttcggggacacagtttgctctggcatggggtactatgacaggcccagggtgacgggcctgtcataaatccaaacccatgcatagaatttgctttaaagctctatctattgtgactgcttggcattgtcaacctccgaagttgcctaaatcacccctcggagaagggaagagagtaacaacgctagcaaaaccatttttgttacagacatggttatatatttttgtttatatgaagaatatttacaatttaataataaataggctcatgcagtctcggactgggtcatttgaggccttattaaatatttttaaggcaatgttcaggcctaaacttggaaagttttgatttctttttaatacgccaatacttttttgcttttctgtatcttttaaggcgttacttaagtaacttacttgaatatattttactgaagaacacctttcggtctttctgtaacagctaagttatttaaaatggtcaatcaattagcacaagaggataatgttagaagagataggggctaattcaaacaaactttgaaaaaaatttcacaaatcaattaaagtctgcccaattttatgtttaaacaaagtcagccaacacattctttgtcctccccagacattcctgagaggttctgccttctacactttcaccaattatttcgacttcgcaaacagcacaatcagccttttctgcaaaccttagggctgtctcccctgtgtatgtccgttcatctaagccaagcttttccgaaatcaccgagtcattcacagtccttaaataaacacctctaagtcatggccgagcatctaatatcacagctactacagcaagactatcttagctctacccactctcgcgggtttccaaattggtgtcatctgctctgtagacacagcgaaaataaaaactggaaggaaactgaaggcgccaaggccggggcccgctcgtctgtaccaaggcgagcccgggctctgcgcccctgcacctgctgcgcggccgccagggcctccccaacggctccccggccagcgcgcggccgccgaagggttgggaaagaggccggcgcggggccgcagggtctccgggtgggtctcccctaggcccctccagccccgagctgtgaagacgggggcagaacgaggcgcccggatcacccttatccagccgcgggagaaccccgggccgggaggaagcggcgcctcaaggtcgtggcccgctcggcgaccacgtgtctccgcaggccggcgaggcgcgccgcacacgtgcccggggcccggggcccgcagcccgccccggctcccgccctcgctccctcccttcctccgcggccggggagtccctcacctcagagcgcccaggcgccgcaggccagccccatggggaagcgcagacgccggagcctgagtcgcagccgcaggagcgctcggccgcccccgccgcgcccgtcagcgcctggctcccgcccgccggagacgccggcccgaggtggcgccggagctgctggcagaggggcggcgggcggcggcggcggcggctacaggagggactgacaaagccccacggcacgccgctccctacttatagcaccggcgggtcgccatggagacgcaccagctcaaaccagccacgatcggttccggccgggacaccgccgggggaggggcgggggcccggcggtggccaacccgggcccgcgcggagctggtggggcgccggcgggccgacgtcagccgagccgagcaccgcctgccccacgcgtggcccccgcccccggcttcgcgccccgccctccccgccctgcggccgcctctccccgccctccccgccctgcggccgcctcgccccgccccgccctgcggcggtctcgcccgcctggaactggtccgcgcacgcgcacgacgccgcaggccccggccccggcccgcggcagctgaacggcagagcctgtagctgcacagctgtgcttccacctggcgttcagtacctcgtgcccgagagcggaaaagggaaatcgcgagcggaggaccgatgtgctggccacgtgggccccgccgggccgactccggaccctgct

SEQ ID NO: 1880860 - DNA, 4001 bp, Homo sapiens
agccctctccgttgtgcagtactgcagtgcttatattcaagtaaccaatgcacaaaaatagttatgcttgcatttttttttttttttgagatagagtttcgctctgttgcgcaggctggagtgcagtggcgcgatcttggctcactgcatcctccgcctcccgggtttaagcaattctctgcctcagcctccgagtagctgggattacaggcacccaccactacacccagctaatttttttttgtatttttagtagagatggggtttcaccatcttggccaggctgatcttgaactcctgacctcgtgatccaccctcctcagcttcccaaagtgctgggattacaggcgtaagccaccacacccggccctgctggcatagtgttataactgttatattatgactgttgttgatatcctactgtacctaatttataagctaagctttattatagatatgtatgtttaggaaaaaacagcatatacagtataggattcagtactatcctctgtttcaaacattcttggaggggggagcttagaatacatctccataaatagctggggactattgttatcaacatgctgcttagttggatatgctgtatagaatatttcctgtcagaaaacagactctattaatactatgaacttaagcactagacatagttttaaaagtgtaacaaatacatagttctttttttttttttttttttgagatggagtttcactcttgtcacccaggcaagcaatgtcaccactgctgtgtgcaatgtcacaatcttggctcactgcaacctccacctcccgggttcaagcaattctcctgcctcagcatcccgagtagctgggattacaggctcatgccaccaaggttgggtaatttttgtgttgttaatagagatggggttttatttaccatgttggccaggctggtctcgaactcctgacctcaggtgacccacccacctcagcttctcaaagtgctgggattacaggcgtgagccaccacgcctggccaacaaatacatacttctattaacccctgccattgcttactgctacaagtttagctatacctatgaaaatgggtagagacaatgaaatcatctgatcttatagctgagggcatttgaatgaaacctttgattaatgatgcagctaaaggagttacgccaggccgggcgcagtggctcacgcctgtaatcccaacactttgggaggctgaggtgcgcagatcacctgaggtcaggagtttgagaccagcctggccaacatggcaaaaaccctgtctcaactaaaaatataaaaattagccaggcatggtggcagcacatgcctgtaatcccagcaacttgggagcctgaggcaggagaattgcttgaacctgggaggcagaggttgcagtgagccactgcactccagccagtgcaacagagtgaaactctgtctcaaacaaaaaaaaaggagttatgccattttaaacactctgatgcagatgatataatcttttttgatgaattataacaatgtctccaagtaacataaaaatgatgaatcagtacttcattgtatttgtaggtattcaattacatagcattttaattatagcatatcatccttataatactgccatacacatatacaaagttttattataaatcagttgttgaaaatatttttgaaagtcaaatatattacatcctcacactcaatagtgaaactaaggtaatcaatcaagggcacaaatcctctacagtgatttcttttttttttctttctctacagtgatttcttaaaactgtattcaaatctaggtctagtgagtttttattatgaaaatgttaactgttttatcctcctgcattcatccgattgttctaattaaccctaacaaacttctaacaatggaccacaagtgtctcagaagaggtagtgactaaagatgccttcattatccaaaaggaaatcaggcaaacaaatagaaatcatcattgaacacttggcccttagtgatctcccacatatcatctacttttgtgttatcagctaaaatttctttaacagctgtagtttaaagatgtaaacaaaatcctaaccagaaaatacttcaaacactcatatttacaaattacattaaaaccatcacctgcatgagcaataagccgtgctccaactaattccccaaccatgactgtaacattgggtgcaatggccatcattcgattttgtagatattcatagagctgggttcgatattcagagatttcaatcacctagtataaggaataaagttaagtcacaaatatcatatgagtaaaaacagtaaaaattcctgtctaaaacactggagccctcaattatgaaagagcagctacacaaccctgggtactgggtacatcacctatgcctaacatcagttttcttttttttttttcccaggctggagcgcagtggcgcaatctcagctcacagcaatctccgcctcccgggctcaagtgattctcctgcctcagcctctggagtagctgggactacaggggcccgccaccacgcccagctaattttttgtatttttagtagagacagggtttcaccatgttggccagtatggtctctatctcttgacctcatgatcctaacatcagttttctataagatggctgtaatgaggacttcgttatataatgtatgtaaactacttggtccactgcctgaaaatcttagtcagcgtaactgtatttttaaaagattctaagcagcccaggcacagtgactcacacctgtaattccagcactttgggaggtcgaggcaggtggatcatgaggtcaggagttcaagaccatcctggccaacatggtgaaaccccgtctctatgaaaaatacaaaaattagctgggcatggtggcacgtgcttgtaatcccagctactcgggaggctgaggcaggagaaccgcttgaactgggacctgggaggcagaggtagcagtgagcctgagaacgtgccactgcactccagcctgggctacagggtgagactctgtctcaaaaaaaaaaaaaaaaaaaaaaaaaaaaaaaaaaaagattctgagcaataaacatttgtatcatgctctttttaattcctatatggctaccttcaaatctgaaagaaaaaaaaatcacaagatatagacataagactcagaattaaaaggctcaatccataattgtctgccatcctttttttttttttttttttttttgagatggagttttgctcttgttgcccaggctggatgcaatggtgccatctcggctcactgcaacctccccctccctggttcaagcgattctcctgtctcagcctcccgagtagctgggattacaggtgtacgccaccacgcgcagctaatttttgcatttttagtagagatgggggtttcatcatattggtcaggctggtctcgaactcctgacctcaggtcaatccctgactcggccttccaaagtgcggggattacaggcgtgagccaacgcgcctggccttctctgccatcttaattgatttttggttaattcattattcagacgatgattgtaaattacttccttttaatatgtatttcccccttttaagtatacaaatcatgatggcatcagatgaggtagtgactgaacaccctcatatttatgttatcaggtgaacaacaataagtgtaaaaatcatcattgccatcagaaaaattagtactatagagctggtaacaccacaactagattctccaggagtaaaatttacctgggtgcaaagatgcagaatattgcaaatatcttcttctgaaacctctgttcccattgatatctctgcagctgctttcacttctgcttcaacttcttctggcagcaactcagaaagcttggcagaggcatagttcttcctatcgcctatggaatgtttgcagaggatgagggagaatcactcttcaacaaattatataaaatccagcaaatagtcaaaa

SEQ ID NO: 1880861 - DNA, 4001 bp, Homo sapiens
atcaagggcacaaatcctctacagtgatttcttttttttttctttctctacagtgatttcttaaaactgtattcaaatctaggtctagtgagtttttattatgaaaatgttaactgttttatcctcctgcattcatccgattgttctaattaaccctaacaaacttctaacaatggaccacaagtgtctcagaagaggtagtgactaaagatgccttcattatccaaaaggaaatcaggcaaacaaatagaaatcatcattgaacacttggcccttagtgatctcccacatatcatctacttttgtgttatcagctaaaatttctttaacagctgtagtttaaagatgtaaacaaaatcctaaccagaaaatacttcaaacactcatatttacaaattacattaaaaccatcacctgcatgagcaataagccgtgctccaactaattccccaaccatgactgtaacattgggtgcaatggccatcattcgattttgtagatattcatagagctgggttcgatattcagagatttcaatcacctagtataaggaataaagttaagtcacaaatatcatatgagtaaaaacagtaaaaattcctgtctaaaacactggagccctcaattatgaaagagcagctacacaaccctgggtactgggtacatcacctatgcctaacatcagttttcttttttttttttcccaggctggagcgcagtggcgcaatctcagctcacagcaatctccgcctcccgggctcaagtgattctcctgcctcagcctctggagtagctgggactacaggggcccgccaccacgcccagctaattttttgtatttttagtagagacagggtttcaccatgttggccagtatggtctctatctcttgacctcatgatcctaacatcagttttctataagatggctgtaatgaggacttcgttatataatgtatgtaaactacttggtccactgcctgaaaatcttagtcagcgtaactgtatttttaaaagattctaagcagcccaggcacagtgactcacacctgtaattccagcactttgggaggtcgaggcaggtggatcatgaggtcaggagttcaagaccatcctggccaacatggtgaaaccccgtctctatgaaaaatacaaaaattagctgggcatggtggcacgtgcttgtaatcccagctactcgggaggctgaggcaggagaaccgcttgaactgggacctgggaggcagaggtagcagtgagcctgagaacgtgccactgcactccagcctgggctacagggtgagactctgtctcaaaaaaaaaaaaaaaaaaaaaaaaaaaaaaaaaaaagattctgagcaataaacatttgtatcatgctctttttaattcctatatggctaccttcaaatctgaaagaaaaaaaaatcacaagatatagacataagactcagaattaaaaggctcaatccataattgtctgccatcctttttttttttttttttttttttgagatggagttttgctcttgttgcccaggctggatgcaatggtgccatctcggctcactgcaacctccccctccctggttcaagcgattctcctgtctcagcctcccgagtagctgggattacaggtgtacgccaccacgcgcagctaatttttgcatttttagtagagatgggggtttcatcatattggtcaggctggtctcgaactcctgacctcaggtcaatccctgactcggccttccaaagtgcggggattacaggcgtgagccaacgcgcctggccttctctgccatcttaattgatttttggttaattcattattcagacgatgattgtaaattacttccttttaatatgtatttcccccttttaagtatacaaatcatgatggcatcagatgaggtagtgactgaacaccctcatatttatgttatcaggtgaacaacaataagtgtaaaaatcatcattgccatcagaaaaattagtactatagagctggtaacaccacaactagattctccaggagtaaaatttacctgggtgcaaagatgcagaatattgcaaatatcttcttctgaaacctctgttcccattgatatctctgcagctgctttcacttctgcttcaacttcttctggcagcaactcagaaagcttggcagaggcatagttcttcctatcgcctatggaatgtttgcagaggatgagggagaatcactcttcaacaaattatataaaatccagcaaatagtcaaaagaaaaagtagaaagccaatgaaaaggatgcctaaacaaaacaaaaaaaatgaagaagtttgacctagtataacagttttcctcatttaagggtttaagtttagacattaaatgtctccccaccaccttcttccaaaaaataatcagagtaaaaagaggacaaaatatgccacaacacttattacagaatataagtggcaaaaatttaaaaaagacaggactaataataatgtcacagacaattttatactgaagctggggccagtaattcgtaaggcaagtaaaccatcaatcaatcaagttcctctgtacgttaacgacaatcaacaatcaagttcctctgtatattaacagtacagacggcaatactgctatttagcattaggtactaatatcatgttataggccatcaaaatctaagttaaaattcattttgtttcttaaatttaagacactaaactgctacacttcccaaatacacagaaattgcaaaaaccctgggaatcttgcttaacaaaatgctatacgtcatgttttaggatgcaatcaaattcatttactttcaatgccttaaaggatgaacaaattactcaccaactttctgtaaacacttgcagtatgttaaattatctgaaataatttttcctaattcagggaaatgccagccataccattctctacatcgcataatgtagttgtttagttctttatccaagtcatctaacaaggctgtagtagattaaaaacaaacaaacaaaacttaaagggatttattgtggtaaaacatacacaacataaaatttaacacttcaggctgggcacggtggctcatgtctgtaatcccagcagacaggcatatcacgaagtcagaagttcaagaccagcctggccaacatggtgaaaccccatctctattaaaaatacaaaaattagccaggcatggtggtgcacacctgtagtcccagctactctggagggctgaggcagaagaatcacttgaacacaggaggtggaggttgtagtgagccgagatcgtgctactgcattccagcctgggtgacagagcaagattccgtcgcaaaaaatttaaaaaaaaaagaataaaaaataacacttcaaccattttcaagtgtactattcagtagcattaagtattcttatgatgttatgcaaccattaccaggatctattgccagagcaattttatcatcagaaactgaaaaattctgtacccattaaacagtaactcattcccaccttccccccaacctctagttatctttatacttctgtctctgagttcacctattttaggtacttcatataagcagaatcatgcagtattttgtgactatttcacttagcatattttcaaggtttatcatgttgaaatatgtatcagaatttcatttctttttaaggctgactaacattccactgtgtgaagtggctgggtgtacgttacccaaaatgcttgggaccagaagtatttcagagtatttgcaaacacgtatgaggctgaggatggaactcgaagtctaaataggaaatgcatctacatttcacatataccttatatacaaaaccttgaaggtaattttacacaatattttaaataattttgtgcataaaacaaagttttgacgtgtggtcaggtgtggagttttccacttgtggatttgtgtggtaccacaaaaagttttagatttcagagcattttgaatttcagattagg

SEQ ID NO: 1880862 - DNA, 4001 bp, Homo sapiens
tcagacctgctaaaagtaggagaagctgcagcagccttcaagtcagcaccagggctgcaggagcaggtcccctcaccagcatttcaaccaagttagttagggctgggatactggaaacacgcactaagccatttccattgggatgggtgaagcaagtggcagagctggctttgccatgctctccagtgacattccaggggaaacactctttaggaagtaacacgtctggcaccagagttgacttttaatttgtcctaaagccgctgaagcaaaaaccatgataaaacattctgctttcttttcttttacaaccccacgaacgcaaaaaaaaaaaaaacaaaaacaaaacaaaaaaaagaaacaacaacaaaacccaaactatttgtaggaaaaaatggttttgtacatgggatgaaacaatataaattcaaaacttacagataagggttagctctatcactcaactctttaaaaagtttatatgaatatccagtcaaaaccaacacggtattgcccttgaaatgttaactagacggatttccaaggagaccacaggactgtatactgtcttggaatgtcctcagaaggctctgtcattgatcaggtaacagtaaaaaccccagagtcctttctttcaaatggaaaagggaaagcagagggacagaagctattcaaacttcgtcttctttccttgtggcttgtggtcacctcctcctcctctgcctcctcggaagcctcctcgccctacaggaggaaggcaagacactgttaaaagaatgggtacaaagctcctcctccccagtgattaggaaccgtgacagggcacagggtctgaagagcacatgctatgtggtgtcattatctctgcgtgccttacctccaaagcctccccggcctctgccaccaaatcctcctcggcctcctctaccaccacctcgtcctccaaagccgcctctgcctccaccacgacccccgaagccaccttcacccttaggtttggcccagtccaaggtaactttatttccatcaatttcaccgtcttccatggcctccttggcagctttggcatcctcctcactgttgaagtctacaaaaccaaacctagaacaccaaatgaaattgcccattataaaaagcacctactacacatgtcccaagttaactgtacatgctggggagccatcccacagaaagtagccttgtttatttgggaaaagataccagtgacagagtagctctctatggaaaactaactggtgtgacagcttgaaccccagaatgtctcacaatacagctaaatatacctctgtaaagacagaaggtaaaataatgctagttctgtgaattctctcttcttctcgtgcgaatccataaactgccactgatagacagaaaggagctcaatgagaagacacattagactcaaggtctgcacagaacaaaaaccccttcaagtggaagcagcactcacgcttccttcccttaccctttggaggacccagtttcccggtcagtaactatccttgcccgaacggagccgtcaaatgactcctttaatgtctcttcagtggtatcctcagacaggcctttgacaaacagagttttggatggctctgggaaggaaaaaaaaatgtgactttatgtgaagtcacagttcgtaacactgaatttgcacaatgcctagtatgactactagccaagaatacttgttatagtgaaaaagcagttaaaagcaactaagccaactagtccttaattaaagtaaaggctattctgggtttacattttttaattgccattgcatagttgatatcctgccccagatcttctatggaaagtgggagaagcaacccaagcaggtggggcccagtggatggggcaggaaatcatgggcaaacttgctactctgagttgacacagctggatcagaacttgactatctagaggaattttcttgagatttcatcaattatttctcaggtaatcagtcatcatatccagttattgttcactcagtagcaacaggaaacacagaatttgtgcaaaaaataaacaaagcaccgagagtgctacccccaaccacagcaccctaaccaggtgaacttacggcttctggcattaggtgatcccctgggtccttgcaactccagcctgattgctctgccctcaatttcccttttattacaggaatttaaagcttctttagcgtcttcgaatgaagcaaactctataaatgcatacctgaggatgaacagttaatgcttagagtaagttaccaggcacatgctccttcactgtcacatgatgctgccaagccccttctctcaagttggtacctaaatgatgatctttattttacactcatttacgtagctaaaattatttggcttttctgacaggatcacatgaccttacgttcctttagacctctaagacatatatagcctataactgatgatacaaaggtattatcttaccctttagatttgccattttggttctggggtactttgataaaagttgctttctcaaatacttcctgaagagtttcttctgttgcactgtaggagaggttgcttaaaaccagagtttttgattcacctgcaaatagagatgccacattcctaagactctgaaacagtggttcccagcttcggtcacaacagtaatatcttattcctaagaatttcagtgcttgagttaatatacaaatactcatgacgtaagctaaatccatttctgttactcaacatattaagtacctagtacgtgttgcaatgtcctgctggttgttcttacataggctgatgactggtctgttttcctagaatcatctgagttcaaaacgcacatggtcaagtcatttaaagtataaaacatgcctacaaaggaagcttgatttgcctactgtattccaatgcaaaatgattttagagctctcattcaagattggaaattactattccaaataagagtatgacttggggtatcatgtccttgatcttcacctacatttgagtaactttgattaaaaagtatttataaacttatgaaatacaaagacacaaaggagttccctccaccaattctgaaaccttgtaacaagcctaatttcttaccactccaagtgctattctttccacctctatagtcttgattttgacctttctctccagtatagtacagggaaatagatcgcccatcgatctctgttccctgcttttcttcaaaggttttctctgcatcagcttctgtcttaaattcaatataagcaatcctgcaatggagggagaagaactcatggtttttaaaaccatattaacacaaatgcttttacctcagcaacacagaacttgcttcagatctgagtacaataaatgcccttagttttatgccacttttcaatcaaaactcgagcttccctcttacttcccactagttttacaaatacttggaattttttcatagtaacctcacctcactgaaagaactgctactacttacaaagtatttattgtaagataggcacatttcttgcttctttgtaagtattagcttgtcttttaaaatcaccctatgagtacattatccccatggtacagatgggttactgaggcacaaacttacaggttaaactgtccaagattacacgcctaaggaaatcaaaccaatatttcttttataaagcaggaaagtgcattaatgttaataaaacccttacatttcaatagacagaacataccctttacttttcccatccttgctgactaatctgatctccgcagcatcttcaaacacttctttcaattcatcctgagtgactttgtaagggagatttttagccaaaagtgttctcgcatctcgctctagattaaaaaaacaaaaatgagctctgtggcctgaaaaaccaaaggtggggggcaacaacaaaaagaggggaaaaacacacatagctctattcaacaaataatttgagatcctataatgtacaaggctcggtg

SEQ ID NO: 1880863 - DNA, 4001 bp, Homo sapiens
taaaactactatttaaaaaaatgtatcaaatgttagccagaccccaaattccctgttaagattaaacggtttccaatacttgaccatctcttcactcaacatactaccctcatcccagtatttacctgcagcatgagaaccaatcagatttccaaatccaagtaaaatattccgcctctacaacccagcacctatgaatcttcacagcaaagtcaagtttttctgggaagcctgggaaccagttacctatataatccccctcccaggacacagtgctactccaaatcacattcccaacacttaaaagatggtttctttacatcatgagtcattattttaaatttgtaacctgttaagtagttgtaagtcatgccaaattctgggaagccctccctcctctgggttaggtgtcttctagcagtgtcacacatctcacatcaagttcccagtgcaaagatgctaggttacaacaaatcacatcatcaggcactgctaaggacatcacaagtgggtaaagttgcactacaattttttttcttttgacaggaccttgctctggcacccaggctggagtgcagtcgcacaaccttggctcactgcagtttcaacctcctgggttcaagaaatcctcccacctcagtctcccaaatagctgggaatacaggggtgcactaccatgtccagctaatttttatattttttgtagagacaggatctctccccattgcccaggctggtatcagcctcctggtctcgatccagccacttcagcctcccaaactgctgggattacaggcatgaaccaccacacctggcctgcactgcaattttctaacaacaatgccaaaccaaatttggggtatttaggaatcacatattcatttaattccttcccccaaaatgaaaggaatatatacaccaccctcctatgtaacatactcaagagccaaaggtaatctttcaatcttttatttaaatgccatgatccaggatggattttagatcttgttgaaagcagccacatccatggactgcacatagtcctcaaaagcagtgatctgctcctccagcatatctgttccaactttatcatcttcaactacacactgtatttgaagtttcttaattccgtatcccactggaactagtttagctaaaaagagcattaagaaaaatcctagttagaaaagtcttgtaggaaaggttgaaactgtaggcaaattccagatgttagtttcaaaaaaaaaaaggcaaagcctaaactcacatgagccccagactaagccgtctgcttgaatgcttctgacgcactcctctaatttcgccatatctgtctcatcatcccaaggtttcacatctagtaagatggaagacttggcaacaagtgcaggttctaaaaacaataaacagcattattcaaataatgaattgtatttttttcaccctactccaagacacaaacaaatccatctcaatttgttttgagactatctccttagccaaacaaaactacagatacatcttgtgtctgtcacacatatatacccactttctgttttgctaagaaagaggtgtttgtgttaacagtttctttcccacagaggaatgccacaactgctaccataagaacagctgcagaccagtagctgtggaagaacctgtacaggttttaaaatattgacctattcaaggaatgtggaggaaattacttcaaggtcaagctttgaaaaagattacttacattaacatgaaatgaagttaaaaacaaatgacctacttttggctttctttgattcatattgtgcaagacgttcttcccttagcctctttgcttcttcactttcctgtaaagaaaaaaaattaatccacttcagaaagctggttgttcctctgcttaaagctagtggggtcatcacaaaaaagactggcttaatcagaaaaaagcaaatccatcacgaactcagccgaaagatggtgatttgattttattcatcatgcaaccagtcagaatttgaaaaaggcatataaattaaagccaggattcaaatccaggcaatttggcttaaccacattgatacaattgctgatcgatgtattctttttttttttttttgggacggagtctcgctctgtcgcccaggctggatgcagtggcacgatcttggctcactgcaacctccgcttcctaggttcaagcaattctctgccttagccgcctgagtagctgggattacagatgcctgccacatttttttgtatttttagtacagacagggtttcaccatcttggccaggctggtcttcaactcctgacctcgtgatccacccgcctcagcctcccaacatgctgggattacaggcatgagccactgcgcctggccgatatgttctttatagaagacgccatacctcctcatcatcagatccaaagaggtcaatgtcatcatcatctttactatctgtagctccacttcctgtagtgtcttccacatcggcaggaccatatttgcccaaagctttcttcactcctggcaggcttgaaaaacatttaaattcaaccactattgagctagtataacatccttttccagaaaatacaaaataacttgttttaatcactacttatcactagatcccttttgcaatcataatttaccctttcacatgcgcccaggtaaacactgtcatatgttcaactcctcacccgacaagcattagtaccatgtgagacattattttcaatactcactatgatttactctttcagtatgaacatttctgtttgagatttcattaagtatgctcagttccattcttagtgaactggagtccacttccccaaacttccacccttgttggcagtttcagaagaatggccaaggactgaatgaatgagccaccctctcaccccagaggtgggccccccaggtcaaggtcgaggcacattggcagggcagtgtggggaaaagttgaattgctgctgtccatgttctacctgttctgtgaaaaaatggagggcttcagtctcttggccttctaaggttacagaaaaatttagcttacaatatcccaacaaaactaaagtagcctgggtccagttttgtcatgtgaacatcctgataaacttcgagagcagtcttattcttcagctctatacaaagatgattttacctggccttttccttttcgtaagacttgatgtgattataccaacgtagggcatgacacaagtcggcaggcggtgggctggacacggcttcaaatactgccacatctgcttgtgatggcacatacctgccaaggacacagaaacattcacacacacctttgaaaaacaaacgccagcgaataaataataaataccgtatgcatcacattaattagtgggcactaaccccagcagggttgctttaatgcttttcttttcttattagctccttcaaatcaaaccatatgtttgggtcaccgcgctatcctgagaaatgtctgccactaagtagacctcaaatactgcaatgtctggcgttgctctatctacagcttaacatgtattaactgggcagcgatgcggaaacacctggctgaattaagtgtaaataaagcacattttaacctttccttgctcgtgaaccgctccccggaggccgggctcgccccacacgagggccttgggagacggcaacggggcgctttcccctccctctcgaaagggccccgggcccggcctccctccctcccgcggcagccgacacgctgcgccacgtggccccggccccgggcggagaaacctccccgccaccccgactcagcccgtccgctcacccctcgatgtagctcttgtccgccaggtaatcgttgagcacctggaggccggcagggcttttcaggtctccgaaacccatggtgtcggctgtatccgagagctggggagcagcagaaagagagcgcgcaaattgtgggcgccccacgctgaagagaggaaaaaggacccgaagagaccg

SEQ ID NO: 1880864 - DNA, 4001 bp, Homo sapiens
ctatactacaactaagtgtccttccttgataaatacttaacatttatgtgtaaataaacatgatgcaatttgctatacaaaaactcaactgtggtctgggtgtggtggctctcacctgtaatcccagcactctgggaggctgaggcaggcggatcacttgagcccaggtgttcgagaccagcctgggcaacatggcaaaactctgtctctataaaaaaattagccaggcatagtggcatccatctatggtcccagctactcaagaggctgaggtgggaggatcacttgagcccaggaggtggaggttgcagtgagccaagatcaaaccattgcaccccagtctgggtgacagaatgagaccctatctccaaaaaacaaacaaacaaacaaaaacaacaacaaacaccctcaattgtatagaactgattcctgattaaatcaagtctaacatgttctgtcagcctcttggttatcaaaaagaaatttgttttatgactaacatagcaaacagatgtgcttggtttatcctaacacaaaaaagattaaaaaggacatggggaaattaaaaagttgaaactaggccaagccaaagaaagttggcgctttatttttaaagtcagctatcatgtaactgaggaataacttttatgaacatgttatgaacatgttttatgaagctatgttatccccaccccaccacccaataaacgcatttaaaatcagctaaattatccttcaaaaattggacaaagaaaaaaaaagaatacaaattaaagtaaaatcagctaaagaaacctagtatttctgtaagaatgaaacagttaaaattccagattccttatgtaagagggaagaatgtgaatggaagataaaaaacaactctgcacagacatgtacagtaaccacaaaggattttgggaactgaggaaaaaatgaagatcataaacacttaggcagttataatgactatcacttttagagaccaactggcactaggttagccaggattgctcagacagccaagagaaaagaggcatcactggaactcagcaacatgcgaaacccaatgatagtcatcacagcaagtcctggcttgacttattccattttatgttacccagctaactactaactaatggccaaaacagcaccctctttagttactgaaggttccatcttctctgttaaacaaagatgacaatctagaattatgaaatctatgatggtgaagataaaagagagcataacaggagaaatctcagtaaatttctaaagatttaactttggctctatccaacacacttgttagaatttcccagtaattttaaatcacaaactcaaatatatggtcaaagcagttgcattacctcatttccccctgacttcctcttgctctctacttgctcggtttgtggaggagcgggcttgatagctgcatgatgaccaggaatcccaggcaccagaacttttgcttcagaattcatcactggtgtcctcacctgttcaacaggaatagccaaagtgtgaaaaaggaaatcataccttagtccttaagtatcctcaatgagaaaacagcttttaaagggctcctctattggaaaaatgcaatataattaacttgatatcaatttaagatatattttaaattgaatgttgacaaactttttaagtgacaatctgaaagactgtgaatttaaagcttacaataccacataagagtaaaatccgactggcctgacagtagttggttatcagaacttattaaatatttagtgtcactaacgttggtatacaagcccccactactaaattcaactggctttaaaaaactacagattacataaagacacaatgatttttaaaaatttaaaaagtgaagttacacattttacaactacctccagaattcaatctctgccagaaatgctcagacagccaagagaaaggtgtcatctctgaaactcagccagcagcgaaaccatatggatgtcatcatagcatgtcttggctttccctttctcactaaaccacgaaacacgtcccctacatgtagacaccaagttatatgcaaaatggagcaccatgatgatgctcctatgcttttgtggtattatattctagccccatgacggttttattacaccctgaaatacagcattcctctcagcaaagtaatgctcttttaagtactgagattgataaaaactatctactgataaatctgatattgatatttatccctacattcttcctggcccagatgatcatgcatggtgggcagggaagaaccacatccaaggtcttcaactgctagtcttctattcattcattcactcaacaaatcaggagtacaatcttgacatctaaaaccataatcccacaaaatttataagacaagagaataaagatattaaagaataaaaaactcagtttaatcataatactaagtaacagttccattcacccaaagaaatattctttttcttaaaacttcaaatttgtaatgtgctcacctttgttatagctgtttctactttgggggcccagcagtttgaaatatctcttactaaacacatatgaggttctctggagtttaaagcctgaaaatatattttttttaaaggggaagatgagaggaaagaaaaaaaaaagagtgtcaaacaaagcaactgggaataagaacaaaatgaaaaataaatgactacttgtgcatttttataaaatattaaaaagtatggaagacttccacactcaattgttaaccacgatcaccactcagactgacggcagttaagaaaaatggtaattctgaagacattgggtaccaaggtttactttcctcagctatgaactgcttgaatttttcacatttattttttaaagttcaacagaatttttaaacgtaacaggttttaaagaaaacgtatcagttcatcatccttttaagaaacagtctgctcaaaatagtaaatggttctactcttaactctcctattgtcctttccataagcaagtcaaaggtagcactgttgattaacaaaatgcatctgtatgtcctgacacgatattaaataggatcgggggagtcagatgcagcaaaccaataaagatttaaagtgatacataattctatatgcccatgtaattaatcaatatcgggaaagatgcaaaaaaatagtcaacaatggctgcaaacagagagggatggaattcacatatggcaaggagccatgtttacagcttaacacttttctcctttttttatttttttaattaaaccatatgcacgtatgcttgtgtgagcatgtaatattccactcatagtcttgctgaggatcatacgaagtaaacgcattttaaatgcaagcttaagaaataaccttttgtacatgcttacgataactcagaagtcttcaagaaacgtctctagtaaacaatgttaaatcattgcactgcccattacatttccacttagaaaatccaatgagtgctaatactaagagatcctattattaagattcatatcttcgtaactaggcaaaattcaacataagtcatacctgtactgaccaactagtaagacactaggaacatgtggcactgagcacttgaaatgtggctagtccaaactgagatgtgctagaagtgcaaaatacacaccagatttttaaaacatagtaccaagggagagggctgatataaataactcaaacaatgctttaaactgaccaggtgttaaattatgttggatatagagctctcaaaattaaaataaaccactccatgaagaaatcctttaattaaaaaagaatatattatttatcttaaagaccaatgttgttatttttaaaatcactctcttccatggacacagggatgctatattgctttactccagagtagcagctacgtaccactcgctcaatagtaggctgaaaccaactgccatatacaagcaacaatgacattttgtctgagcaaaaaccagcagctagaatagg

SEQ ID NO: 1880865 - DNA, 4001 bp, Homo sapiens
ctttttaaattatttttcaactgtgaatcctggctgttctcaggattacaactctacccttggattaaaatgaggagagagctgtatacttgaccacattaccttggtcccttgtagaacaccttttactgaattgtgcttcagcattatgttgctggtttccacagggagatcaacttaaccacttctcacctctcctcacacatggggaaaaccagccctatggtgaaaaaagctaactcaatgttgtctcagtggtagtgacgaatgagtcagatcacttaaattcagttccaataagaatgcatcattgacaacattgaataaggttaacacaggcaactgaagcaaacaaccttttaaacaagaaaaacaaacggctaagacttaattttttcaaaaaagcaagcttctaattttttactttacctgctaatgcttctgctgtatcctgaaatttctcaaaatgttttagctttactctagaattaaaaaaaaaagagataaacatgttattgggggcagtgcgttgattcaaaagccacataacttggaaagaagtgcttgactgtttccaaagcacacaccaataaaacatgcctaccattgtgtatcagggtgtgaagttagatattcttcatacaattactagtttttctaaatgttaggctagtaatgcttggattattaaaagaaagttgtaggctttggaggaaattttggccaagagtaaagatgttgaagctttaatacaaacccctgttgcataaagctgtacagagatgactttattatacagcatagaattgactcaagaaaacgtacgtgagtcctttttaggaatctcatgatattcatttgtctatcctgtacaaatgccattaaaaaaaatagcttattgtcaggtctcattcttgttacatcctaaccctttatggttttttgtttttttttttgagacagaatctcactgtcacccacgctggagtgcagtggtgcgatctcggctcactgcaacctctgcctcccggattcaagcaattctcctgcctcagactcccaagtagctgggattacaggcatgtgcctgtgccaccatgcctggctagtttttgttttttttttttgagacagagtctcactctgtcgcccaggctggagtgcagtggcgcaatctcggctcactgcaaactccacctcccaggttcatgccattctcctgcctcatgccattctcctgcctcagcctcccaagtagctgggactacaggcacccgccaccacacctggctaattttttgtatttttcgtagagacggggtttcaccgtgttagccaggatggtctccatctcctgacctcatcatccgcccgccttggcctcccaaagtgctgggattacaggcgtgagccaccgtgcccagcccccatggctggctaatttttttgtattttttagtagagaagaggtttcaccatattggccaggctggtctcaaactcctgaccttgtgatccacccacctcgacctcccaaagtgctgggattacaagcgtgagccaccgtgcccggccccctttatgtttttgagacagggtctcacttcactctgtcacccaggctggaatgcagtggtgcaatcacagctcactgcagccctgacttcccgagctcaaaggatcttccagcctcagtctcccaagcagctaggactataggtgtgcaccaccacacccagctaatttttgtttttggtagagatggggttttcctatattgcccaggctggtcttgaactcctgggctcaactgatccgcctgccttggcctcccaaaatgctgggattacaggtgtgagccatcacgcccagcctcagggtagtattttatccagaaagaaacatatagttgattcatcgttgtctcagtggtagtgacgaatattgagtcagatcacttagattcagttccaagaagaatacatcattgacaacaacgaatcagattaacccaacaaagcatataaccctttaagaaggaaaactagtcttctagttgcctaaaacagtgtcatctttttttttttttttggagacagggtctcactctgacacccagactggagtgcagtggcgcaatctcggctcactgcaacttccgcctcccaggctcaagggattttcctgcctcagcttcctcccagtagctgggattacaggcatgtgccaccacgcccggctaattttgtgtttttaggagagagggggtttcaccatgttggccaggctggtctcgagctcctgacctcaaatgatccacccaccttggtatcccaaagtactaggattacagacatgagccaccacaccaggcaacagtgtcatcttaagcaaggttttcttatctggtaagggaacatactagtgtggtcccttaaatatacatacaaatacgaagatttaggccaggtgtggtggctcacgcctgtactcccagcactttgtgaggccgaggcaggcggatcgcctgaggtcaggagtttgagacctgcctgaccaacatggcgaaaccctgtctctactaaaaatacaaaaattagctgggcatggtggtgggcacctgtaatcccaactacttgggggactgaggcagaagaatagcttgaacccaggaggcggaggttgcagtgagcagagattgcgccattgtactccagcctaggtgacagaacaagactctgtctcaaaaaacaaacaaaaaaaccaaagatttaacatctacactaagaatgaatcttccatgaaattgtgatgaaagaaaaagtagttcatgctagttttgatgttgcaaaactcaaaaagcaggttacaacccctgtgtgcggtaagtgcttagttaagataaaaaaggtattacatttgtgtgtggaagacacgaagacaaatgtgttcctactgacagcaatcacatttggtactatccgaggtttaaagtatccacagggtcttctggaacataatccctgtgggtaagggggagactactgccttcaaattaattgagatggcctatattccaagtaaaacatttgtaataattaggttcataccaaaattattcctgaaacagatttcaaaacagaaaactacgaatgtaacattatataaatcagggaaaaatgtaaaaaataaaacaagccctaaatgttaactgctaaattattgatttcaagagtacttacattttgtttgctttctctggagtttcaaattctttccataaactatcaacctcttgaagtttcttctcatttagaacctgtaataaaatgtttaaatagttttatttaaatggtacaggtgaggcatatacagctgcattcttcaaatacaattttacatgtaaaatgaaggtgtagaagctatttctttcactaagataatgaactagttttcttaccctgcatgtaattttggtcaaattactagttcgaattgcccatttaacagctaaatggaattcagatctagtccagtcagctgtagtacagtggctattcagtctagaatctacctggcctcaagagatattcctgccccagccttgggccgtagctggagctatggggtcctagggggtagggcagggaacctttctttttatttttttgagatggagtctcgctctgtagcccagcctggagtgcagtggagcaatcctggctcactgcaaccttcacctcctgggtttatgagattctagtgcctcggcctcctgagtagctgggattacaggtgtgcaccactgcacctggccgagaacctttcttttaaaagagccattaatccctttacagtaaagtattgtaatcattaaaaactttaatttgcgccaagcatggtggctcacatctgtaatcccagcactttgggaggctgaggcaggcggatcacctgaggtcaggagttcaagaccagcctgatcaacatggagaaacccc

SEQ ID NO: 1880866 - DNA, 4001 bp, Homo sapiens
ggcaacaacaaaaagaggggaaaaacacacatagctctattcaacaaataatttgagatcctataatgtacaaggctcggtgctaaatatggagatatagcagtgtcaacacacaagtggtccctccatgttgtcacagctgatgtcaaactctctgttaggtacactggagttcaacctagagtagacgcgcataacaaaaaaagtgaatgtaccaattcaaaacattacaactgtatatagggagtaattagggacctaatctagtttcagtgaagaaagatccctttacgttaatttaggtgcatctaataattcttgttctgtataaaagtgctcttgcttgcctaactcaggaatttacactataacactgacaagcagtgccaagtactcttgtaaacactgtagctcatttaattcccacattaagaggaaaccaaaggaaaaaaatgatttaaaaaaataagaggaaaccaagggaaatgggttacaaagcattttccctagcagtctagctcctgagttcattgcataatctcataaagccttacatacctttcttactgtcttttccttttggtttctctagtttaatttcattgccaaagactttcaaaccagtgagttccaacgctttctccaggtcttcagcagattcaaaatccacataaccaaatttccttcaaggtggagaggagggcaaaattacaacaggtgaaaacacaaatcaaaatccacaatatgtattctagacaaatgtgatggtgcaaacaaagatcacattttaaaaagcacccctagtattagcaaaacaaagtcaaggctctgcaaactgcagctacagaacaaggtctcagcatgaagatatgacatgcacattcacgtttgaggtcttcatcatggagctaaattgcttataagaattcacagtagcagctgacaaaagaacacctataagcactaatacaggagaatcctgtctggataaaagtattcactatgatgactagacaggtctaatagtttcaggtacttccaagaaaataaacattattttaaattgagacggtgtctcaatctgttgcccaggctggagtacagtggcgcgaacttggctcactgcaacctctgcctcccaggttcaagcgattctcccacctaacaccaaattattaaaacttactggcagggtggctcacgcctgtaatcccagcacttcgagaggccgaggtgggtggatcacttgaggtcaggagttcaaaaccagcctgaccaacatggtgaaatgccatctcaactaaaaatacaaaaattagccaggcatggtgaagtgcacccgtaatcccagctacttgggaggcttaggcaggagaatcgcttgaacccgggaggcagaggttgcagtgagccaagattgcgccactgtactccagcctgagcaaaagccagcgtccgtctcaatacataacaaaaacaacaaaaaaacttactaaaaattattctgtgctataccaagttacgactgattatggaaattgcaacttaggggatctacagtttaattctaacttagttcactaatgctaatccttgaagatgtttacagtattcatgtttaacagtagcaggctaaagtaactgtgctaacaggggaaggaaaagcattaacagacccacgtgtatgtaacgtgcagtgaagcacttacctagtcataccaattctgacatccacaacagcaagatcatttttagcaaaaacatcgctgataccagtttttaattcaggagcagatttgttaaagtttaggtttccaacaaagagattgaaagccgtagtcggttctgtgcctgcacaaaaaaagctcaactcagtctacttgtagtgtggtaaaaagttagtttccaaagcaaaatttctatacacagcacatcagcacactacaatgtaacatcaggtttcagtattaagtccctttgttattcatcatttgtgctgtttatctcccccatatcccctaattctgcaagttaccttccactttctgtttcttggcttcaggagctgctttctgtttggccatttccttctttcgttttccaggtgcttctttgacaggctctggacaagatgtcaaacaatgtatcacacatcagtagccacaaacacttaagtgcctcctttaaacataactcatgtcgtatgtcagaatctaatttaagtaccttcctcctcctcttcttcctcctcctcatcatcttcatcatcatcatcttcatcatcttcgtcgtcgtcgtcatcctcgtcctcatcatcctcttcttcatcttcatcctcagccacgttcttggctttcacaggaacaacttttgcagctttctttcctttggctggtgtagtctccatagcttcttcttcagagtctgaaagagaagtcacctaaaaattgcagcaatctcccaaaaccaacatcggttttcaaatctaatgtaaagaaaatgcaatcctgtcaccatgtttagttaacagtcatggcaagaatagatcacttggggccgggcgcagtggctcacgcctgtaatcctagcactttgggagaccaaggtgggtggatcacctgaggtcaaaagttcgagaccagcctggccaacatggtgaaatgtcgtctctactaaaaatacaaaaattagtagggtgtggtggtgggcacctgtaatcccagctactcgggaggctgaggcagaactgcttgaacccaggagatggaggctgcagtgagccgagatagcgcgccattgcactccagcctgggaaacagcaaaagctccatctcaaaaaaatttaaaaaaaaaaaaaatcacttagaaacaaaatcctacattataaaaaacactaatagaatgtgctattgaaattttctcaagaggcacaaaaatcattcatgggtaattaagtctagcacaccacaacaacccagagaattcccacaaggattctaatctcatctccaggttgtcgtggaaggaatatgttgatcccagaatctcaagataccttgtaatcagaagcccagtaactaccaagacaactccttaccatcttcctcatcgtcatcgtcatcctcatcatcttcgtcatcctcatcgtcctcatcctctgaggcaggggcagcagctgctgctttcatcgctgctggttcaatttcatcttcatcctcatcctcgtcctcgtcatcctcctcatcctcctcactgtcatcatcctcctcttcatcactgtcttccttcttggcattcttgccattctttgcccccttggctgggatggcagcacccttcttaccaggagttgctaccaatgctttgcctggtgtggctcccttcttgccaggtgtggtaactgctttggctggtgtaactgtcttcttggcaggtgttgctgctgcctttttgcctggagtgacagctgctttcttggctggtgtggcaactgcaaccttttttgttggggaaacgaccaccttctttgctgaggttgcagcagccttcttgcctttcttctgaggtatgacgaccttgagaataaatgaaaaccaaaccagtaagtccagccccacacccaaaaagataaccatggtcccaatgagatgttagactctggcaatgcctctggttcaagaccacatgcactagacacattagcatgttaaactccaggcttctgttatgttgtcttaagtcagagcccctatcataaggtgaatacccagacataaggaactcttttgaacacttaaaaatacctctgaaccagaccctctgaattcttacacctcatactttcccaagccccaactttctcatctgaaaatggtaatagtatcatccttacatgtttaaggatcatgaattgctatgtgtaaattattcagaaccttacacataggaggctccaagcattaacttattaaatcatttggggctcctacagtgggtggcgg

SEQ ID NO: 1880867 - DNA, 4001 bp, Homo sapiens
cgtccagcctccgtcaggaacgtgcgggtcaggcagcttggctcattcgctgctctgtgcatgtctgaaagtgaccgcatgggatgattttggagtaacaaatacattttagtagggaggttctcaaatagggacttcgtaagtgaggatcaaaatcacaatattggtgtttacttgaaagactttaaaatttattttaaatagcttacaaggaatagtggttatatttatagaacattttataaaacagatttacacttgcaacaccaacaaaagcttgaaaataaaagtttacctaaagtaaaattggtggctgggtttggtggctcacgcctgtaatcccagcactttgggaggccaaggtgggtggatcacttgagttcaagaccagactggaggacatagcaagacctcgtttatattggggaaaaaaaaattatcagggtgtggcatgcacctgtagtcccagctactctggaagctgaggtgggaggatttcttgagcctggaagattgaggctgcagtgagcaacaatggcaccactgcactcaaaaaaaaaaaaaaaaaattgagagtcaataactgcaataaacttttttaagtataatcaaatgagttcaactgtcacgttaagatgccttgaattcttttgattttctagttccaatttctagctttaatatcttcaaatcacctgttaaaaagaagacagcaatgagtaacatcttagggtagaaagcagttatttcaaaagaaaaatagtttgagagcctaaaatgtaactattagaaataattaagtttattttagaaagctttaaagaaatggtatcgatttttattcttatagtgtacatatacatttacacctaattttgagtagcacactaaatgattcacattcgctgggagaatgatggtcacatgtctcttttaaacagtattttgaattacattccttaaacattttaagggtatctggaaaattaatgcataggaagaactttttacacatttgttaaaatttcagcaccctctgtctactaagatattttactgatttcactttacatcctgtcctttttatgcaatcactactgttcttatcaggaaaatccccaagatacttccaacagtacctgtataatcccggatctgatacctgcaatcagcccacacaaagtcctagtgttcccaggcttctcactagccaataatacagccctacatctcggcaaagaaaagcatgggttggctttttttcctaatgtttaaataaatgtagtgcaaatactttttttcacaactttgctgtacaaagagggcaagtctccagctgcatggctgattatgacacagtagaaattacacttttataactagtaatccaaatgttagtatttttcaaaatatggtgacaagtgttttaaaaaaaacttttaaaacttaagtacctgggttgttgtaggtggcgtttctagttgactattaagtcacagaaacacaacacatattaactacaaaactagttttggtttgagtcaacatcctgtgctttagcaaatcacaaagtagggtttataccaagcccacagaaactgcttttgactaaaacatataattacctcaagttctacttagtaatacatatatactgacttataatttcagccttcattgagcaaataaacttcaacatgctcaaaagaaaagactattgccaaactaagtgatcttactggggaatttggttacattgggtatttcatccccagtatatggggacaatcacctattcctgaaggtctattattatttttaaatttcagttctctttgggatgcctttcttgacagctcccatggcatgaagcttccaatcctgctactgaggtcagactagtggttcgcttcaggatattttgtcatcgtgtgcccatggagagcaaactgctgatggagacactgcaattcggccttttcttgtcatcattcctcagtagctggagggagcagtcttctgggaaaggctgtgtgttcaggatccctaaaaagatagcatgcggggaaattattacctgccaagtggtgtgtgtttttacacctctctggccctttagttttctgctgggaaacccagaacgccagtccagacaccgaggagccgaggaaacaggacagcaggcagggggctgcggagagcagcacagtcacggacactgcctccttctccatgccacccgcggtttccacagttaaatactggtccacatgacatgtgaacacatggctcctataatggttaggaggaaggtgattcatgtggtaaataatataacaatgaaacctgatttattatacattcccccaattctctgcatcttatcaacttaaaactttcagcaaaaactcttgtaatatttgtttcttttttttttttttttttgacagggtctcactcttgcccaggctggagtacagtggtgtgatcacagctcactgcagcctcaacctcttgggctcaagcgatcctcccacctcagcttcccaagcagctgggactacaggcagatgccaccacacctggctaattttttaaatttttagtagagatgagttttgccttgttgcctaggctagtcttgaattcctgggctcaagagatcctcccatcttggcctcccaaattgttggtgttaaaagcgtcaaccaccacacctggcctgtcacttctttatcatgttaattttcatctaaaaaaactatcactgaaaactttttcctttcaaagtactgaacagttttcttctcttgctaatttcttttttgctactaaagacttgtgtttctagagatatgaccgtaattattccaacctctccaatttataatttagtgttcaagcttttaaattaaggaacactatgtttgacagctgctgattaagaaatcacacttctgtaattatcaaaaacaatttaccttggtctgtcacagtattttttttttttttttaagagaaacacccgtcaaatttattgcagttgtccagtcagcaatggtgatcttcttgctgattgctgatcttgccattcttggaccccaagtgctccatgacctccacaatattcatgccatctttcaccttgccaaagaccacatgcttgcaatccaaccactctgtcttggcatcttggcagggcagataaaaaactgggaaacgttcacgctgggtccagcatttgccatggacaagatgccaggacccgtatgcttcaggatgaagttcttgtcatcaaatttctccctgcagatggacttgccaccaatgctgtatggcgtgtgaagtcaccactctgacacgtaaaccctggaataattctgtgaaagcaggaacccttataaccaaatcctttttctccagtgctcagagcatggaaattttctgctgtctttggaaccttgtctgcaaacagctccaatctgttaacatagttttatggattagatgagcagtcacttcttgctttccaggccccttacctcgaaggagacacagcccaagggctcgccatcgacagcaatgtggaaaaacatggtggggttgaccatggctggaagcagggggccctgggcggcagcagcatctgcaaagctcacagccttctttttaaaagtcagcttcattagctactgggaagaatgactagttaaaacattttcccctagcatttctttctttcttttttctttttgagatggagttttgctcttgttgcccaggctggagtgcaatggcacgatctcggctcaccgcaacctctgcctcccaggttcaagagaatctcctgcctcagtctcccgagtagctgggattacaggtgcccaccaccatgcctggctaattttgtatttttttttttttaagtagagatggggtttctccatgttggtcaggctggtcttgaactcttgacctcaggtgatcctcccaccttggcc

SEQ ID NO: 1880868 - DNA, 4001 bp, Homo sapiens
tatccccatgcaaatttacacagctcattgggcagcttttcaatatgggttttaacattttccttttgtgtgtgtggttaattttaagtttacttcctttattccaggaagcacccacatataatagacactattcaggttcttaagattaacataaagcaacttttattttatttaatgaaattttgtagctggagactcctaggtatgaggaagcctaagcggtaaaacatttgagattgaagcaactcaataatgccaggggaccctggtagtagattttaattttttagcactactgatttcttatgtaattgttagaccctctaaaactaaaagaatttatctccattggctcttctcaaaaatcaaacacgaaacaaaaccaaatccgtttaattacaagagacataattaggaattatggttttgctggtggttttgaaggtaaacagaggcccacattttgacttctgacccccacacaactacctttttaaggaatacatattggatgagtcccacttctaaatgagtattatcttgtataaattcatagtaactttatatggtgaagagcatgctcaactaattattactaagatgagaactgtccataaacagcaaggtggtttttttttcaagccaacttcaccatcagatgctgcaataaaatccaggaaatttctttaaaaactttttgatgactttgtatcaccaaattttttattttttgagatggagtttcgctctgtcgccaggctagagtgcagtggcgggatctcggctcactgcaacctccgcctcctgagtccaagcaattctcctgcctcagcctcccgagtagctgggactacaggcgtgcgccaccatgcccggctaatttttgtatttttagtagagacagggtttcaccatgttggccaggatgatctcgatctcttcacctcgtgatccgcccgcctcggcctcccaaagtgctgggatgacaggcatgagccacggcacccggcctgatttttacttttaaaagaggtttcaaagggaactagttaatagcagctactgcaaaaaggagttactggaaattctgagacagccaagcaattttatgccctccataaacagacactactgcattaacccagtggtgccatatatttcaaaatcaaaggtctttctaaattttttaaaagatattctaaattgcccaaccacagaaatgttcagtccactgtatcactaaacaaccacaggaggctttaatacataatgcacttaattttttctcagaaagatctgttttgtaggcaggctcaattttttattatgactcaatgtaaatccaacattagatacaacaaataaagtcccatattcataatttacattaactacataagctctgacagattctttcaatgctacctcccaaatccaaaagaactacataccagacattaagtaaccggtcatgtactgctccagataagaaataaagacctgtaattccatcaaagggctggctctcattaggaggtctgatggtagtgaacatcagtgacgaaactggcgttgcatgtcctgtgaaatgctagagaaagttaaatctcagttaggagagcagattcaaagcagggacaaaaattaatagtatatattatcaaaacaagccatatgtgatacatatcggaaaggagagctccacgatgaagtaactgttcaattcaattctaagcaaataaggttatttgtgctataattctcccactttttaaaaaaatccatctgaaaatactgaaaatttagatgttccttctaactcccatgaccctaccactccgcacctttgtttcttacattcttgaattaaagattcacttaattctatccattttaaaaggcatactttgggtgctcagacacagccaaggaattgtaggtcctcattttactctcagtgagtcgaaaccacaatattaaggcatcatcacagcaccaaatattccgtaagccctgagtgaaagctttttcctcctccaaaaatataatactaaatctccacagtcaaatacagtaagtggactaaatgctggatgtaggctagaaatcaaaattaccataatcatcacatagtaaaaacttttttattaagaaaatcttttttgagctaggcctggtggcaagcgcctatactcccagctactcaggaggctgaggtgagacatcgcttgagcctgggaggtcaaggctgcaatgagctatgatggcgtcactgcagtccagcctgggcgacagagagagaccctgtgtcaaaatctgttttgttttttaaaaggtaactttcttttttgtggatacatagttggtgtatataataaaatttaaattttaaaaaaaccttgtttcggctgggcgcggtggctcacgcctgtaatcccaacactttgggaggccgaggcaggcagatcacgaggccaggagatcgagaccatcatagctaacacggtgaaaccctgtctctactaaaaaatacaaaaaattagccacgcgtggtggcgggcgcctgtagtcccagctactcgggaggctgaggcaggagaatggcggtgaacctgggaggcggagcttgcagtgagccgagatcacgccactgcactccagcctgggtgacagagtgagactccatctcaaaaaaaaaaaaaaaaaaaaaaatcttgtttcttgaatattggttctgttcatttttccaatacgtttgaagtagacatgtctagtctctttaacatcaacaaatcagattaggaggctaacttttatccactaaactatttgatgtacctgacaatgaagaatttgtattcttaaaataatatcttatggttcaaacttctgcctttctctgtgtttactctataatttttatgcttacaaataatttgattcgctcaccctgtagacttctttggtctccaaaacccatagtttgattgttcgaccagctgaaagcaacatctttccatctgggctgatacatagggaactgacactgctattgtcgcctttccatttgctatattgtgaagagaaaaaaaagcatctcaatacatgagagaaaactttactcagagcagaaaataacaaaaaaacaaactgaacaatcattaaaaatatcgcctcaggtcctgtgacaattacattccctaaaagcttgtgtcaggtaactaaccctggacatactactgtgataaaagcttcattgattgcattccttaacacagcacaatctccctttggcaggcatgggataaagattctcaacaagtatcagaaaatgagtgagtgagagtgataagaatgtaaaatgggtagttgtacatcctgtgacccaggagatgaactttgcgaatgtccaggaaagttccatactggctagacctccccaagcccatcctaaccctacctcaattctcgctttctctggaaggctggcctttaattaattcccttaataacacaaacgatttctctaaagttgcaacccaaaaaggttatttctaccctaaatccacatgaatgtaccccaatctgacaggtaaaaattaattaggtacaaatgactccttttcactacctcaaatatgattagaagctggagtctttgctgtttgttactcatattaatgctgtcataggcaatagggaacttggctattcacttataagaagtaacagcaggggcagggcatggtggctcatgcctctaatcccagcactttgggagattgaggtgggcagatcgcctgagtccaggagttcgagaccagtctgggcaatacagcgagaccctgactctacaaaaactacaaaaattagccaggcatggtgtagtagtcccagctactctggaggctgagatggtaggatcgcttgagcccaggaggcagagactgcaatgagccaagatcgcaccactgcactccagcctgggtgacagagca

SEQ ID NO: 1880869 - DNA, 4001 bp, Homo sapiens
ctcaccgacactctaggtgtgcaggcttatcctgatgacaagagccatggacctcaccatgtgtctgaaaaccgcaatgttgctacttaaatgctaagcctttaatggtgcattaatagatggttaagtagcatattagcagcttaaatctacataagtcagctgtgtactgactgtacctcacagtaacaaattcaccaaatctgtatcttttcttctttgtaacaatgttaaatattggtatatctcagttctcaggtgtgattccagcagctatggtgagacccattgctgctcctgaatctccactttcatttgccttcactggtgtcactgtcgctgtcactgctgctgtcagtatcactgtcactggtcaatgcagttagattacttagggcttccctgttaagaaaagaaaatggaggattacactgcaattcaactgggtgctggggttctcggtgtctctgacactcacctatagcctgtcagttttgaaatcagaaaaagggaccctgcagttgcattaaactatattagaaacaaaaagcttctaacagtcaaatctataggctttcctgacttgcatgacaaatgaaatagtcattaaattactacattctgactttttgaaaggaaatagaagggatagaaagctatgaacattttgaatgggcagatggatgaaaggtctccattttacaaactatgcttcatggtgaccacttacttttgttcctggttgattgcaaaatcactcattactctctgggtgaggccctcacaaataggtaagctgaaggcacttgccagctctactacttcaatggcctgggaagggctgttagacacttttgcactgtccataagctcattcagcaactcacttctgtaaaagaaaggcaaagtgtgaactttctccagccccttcagtaaaacatttataggcaagatccagtgtaagttcagtaacagaattcccaacagtatttctggagacaaagatgaagtctaacatttatttttacttgtttccagtgaggttagaaagtctaaagggccaaatggattatcaacattcattcagtatgacttcatgatgatctattcaatgtagccccaatgtatgatgatccgtcaacacagataaaaaactgcttgcctcaggatgccctggatagtagggagttgacggtatgcttgcctaacagaagagtgcccaaatgtggtggctaaggctggtgaagaaattccaaatgtggctacttccaggctgtacccaaagagagctggctgatttcaacttacctaggaatcttattatgcttcctgaaaagccccaacattttcctgctcaagaaaggaaaaagattatgaatactattagaaaaacaaggcaatcagacactatagctgtcttctctctgaaatcagagactaaatgcccttttcttaactatactgtaagctcccaaagacacacatctgtgggctctactagctcccagccctgtgtgtacatgagaatcaccgcaggtgcttaaactccccaaacgaatctacactgcagttttcacaggtaaatctgatatgctgccaatgtcaagatttgctggtacaggttgaatattcctaatccaaaaatgctccaaaatctaaaaccccatacacttctggtcttaagcattttggaaaagggatactccaactgtatttgtcctcttgtagaggatcaccactgtccttctaaggagggaatccatcctgtgcacagctggaaaagaggcatagaacagaacctgctgtttccctctcttaaagtacagcaggggttcagtctgtcttagaattctgttatgaagtgcaggctcagattgaggcaacagtctcatgtaagtgctccccatcagcctgccacatgcaggacaaaggagaaacacatacattcagctcccatgactcagctgaggtccgtacccctgcgccaatcatcacagcctggttgtatcaagtgtgtgccaaactgcctgcgctaacaaccaaatgcaaatgtcatacgtctctgtcactagcagcatagttgctagagagacacgtgtgagccacacctcaaagacaagccttcatcatcttttcctggagatagctgactagcaatcagatgttcaaataaagctactttcttgtacaaggagccatgcacaagcaccccccactaatgacttttagaacacacatttatatacaaaacaaaatacaggaaaaccacctgtcactacccctacaaaagatccttttgctcatttttggaaacatgaatatgcataaggttcccattcacaaacactaaaaattagtatgtgaatgaagtgctgataaaaacataaccagaacacagtggcaccaatcaaggacgggttgtggtcaaggccaagtttagttaatgtgcgtaaatgccagcttccagaagtctaagtacacagcccacattttaagctggagagtgggatgggagaagcatccaaaaatacttcaataacccaaatgaccaaaccattttcaaaactacgtttctttgatcatatatttctttgatctttagttcatttaagtggaataatgaggttaagtgacttacttgtccatagacacagaaagtagaaagataattctcagcgtatggtttgagagaactatgccttatctcaactacatcatgcatactgtcttcttccaaaagtttgctttttagttggtatttgcaagttcccgaatcaaatacgtgttatgtggccaaatgaaagaacctctaccagcgtgggccaatgttttagattcaaatacaaaagcttctaaagtgtatacttgtggtactgtactcaccaggcttcctgagttctcccagcccttaaaaagaggatagctatacagttgagagaggtggctggccaatcctgagcagtctgtctgatgggttggctttcatacgcagatttgatatcagcagcacagtcagcaaatgccacctgaagctgagaagcttaggagtcagcagaactgcctaactgattttatgagaatttcagttcaggagactaacacaggatccttaaaatctgagcaatgcattttaccatttgaatatattatgtgtatagcacacaagtaatttaataaaaaaaggaccctgtcctaagtattttgattagccacaactttcaaattcagctatgcatttcctttgtagatggagatttttaaaaaagcaagctgaagacagaagctaatttcatgttgcttgctttggactacaggaaagagggtaactttaagaacagatttctgctaagggcaagatatgtttagatgtatcatcactcaaatatgggtttgggtagcagaactctccaaaatggcagataaaaccagggaagctagccttaagaagacctcagtatgggaggatatactggctggtgagtttcaggcctacctctggtgggtgcttgtcccttgccatgagcatcaggatctcttctctcaggtcactgcggaaagtatgaccatattctttactatcttgaaacaagaaaggaacaaggagtgatcattgttatgtaaaaccaacacacttttgttcactgtcaacctattttttggtaggtaaaaataagttgctgttatttattctaggcttatcccaggattccagaaacccaccaggattcacagtggaacaaatgtaaaagccaatgcctgggccttgctccagtgacgtgttcatcacggcatgtgcactacatgggagcagccaccagctccacgtggttaagacgttgttttatagcacttgggaatttgatatacttttatcactcattagagcagtcgtgtgaagcaggagggcgggactagagcctactgactttatgatacagtagtcacctagtgaaagatacagaatatctatttcattttgcagccaagttatacacataaga

SEQ ID NO: 1880870 - DNA, 4001 bp, Homo sapiens; identical to SEQ ID NO: 3772

SEQ ID NO: 1880871 - DNA, 4001 bp, Homo sapiens; identical to SEQ ID NO: 3775

SEQ ID NO: 1880872 - DNA, 4001 bp, Homo sapiens; identical to SEQ ID NO: 3791

SEQ ID NO: 1880873 - DNA, 4001 bp, Homo sapiens
cctcggccgaagcccattggtacctgaaaatccaactttgcagagattaatgccttaggagttcctgagctgtctgctagatctcaacagggttcccggcctcggtttccagtctctctgattctaaatggagtcccctcaagggttccattgctcttggcttcaggaaattaccagcttcatacagattcacttgctcccagagcctccttaggccaaggtcaaccaaacacaacccaatactcttgagctgagcttgccttcacttctgatccttcctgcctttgttttcttcaatcttctcgctcagggaccttttttttttttttgagacgagtctcactctgtcgtcaggctggagtgcagtggcacaatctcggctcaccacaacctccgcctcacaggttcaagtgattctcctgcctcagcctcctgagtacctgggactacaggcgtgcaccaccatgcccagctaatttttgtatttttagtagagacaggttttcaccatgttggttggccaggatggtctcaatctcttgacctcatgatctgcccgcctcagcctcccaaagtgctgggattataggcgtgagccaccgcaccaggccactgggggactttttaattcattatttcaaagcctgtataattatctgactccctattgttttctgggatcatgaaaataatgagccccaaactggaatttagtccttccgatgcccccagccagctgtgtgaccctgggaaagtaacttaatttcgctaaacctcagtgttctgaggaaaggtcatcattaaggtatttttaggctctagaagccctaaactatgtcctgtcatttcagagttcatgttgggtctggctttgtgtggcccaaagccccccatttttttttaagacagagtctcgctctgtcgcccaggctggagtgcagtggcacgatctcggctcactgaaagctccacctccaaggttcacgccattctcctgccgagtagctgggactacaggcacccaccaccacgcccggctaattttttgtatttttagtagagacggggtttcaccatgtcagccaggatggtctcaatctcctgacctcgtgatctgcccgcctcagcctcccaaagtgctgggattacaggcgtgaccgaagccctttttatctgcataggtctgctctaaaccttccgctggggcaggagctcctgcgcttgccagtcccacactcacccacctgtgacacactggcgatgaaagcagtctcctcaggtgaacacattttatgttgcagtcacagtatgagcttcagattgtcttttaaaaatacttttccttcttccatcctaaaacaaaaatcacatttaatgagcacattaaattaattaatctagagaaagattcagtcacctgtttaacccaaccaattggggtttgggagatagtctgtggttgccattgccatgagtttgagacaaatgttagttttctgaacagctgttatgttctcagggaaaattatctgccaaatgcaaaggttcttataaaagtcaagtcaacccccaaactcccctcccacagtgcgggagggcaggctttgggggaaggggtaagctactctgagatggtagcaggctctgggccatggtaaagccttcgaagaagctccaaatcttcaggaagctgacctgaagatgaatgcgtggggaacatggatttttgaggtgtaggagtagggggtatgtggaagccagtgacagagctgagcgtcacatccagggtatcttagagcaaaacaggtagctcacatggacccaggaacacgccagcagagaggtgtctgaaggcagcgctcaggtcgcagaagcatgaggatctggctgtcaccagccccgtagccagggctgtgaggaccagggcagccgctgtcccctgcctagcctggcagcctgggatgaaggaggacaccaggctggtgtctgcagagaagactgtcccttgaagccctgccataggagccaccctggcttttatgacctcacaggaggtgtgggtcactgttctctgtggggcctgggtccagctggaggcccaagccaggctcctagggcagagggcaaacggcccctccaggagggagccgggagattacgcagctccatgtaggtccacgtttaggttgggaggatctaccatgaagaaggtcaagaagaaaaggtcagaggccagacgccaccgagactccacctcccagcatgctagctccaattccacctctcagcagcctagccctgaatccacaccacagcagcctagtcctgaatccacaccacagcagcctagccctgaatccacaccacagcattccagccttgaaaccacctcccggcagccagcattccaagcccttccagcacccgaaatccgccgctcctcttgctgccttttatctccagatgctaacgtgaaggcagcccctcaatccaggaaagcaggtgggctgtcttctagcttcagcagttccagccttcctgctgatggagttctgggtcatcccaaaggctggttcttgtaggatagtgatgcatggttaacgtgtatcctggagctgtgctgtagagtgggaaggtttttgtttttgtttctacccaagagaccaggattcctgggttttgtcatttctcatcatcctgagtctcactgaagacagccacacatacatataaacatttaacttggttccatagtaatacttgctcactaggaatcagcagtgccatgcaactgctaaaaaataaaaaccaaggatgcatttatagaagtatatggtttagaataagggaggtgatgatactgctttattctgtcctcatcaagctatccttttgggctgtaaaagatgcctgacaaactagtccaaggaagatagtctgggttgatggaggatgagaaggatcagggagaccatttagtgtatgacagtcaattgaaggaattggaggatgtctgtctgtcaagtggaagatgtgaatagacttgttccttattgtcctcagagatctaagggtctgatgtggtttggctgtgtccccacccaaatctcttcttgaattcccaggtgttgtaggaaggacccagtgggaagtgattgaatcacgggggagggtcttttccgtggtgttctcgtgatagtgaataagtttcatgagatctaatggttttaaaaaagggagtttccctgcacaaactctcttctcttgtctgccgccatgtgagatgtgcctttcaccttccaccatgattgtgaggcctccccagccacgtggaactgtaagttccacaaacctctttcttttgtaaattgcctagtctcagatatgtctttatcagcagtgtgaaaacagacaaatacaggcccatggataggatagccagacaaaatacaagactctcagttaaattttaattttagtaaacaacaaataatatttttagtatgtgtgtccccagtattgcatgggcatcctatatttttatttgctaaattagcaatcttacccatggaagacattagtgacagaaagccttcggctcaacataaaaaacttcccaacaattagctctgtctgaaaatggaatggctgtcaggaaaagtggttccctgtcttcttgggagccaaacagtgtctgtataagcattggattgtgtagagggaattcaagtggagttcaggaggtgggctggtttatactactaacaataatggtgatagcaaactaacattatcactaagcatttactgtgtacctagcattcagatcaggtgtcttaattttcacacgtgataatcctataaaagttcttccatattatctccattttatagatggggaaactgaggctcataggagtcaaacaggttgctcctgagcagacgctggtagccctgagaagggaaacccactctattctgactccagaaccctcacttta

SEQ ID NO: 1880874 - DNA, 4001 bp, Homo sapiens; identical to SEQ ID NO: 3816

SEQ ID NO: 1880875 - DNA, 4001 bp, Homo sapiens
tgggaggctgaggtaggaggattgcttgagcccaggaggtggaggttgcagtgagccaagatcgtgccactgcactccagcttggatgacagagtgaatctgtctctaaaaaagaaaaaaaaaaaaacgctgctgtcctggatttgtaagtagcctgagtgactctttgctagtcactattcagaagcttctctgagatcagccactgacttggagagataacagtaaggctttgagatctagaggctgatcttagtctgctgtttggagatctctgccttaatccagaataatagctgaggatgtctctgtggctgatgaagaaaaggaagtttgcaggcctgcttgtcttgctgcccaagtgggtcaacctaatgtgagtggagtgaatgaggtagtaagggcttaacagatgtcttgtgattctgggacaggaggcagcttcaagttccttttcttcctcacccccaccttacacccatccttggaagctgggatactgctgactctcatggcagccataacgctatcagcgcctggctttgccgacaaggggaatctggaagagaaggggaaggacaggggagacaaagagaggtaaagagtgttgcatcaagcacatgtgtcagaagtgttcaaaccagagcgcctccattttgagtgagggctagaaaaatgaggctgggacttgctaggctgcatttcctgaaagctaggcattcctagcctctaggtgtttatggttaagagaacaaattaataatgcttactaaacagacccagacttgagagagtccagatatcccgatatctggagaacaaaggcattcctaattttgctttaaaaataataatattgattattgcaaaatatagtaattagggaaaattaatcctttatcacaaacccttgtagcagaagacatctgcccatatatacaagcattacaagcattgtaccttagttggatatgtccctcctcttattttcaggaatgccctgctggagtgcagtggcgatctcggctcactgtagcctctgcctcccgggttcaagcgattctcctgcctcagccccgtgagtagctgagacaacaggcttgcgccaccacgcccggccaatatttgtatttctagtagagacggggttttgccatgttggccagctggtcttgaactcctgacatcaggtgatctgtccgtctcagcctcccaaagtgctgggattacgcgtgagccactgtgcccagccaccactttactttcttaataaacttgcttttactttgcactgtggacttactctgaattgtttcttgcgtgagatcgaagaaccctctcttggggtctagatcgggacccctttcctgtaacacatgggccttgggctgatctccaagattaagagggcaagatactcagctgcaagggtcagctgtcgctgaccccagcagctgctctgccttggccaacttaccggatttaaatcgcccagtgacagcttttcctccagtattttcaaaatgctcccaatatcctcacgttagaacaatccagaaatagtcttatggtaaaactcttttgggaaatgtgaaagtagagtcctcccaccttttcctttgcaacgcttttgccccaacctcgatcgcccaggcagcacattttttccggcacccccaccaagggaagaacagagacatctccaaaccagctgccctgcgccaagctgttacaaaatagagccacaagtctcccggtttatgcaaacatatttggctcggtgtctaggatcttctttttcaaactcagaaggagatcacaggcacacggccgcggtgctgtgtacgcccctctgaaaggaagttctgcaagtcgaccgacttcactggcttcactgaagtccggtccgaaaccaccggaaagttgcaggcgcacagtatacgttcagctgtgtccaagaaataacctatcaatcactgccttaagctttgtttccttcctgaattttcttattttcacgaatatttatgctttcacaaactgtatgtcatttcctctccagaaccaaggggggctcgccccagcctggcccccgccccgggtgcgtccctgcagggggcgccctgctctggcaatgcccaccgcaccgcagggctgactggccgcgcgcccgggggcgggggccgccgcggaggcatcgtgctctccgattggccgtccgcgtcctcgtgacgtcagaccccgcccacgcgcccctcctccgcatctgagcgggggagcggcggcccccagctgaatgggcgcgagagcggcgctgggggcgggtgggggcgcggggtaccgggctggcggccggccggcgccccctcattagtatgcggacgaaggcggcgggctgcgcggagcggcgtcccctgcagccgcggaccgaggcagcggcggcacctgccggccgaggtacgtggcgcagccccctcctcggcgtcgcgggggcccgcgggctgggggctgcggcggcgacttgtctcttcccgggccggctgggcgcggcgtttccgcctcgaaccccgcgggcagcgcccagggcacgacaccctcaggcgagcccggctggggcgcgggcggagggtcgtggtcccgggccgtgtggaccgggcggggggtcccacgcaggtgtgtacgcggtagagggtggggcggaccgccgggtgtcgggtcccgccgcagtggccctttccccgccgctttccgctgcagctcgggatttaattcattgctggaagcttcggagttagcagagccgagttaactcgttttcctgggatgggcttagggaaccccctgcaaggttactagcagctcctgaaacctctctctgcatccatcggggaggcgtgatgtggggccgctggtagaaatttgccggtgaccttccctgcaccctctctgcagccagccttgcggagaagacaggttttggcgaccttttgatttcttctgaattgtaagccgtggcttgacgcgggtgtgcattcattgtacgccttgcgtgtgtaagtaacgcagggttttccgagagcatccccgaggagccctgcccttgcctcacacccgcttggtgaccttggcagacactgatccccctgtggggctcgggctcatggtctctcctgagaagcttaccctgccgatggccgaggtcccttccaggccccgggtttttctaatcataaaaaaatacgtttacgagggtagaggatcctgcagaatctctagctgactcggaagacgaattttatatcctcatgtcttaagtcatgcatgcggcttttgcttaattaggcatcgttcatttgaaggggaaaatggttttatgtgctgcgcttcatctggcaccagtggttgcctgctcctcgtggcagggccgtgctgggtgtcacagagaggaaggagactcatctcctgccctctggtgtttagctgccctcccccgggcttatggctgctaatccttttccacggaaggatacagctgctgaaactgtggaagaggaatccatttctgctgcatgaaggggcacagacttgaatacagtcaggacaggttgtggtttcacttgtgtaatcctgagagcttgacagcttcgaggagtgtctaacattgctagtaacagagcctagaagcacctgaattccagctgtcacttggagaaggagagattcatacgaactgcgagagcatataaccagcatgtcttgagtcttttacccatgtgcctgttatatggatgctgctgtttttgtaagatgaaatgacccttggatattctgggttatgatcagcatttcttcgtctaggcgagaaaagaaacaggtgagataggaaggcatgaaggggctcatggaagagagagggctgacaggcagaaattttgagagctcacatttacgactatttggacagttcttataattttggcataaattgtaaattgttgcat

SEQ ID NO: 1880876 - DNA, 4001 bp, Homo sapiens
ctccatctgacaaatctccctgaaatattcctgattgagaagtctcccgaaccaagactcttcctagttagggacagccaactgggatgccccaggagccaaactgagacagacaccccatggtggagctacagacacccaccatgtggctacagaatcagtccggagaaggaaggaggcactggcagcacctaggatactcagcaacctgccaccccatgatggggctatagctacagacactccatgacctggctacagcgccccgctatggagctacagataccctgtgacagggctacagttatgggatgtctccccaggactatttctccattgcgattaagtccatgcatattgggctagcagtgccccactggcagagacggtgccagagttagcccctagtccaagagaactatgtggccgcttaggctggcctctggatctgtcaccagaggtggggctaccgaaccatggacaggtagccacaaggggtatcccagacgaacccccaaatttgtaaccgtacaatgggttcaccttgcccactgcctagacagagccgatttatcaagacaggggaactgcaataaagagtaattcacgcagagcccactatgagactggagtttgtttcaacattactcaatcagtctcccttagcattccgggatcagagtgtttaaggataatttggtgggtgggggaaggccagtgagtccagagtgttgactggttgggtcgagatgaaataatagggaattgaagctgtcctcttgcactgagttggttcctgggtgggggccacaaggtcagatgagccagtttatccatctgggtggtgccaggatccaaccagtgcggggtcagcaaaatatctcaagcactgatcttaagagcagtttagggggatcacaatatcgtagcctccagctgcatgactcctaaaccataatttccaatcttatggctaacttattagtcctacaaaggcagtctagttcccagataagaagatttgttttgggaaagggctgttatcctctttattttaaactataaactaagttcctcccaaaattagttcacctaagctcaggaatgaacaaggacagaagcaagatggaattggttaggtcagatctctttcactgtctcagttttaattctgcaatggcggttatcactgggagcccccagcccccgcagagacatgcggagccccgcccccaccctgcactctaataaagaagggggccagcgtgccggcctcttaaaacaagttaacacctggcaggattctaacaggaacctggccaggtttctccgcggggcggggctgggacggccggaagatggcggcgacggcggcagccgggtccgagggtcactctccaatgcgcccttgacggctctcgccgccgagccacctaccttgctagcaggcggcctccgcgcatgcatgaaggggcaggagggggcggtgacgagcacttcacggcgccaatgagcacccaggagcccaggtcgcgcccaatcacggcccaggtggcggagaaaaagtagggtgcgcgcgcgccgcgcgtgtggcagtcgcggaaggcgcgggagcttgcgtgctgctgggcctgagctgtctgtctcgtttctgtccgcgcgccctgcatcccggccccgggcgcccgctggaggtcgccgaggagccacagggctgactggtctgctgcccgggcccaggagtgcctggtgtagcagtcgcggagccatcccggcgtctgctgccatgaccgactctcccctcagaggagactcttcctcagcggtggctgcagagacagatgagcggcggctcctggccgcgggaccgtgagacgggttcgtggccggccatttagggggacgctgcgaccaccgcctgcgcccctccggactggttccttgggccccggaagctcgcggcgggccctgcgggaggcggcatgctcccgcggaggctgctggccgcctggctggcggggacgcggggcgggggcctgctggcgcttctggccaatcagtgccgcttcgtcacgggcctgcgcgtgcggcgcgcgcagcagatcgcgcagctctacggccgcctctactccgagagctcacgccgcgttctcctcggccgcctctggcgccggctgcacggccgtcctggccatgcctctgccttgatggcggcgttagccggcgtcttcgtttgggacgaggagaggatccaggaggaggagttgcagaggtgggcgctgcggcgagctctttctgggccgtggggtgggggggcttgtgaaccctggggcctgccctgtggtcgttggcccttgtttacccggtggtcttttaattggcaatacagtcgattgaacctgcttcagcaaaccgcgttgttatttgtctctgtgtgtcaatttgcatttgtcgggttataaaatagaactgaaagtgtgtaggctggtgtgtaggagggagactttgagtggggcgagcaagacagtaaagaaacaacactgtagaaatcaattagatagcgaaggcatggaggcccttgttcatgtaatctgtaatctttaacacaaccagaaaggtgcaaattcaaaacaaattttaaatttggcctaagggtggtgggctgctatttgcaaaatgacttcaatccagatgggactcaggcctgtgagaaaagccaggagagccctctgtcatcgtgactcgtggcaaaattgagagcctggaagcgattttgtccaggttacacaaaccagcagcccagacatttgaacctgtaagaattaggtcagatttttgcgacgttaactagaactttgggaatagtgtcccattagactctgaagtcatgctgtcgtcatcaaaactgtgaaaagcccagtaccattgattacgtttgttaatctgtagttctgagactgtagtttccaggtaatgtcatggggaaactttgctttggtttttggtttaccttgtgtctgtattttctttgcaacagatattcttaaactgtgccctccctgcacagaaagtactttgccgtgatttcgggaaccagagacaatcccctccctccgcagattccacactcgcctgtttattcttgatatttcctccacagggaaacaacctgttattccacattttttgttaggttaaaaatggaaataccccaataaagtttataccatggcctgtgtgggaggtgtaacacccagatgccaggcagctatttgtgccacactatgaattgtgggtaaatgcaagtctatcttaagaactgggaatacttttcctagcaggaaagataacttttataaatgcaacttaaaataataaccacaaacaaccttattcacaaaaaagttaagctatcaaagcgtgataggtattttgcctagttcctattagtattcttttgctacttggccattggttataatcacagtctcttgggtgtgggaaataaaagaataggaagaaaacttctaagttgacaaattatcattaacttttaattttcatttttgatgatgaaatgtccgtgttccacttttttttttttttttttttttttgagacggagtctcgctctgtcgcccaggctggagtgcagtggcgcgatctaggctcactgcaagctccgcctcccgggttcacgccattctcctgcctcagcctcccgagtagctgggactacaggcgcccgccaccacgcccggctaatttttttgtatttttagtagagacggggtttcaccgtgttagccaggatggtctcgatctcctgacctcgtgatccgcccgcctcggcctcccaaagtgctgggattacaggcgtgagccaccgcgcccggccgtgttccacttttaagttgaaaaattatcattaactttgaattttcagttttgatgatgaaatatccttgttccacagttaagtttgagaggaaaatctccag

SEQ ID NO: 1880877 - DNA, 4001 bp, Homo sapiens
aacccaagtccattaaaactggctgcccctcatctccaagcaatatattggtgggcttcaagtctctgtagagaagtagaagtgacctatgagcatctctggacaggaaggctggaatcccagcaagcaaaagaatcatacaggctgtttcttgggagaacagagacctcccatgtctcctggtgaggctcttcctctgggccccagcaagcacacagggtcctcccactgacctgtgggcataacccttggcatgaatggcctcaaggcctctgcagatccccagcagcagccaaaggatttgatcctcggtcaggaagttgcctttgtccttcagcctttctatctcattccacagcgtacctctctgcaacacaagtttccctacagttggagatgtttttggagcctctgctccttaggcctgatcccttccctatgtcaaagcctatcagccctttcatgatacacacctcaaactcaaaatctaaagtggccaaacccaggacatggtccctgcttcctaacatgctggactgctcacacagcccttgagtaggtggctctgctgcaaccccctccataaccaggagtctttctgaccttgaagaatggtagcagcagccaggcctcatgcttagcaccccgttccctcagacagtaagccacgaggcgaaggatgttggggtgattgaagaggcgatgcatgtcggcttctcgctgggcctcctcccggtcctgctgctcgtgacacaggattcgcttcagggcgtagaagtgtccatcatgtaacccttccactaggtccacatagctgaacccactgtgggccaaaggggtcaataaagggccatggtcatctcccacatggcttggacctagagaaatttcctggtggggagtggggtgtccttcccatttagcagaaaccttcccaagatgtggctctaagagaaatctgaagaatattacaccgtgagctcctcaggagcagagatatagaaatctttgaggtcctatggtcgtaatagagacctctgcacttgacagatgctaaataaataatagccaacacttatcaagtacttgtcaaccccgcattgggtgagacattttatacacattatctcatttaatcctcacaactccatcagtgagggataataatcatctccattaagctgatgaaaaaaacatggtttatcaaggtcacacgaggtggatttagcaggcctggctccagaatccaccttcttgatactgtgtagctaggttctgtcaggtgagagaggacagggatagggataaaacccttgtgccccaagcatatgcacaccgctgtccttcaatgatcataaacttgaggactagttaactgacttccaaacactcacccctcccccagtttctggatgaagaggtagcgcttattgtcaatgatgacagttccccgagagcagacacacagcgcgtggcccataatgtctcagtcatcctcttcaaggacggtctgaggctaccgaagagctcgtccagggtgagtgggctcttccaggagatgcgctgggggcccagcggatcatgctggaaagaaaacaacggcagggtcacaggtccggcacaatccagacgacccatgaagtaccaatgcggagagctcaggcccaggtctctggaacctacactatagtgtagagaaaacaggccctgctccgtcgccagcttcaggggtggggtcaggcgccttacggcctcaggacacacagcggctaccgggccacttcctccaaccccagcccatctttgggcagcccccgctcccacgcccatcgcgccgcaaaagcagagcatagcgtagtttcagaggacgtgcgaggctcaggcccactcctggcagggcccaccccggtctaggagcccagagcccgggatgggccatctgcactgccggactgacctggctcgggccagagagaagcgccaccgaccggaagcagtgctgacatcatcagtccgcgccggcgtaacggcccgcggtatctcagcaaccgctgggcatccggaggatgtggggacgcggagctgagaggctccgggctagctaggtgtaggggtggacgggtcccaggaccctggtgagggttctctacttggccttcggtgggggtcaagacgcaggcacctacgccaaaggggagcaaagccgggctcggcccgaggcccccaggacctccatctcccaatgttggaggtaggaggcttcatacctctggcgctctggggcagaaagcggccaactacactgcagcctggagggggatccagtgaggggcgggtctggtggcctggtctcctgatcccgtacaaccttctgggctctggcctgtatcccactacccctagtctcagtggttaagagctcaggcttgtgaaccagacttccagtttctaaattgagtgttaatagcatgctagctgtgtaacctcgggcaagttacttaacctctcggatccttacttttggtagctgtaaaataggtataatagtacataaggttaagtagcttaactgtgaggccagactgactagttcaaatgacagctccgttaacgtagttgtgtgaccttggacaggctacttaatgtttctgtcctttcctctcctcctctgtaaaatggaaataattatctacctcatggagttgaagattaaatgagatgtacagtgtttaatacaatatctgacacatagccttcagtacgtgtcaataaaccgtaattattattaccctgatcttcacatcccattcttgagactgtaaaggcaaaaggaacggaaattcacagattttcgagctttggcacaaagcagttgtccttaatatctgttgcggaggcaggcaggggtaagctggagaggggtgcacttccaaagaaggtggaatggccaggagggaatggctgttttgctgaaacaggactctccaggaaagaggtccttcttgtgacctggttcctcccttccacaccccggatcaccctgaagattttccaatggtttcccctggttctgaacctgttttagccttttggttatgacattgattcatccagatttaacctactatatacccggccctgtgctagaggctgaggatttgagatgaacagggcactccctgtcctcagggagcccagtcaagtaaagccatgcttctcaattttgaaggtgcctaggatcacctgggaatcttgttaaaatacaaattctgattctataggtctgaggtaggatctgagattttacatttcttttgtttgtttgtttgtgttttttgagacagagtctcgctctgttgcccaggctggagtgcagtggcaggatctcggttcactgcaacctccgccttccgggttcaagcaattctcctgcctcagcccctacccccacccccacccccacccccacccccaccctcggagtagcttggaatacaggcgcgtgccaccaggcccggctaatttttgtatttttagtagagacagggttttgccctgttggccaagctggtcttgaactcctgacctcaagtgatccacccgcctcggcctcccaaagtgttgggattacaggcgtgagccatcgtgcccagccagattctccatttctaacaagttcccaggtgatgtcgatgaagctggttcgtgaactgcactttaacatgatgtagaaattttacaaactagtagagtaagggggtggctgcaggctggagaggaagtccaggctaaacgcctggcaacttgaggtggtttccgcccccttgctcgctgaggttccctcccaggaatccgacacgtgacggtctgtccgccgtctcagactagaggagcgctgtaaacgccatggctcccaagaagctgtcctgccttcgttccctgctgctgccgctcagcctgacgctactgctgccccaggtaagatgagacggtgaaccagc

SEQ ID NO: 1880878 - DNA, 4001 bp, Homo sapiens
tcctgccctaaccacatcagggcaaggctttacccaatgccacatctttacttggccccttcctctcccctatcttatactcctatacatacccttactgtttttttttttttcctaaagagcacccttccaataaatcacatgtacctgaatccttgcctcaggctctgccgtagggcatttaacctgagatttcactatctatagcaactccagttatatcttcagccagagtgggcttccctctgtgctctacttctgacagcccccctgacgtcaacacttagtggtctaaaggtcacctcaaacttaacatgtcccaaactgagctgtagtttaacccgcccacctcctgcataagctccatgcctctccctctcccaggccttcccatcccagcacaagaggccactcagttgataaagccggaagagagtcacccacgagtcatcacttcttcttggatctcaagtaattttacctccaaaatacatctcaatttttctctcactcttcatttgcactctcacctccttagtccaagctactttctttctcatctggaaatggcaacacacgcatcttgtgttccccagtccatttttgacccccttcaatgcattcaactgcctaatagatgccctggcccctctcagacctggtcctctctggacttccctgagtcagttcttggggctggcatccacctgatcattccagccccaaagcttgtctcctctctttctctcaccccacatttatcatctgtcagtaagtcctactgctcctgtctgcatatggaaacgttcctctccatgctccctgttatgggctaacttgtgtgaccccaaaattaatatgttgaagttctaatccacagtaccacagaatgtgaccttatttggagatagagtctttgtagaggtaatcaaatagaaatgatgtcattaggatggctctaacccagtatgactgatgtctatataaaaaggcagaatttggaggtagatgtgcacacatggagagtgcaatgtgaatatcaagatgccatatacctgccaaagagagaggcctggaacagtgcctttcctcacagccctcgaaagaaaccaagtctgttggtaccttgattttggacttctggcctcccaaactgtgagacaataaatatctattttttaagccactgagctggtggtactttgtttcatagccacagcaaacggataatacattccctatgtaataatcccagtagctcagaatttcagagtactaattccttaatctaaattaggacccccaatgttctctcattacaccctctacatttctttctaagatcttatcacaggtaatcaaaattctgtgaaatgatttgtttaatggtttaatattcttctctagactgtactgtaaatccctgcaggacaaagataacaaacattttaccgatcactatgcttggtgccagtctctggcatttagaagattcttgataggtaattgttgaatgaaagaaaaaaatgaataacatggatttttttaacctgaagaatctgctttgactagttatatgtttttgatataccaactactctatctctaaaaaaaatccctatagttttatagaagaatcttagatcctttgccattctgtctgatttatagacaaggacacttccttcctctgctctttgactttactacatgaccccataaggtgctgatacatgctccaacttctacttccctcttctcatgtccgtgtacatacctgctttggggtaagaagcaatgagcaggtcatcaggcttggcttggaagttccagatcttatcccagaaatcgcacattttcttttgaagaatgattccattcacttgggaaaattcttctgggggtaacaagccccattctaactcacttgtctcctccaccttatcctttagccattccttccacggtggtcttgggcaccagcaggggaaagtaaaaagtaaatgaaagttgagattcacacgggttttatgtattcagtgctttggacacagagctctggtcattcattacaggtaaatatgttcaggcaaacaaagacacaatttgcatggctcctgggtagaactggaacaaaatcttaagcattgtgccagaataggccttactctttctactcgtgagattctggcagggctgcacctccatagtgccaggaggaagaacagcagtggggcaccagtctaggggcctgcccaagtccaggaggtcacttcctggtcctgtggatgcccatggagatggggaattgagagaaaatattgaaggaatgcctggagcaagcctccaggaattcccttccctcttccttctcttcacctggagttactctccctacagaaaggaaagtgattctcccttctgggtttggttatccatggagatttggagaaacaccttccccagacccagggagacccacgcttctattgacatatcacatgctaggtgcccatgttaggtgcacatgttgtcagctgggacagtccagctgggaattccatctcaacttccaagactgacttagaaagttacctaaatctcaggtctgtttctgttctgtgagaggttagactgcaatatttgaggactattactacaatgagttttttttttatattgaagcacagtttacatgcagacaaatgcataaagtgtaagtttatgtcttgatgaatttatacttctatatgcacccacataactaccatctagatcaagatataggacattcccattgcttcggacaatttcctcatgctccttcccagtcaatgctgcaccagtgccccacactcaacgcagaggctgttctgacttttgtcaccatagtttagttttgcctattcttaaacctcatattaatggaatcatacattatgtactcctttgtgtctggctttgttctttcaacataatgtatttgaaattcatcaagtattagcagcaactatcagtagttcatttatttctattgctatatactgtatcattgaatgaatataccagaattttttaatcgattcttcttttgatggacatataggttgataccagtttttggtgattatgaatatgaatagagcttctatgatattttcacacttttttcttggggtgggggatagatgcattctctcttgttctcttgggtgtatgactatgatttgaattgctggattattggtatatttaaccttagtagaaacttccagtttctccatacatagacaatgacacttcagttaatgacatcaaaagagctacctgaccacctgtccgaatgatctctaagtgctttttctaattctgagattctggctccctggtagtgtgggaggactggcagccccttatttatgtcactcagctgctggctcagccaggtgtgtgccttatcggcgcagtaagttccactcagtttgaagtgagtggctgctgaacaatgggccactgaacaaatgggccctgtcactgtgttggagaggcaggtttttccagggaccacctctgccaggatttctctcagcatttagattgactcaacccaagcaagggtgcttccctcagtcatgttgaagggattttagagctcatactactgttcatttactttctagaatgtgtcatctggcatgctgggcattggcattaaccacacatttcaaacaaaccattataaaggccatcagagaaacattgcctcagttggtcagatggagggaattctaccaagctcacaatagccaccgtggcatcccactctcagtcatctcgcagcctcagctgcagtcactaccgctgctcctgagagcccttgcaggggctttgagacttcagagaagacctgccacctggagtctccagcagaaggaggagagggagtgtttgccaaaatagtaagtctattgatttatttattttaggtaagtttagatttt

SEQ ID NO: 1880879 - DNA, 4001 bp, Homo sapiens
gaaatatacaccggaggtacctaggtaaagctgaggcactcagggcgcctggggagcagtggtttcctcagcaagcccaagtgggagaagggtagggggagcagcttgggcagaagagaaggtgagtgtgacagagctgtcaactgaggtcccagagaaaggcaaaggtaagagaagtcatgcccatgcccaagagagaatgagaagggaaggaaggggaagaaaaagtggtacttataacccgagaggaaggatgaatacaagaatatacccaaacagtgtgcaatcataggcatgtcctaactctatctcctgataaagaatgcctctgatttttcccaccaaacttttctctgtttctcatatccgacatggcccacttttttccttataaattgtttacatttgaaaaagctcaatcatgaaacagaagatggtaaaacttctgtttatttgatggttattactaacacttcagctggagcttcctgaaacattattgctcttggttgcattgagggaggagttggtatttgtcaaaaattatatttgactttggttgcccagaagaaattctgaagcttccaaatgcacgggaggctttacagaggtgctcagtgaggaagcggaatctggagtttataccatacagaacgcccagccttgcctcccccagcatggatggatgatcattgccaatcctcatttgtgtttctgacattaattaattttggcttttttagcatatatgaaaaaagattggagattctcatgaataaaacactacagtggcaatactatttcaaccagaattccgtctccttccatcattctcaagcatagattaccactttttaaaactattccaactaggaaatatttatgtttgataaaactaaaatgtaaacatgggtttaaggtgcttgcctagcttgctttcctataacaaaatatctgctggttttcaaagttatattgaaacagtatgttaaattcagttctgacagcatataaagatactggctttcctagacacataagcaaagtctttttatgagctcataaaggctagacttaaggaatatttaagtagtggataattcatagaacaatacgatatctttagtcactcagctaacatagagggcaaccacaatttattcttcttagaacttcctctcatgttttatattcttaggaggtgaaaggtatttagaaaagacctaaatacatttttttattattattgaactatcaaagatgtgctctctttgggactccctccacttcctcattctgtgtatgttaacccacttcagagaccatggtgaaatggacccaaaacaccaacttactatttgcattataaatggagacacaaaagaatattttaaaacttttggttgatctggcatatcaaagatttctttctcagcttacttcagtgagtgcattgaagtaaactgaaagcaatagcttaaaagtggctttaaaaagtcataaaaaaaaaaaaaccggctatttccatggaaattttcagtttactctccgacccccctccctttcagaatcgcttctttcttaccctcctctttatttgcaggactcaacaaggaggaactctggagttttctgaattcaagtattaagctagctctcactggagtgcaatccattttccttgccttgtcaaatttgcactcaaacttccagcaaactgcctgactctccttttccccccctccctgagctaattaccaacacgcagcttggactctaaccaagcacttcgccatgtcggccattttcctctgctttataaagtttgcaggaaaattacaaatcaatagagtgcttacctgagagttcatagaagtgaggctgatgaaatttaaacaagtcgccagatctcaacaatcgatacagcttttcttccccttcgaccttcataggtctgctgtttttattttccgttttcaagatggaggccagggtcttcctaagaatcatgggaaacttgaaatgggccacaggtgaatggcatttcaaagctattaaataaccgctgaacatgggctcctgtgaattgagcctgggaacagtctcaggttgccacgttactagcagtgccgtgtaagaaccaggacacatttttagcattagctggggggagttaagaactcttcatgaaatcagagaattaaaaagtgtaggccagacgcagtggctcacgcctgtaatctcaacactttgagaggccgaggccagcagattacttgaggtcaagagtttgagaccagcctggccaacatggtgaaagcctgtctctactaaaaatacaaaaattagctgggcgtggcggcaggtgcctgtaatgccagctgctcaggaggctgaggcaggagaattgcttgaactcagcaggcagaggttacagcgagccgagatggcacaactgcactccagtctgggtgccagagggagactccatctcaaaaaaagtgtaaaatgttcacagaatatgagcttttattatgagaacatgatggggagggcattgtactttagtcactaaattcttagaagtaaaatacacactactactacatttgtctaggcaataagttttctctaatatgaaaaagttatgcccatatttgactatttatcatttcaaagtatcgttttcaccatgtcctctttggagacgatatcctatctgcctctcattttacagtgtttgaatatttaagctaattttatataatatctgacgtgtctacctacaaaagtatcctgaattttgctttttttcatattttatcatactttatactgatcaaaaaatagttcatgtgggaaaaggtatctgcctctctgtttacccaaatagatattaatagtgttgatagactcttactacagtcctgtcataatttttttttttaaaacttctcatctttctttgaaatggcaaaacttcttgaatataaagagttgaggatgtagaactctggttataatttcacaacctatttcagtattactctttggaaatacatacaatctcaacaccaaactttgaaacaccatccctccacacaccccaacctccaaaaatagaaagaaagaaaagaaaaatagtacaatctcttcacagattcagtaaaataatattagcattaaattttggataacactgatgaagagagatgctaacactgacatttaacaatatggagcttattagaccagaggtacatttctccctcattaagttaagaaatatagtatgtaatcattttagttttacaacaaaatccatttctttaatgtggttagatttcttgatttgggtttgcaaagttactatctactcctgaactgtaatgcaaaatttgctttctagttaagcctagaatacttaaagttatctctcaaattgttttagcataatgttttaacaaatctgacccttggaaagacatccaagtgtcactaaatatctcacctagctaaattgaggccataatatgaatgtcaactttgaattctaaatgcgtttattcattgtctatcaatttgccaacctttccaaagtgtaagtttataaaaatcatagaaattgatattttcttggggctgcctaaagcctcaaattatatttgtcaatgactcattctagaggagaactttagtaatgttctattattgcctcatattcctgtgcccgtgttagaaacacctcagtatctttgcctttctgccaccacctcctacctacttcctcccgagttatgagactcaaggccatgttataatgacctcggctgtcatttcactaagatttttccaatatcaccactaagtcctcctaaaaacacacctcccttaaatcgtccatctaaacttctcaggggaagcctgcccaaaaataaaaagaaaacaaacagaaatccataataatgtaaaggaagccagcagctttatattggaacaac

SEQ ID NO: 1880880 - DNA, 4001 bp, Homo sapiens
tttttttctcattatttttgtttttcagtcctgagttctgggagaaattttccagcccattaaaaaaaattactgactttactgtgatatctaatcttctgctcattagtgtattatggatttaaaattggtcaccatattctgtcatctctttgtagctgtttcttacttgtttcatagatgcagtgtcagcttcagtcttgaagacataaattagattattcaatatctttacccatttcttaggaatagaggcattagttgaaattcctcaaaaaatcttctcatatgatgaaatcctttcttgtggccagcgatttcttgcatcatcatctttacagagaaagatctgctttcgtgtagcatcatggggagttaatttgggcttcaacagagacaatggccctattcaatattttggggctagataaagacagaaaaggggaagtttaactgtagcgccttcaaatacctaagaaatctatttggtagaagcaggagacaacaggtacacaccaaagagttttctcttttcccctgtgttttccagacattcatgccatgccagtagtgagagctgactgagtttgtcacttattgtggccttgactgtgtcctttcttaaggcattggcaggatccagatggcctgccctcaccctcataccttggccttccaaggttgggctgtttgggtgattctgctcctgacaatcctgtcttccagaggagtgattgttggactagggtaggagggctgccacctgcacgctcactggcagaaattcttcagagcttctagtactgatatacatttagaaatggtttcatatttcacagatcatttcagtgagtgtccaagggtagattggactaagggaggagtaaacgtggtatgctgtagtgttaatttccctggaaaccctttgcttatggacgttttctacattatatgcccacatggtgaccaatataacagtgcctcgccacccccaccaaccacttaaaaagtttctccatgaggctattttaaaaatgagtgcattctcagttctctctatgggaatccccagcaaagcatcagctagtatttttgcatgctcaaagagtggactgatttccgttggtggatatctgagccttccctggataatatcccccagagctgcaacccccctccctctctccaaggtgtgccaggattccccgtgaggaaaactccatgccaacattcctgcctcttccatgatctaaaggctctgcctcataaaaaagttgggaattcctggtttaaatcccctgggctaagtgtaaatcaagcaacttggagctctgctcttacaaggagaaatgttgggggattccagaaacaccagggtcattttacctcttaatagtttctccaagccatactggttcagaagcaaagacctcatagttccatgaaaaatttgtttttcctcaaaactaaaagaaatgaagccctaagggtctcatttcacaaaattctcccctagtccagaagtgaaatatcaaagagttggaggtactcacagctaactttctacccagtcagggttctgcatatggtgtccctgggagaggacacccagcctgtgctctactcttccagtactcaggggctcagtctctaaggtagtactaagtactactgccccaaatagaatgagctgccttagtactggcattctatttgggcagattattgctaggaggttcttccttaaacacattaacatctgcctcccagaaacctctgtgtattgttttgaattccatccttggaagccacacagaataagtctccctcttctatacagcagtcctttcccatttctatagtcagccaccaaacctctgggtctttgtggtcctaaactccccttgacatccagcctccaaggtagctcccaatgatccctacctcctggtatccacagccttgtgaagtcccctcccatactgtctcagggctggtctgtgcgaccaatagaatatgaatgggatgtgacttcagagactaggtcataaaaggcactgtaacttctgccttgttctctttgtctctctctcttggattggtcactctggaggaagctagttgctaagtcattgagacacacaatggagaggtccatgtggaaagactgaggcctcccaacaatagcttgtaagtgagccattcttcagccccactcaagccttcagatgacagtgcagccccagttgccatcttgacagcaacctcaatgagagaccctgacccagaacctcccagcaaagccacttctgaattcctctcagaccctgtgtgggaaaataaatgtttattgctttaagctactaaattttaatttgtcatatagcaataaataacatacactttgagtttctataagtattctttaagcaagaaagtctgcaaacctctcacctcagggaaaattctgattttttttttttttagtgcctttcttaaaatagtctactatagagtaatggggacaacaacaacaacaaaacacatttaccaaatacgttggatgttggcctttgtgctaacagttttatacgtactacctaagttaattcttataaaagccctgtgatataggttctattattctatccattttacagatgaggaatacaggtttagagaggttaaaagccttgcctaaagatgtagggctaggaagaggcagaagggaaatccaaaaacaggcagtgtgacctcagagtcctagctctaaagctctaggttacaggaacagagtacagtaggaaaaccacctcccatgacctgatttctacattgatagaacttagttctccatcaattttgccagcagtcctggaatgctgttggattatataaatttgtggtcagctaaggcctctggctgtttctccacttaaactactgtcaaatttggcctcatatcttcctgattaaatcattactcttaacctaaatactgactgttattataaatgtgtcactgttcaatttaacttggttggttggctgtgatccattgttctggctcaaaactttttttttttctcttgagtctttattctatcatccaatacttcagctatcattctgggcactgtgttgtctctaaatctgataaacttttccttatatgtcttcctttgatttgctcataaaagtctcaacaggaaagaaggataaagcctgctggcacacccaggagtcccccttctaggtcaatgcgaatacatcaacaaatgttttctgaagatgacctagttaaaaacgtcctacccttcccaaaagcttctaggtaaacccatgttgagtatgtttggggatctcttcatttaaagaggtcactggcattgttccttctcaccaactagccaactgtgaactcttgtaactcatatttctccattttgtccaactgaatattttgattttgtcatgtgccttgttgaactcaacgtgtatcctcttatacagccttatgctggtggcatttccctcatcagtcttacaacactaaaaaagaagtaaagttaatctgctgtgacttttcattctttatttgctgtaataaattggtctaatgttttcctgggagtgtcaagttttataatctacattctaaacaatcttcaggcatttttacatcattaaagtcagaaatgtatttgtctttttccattctctgagcaatttttacatttgctgctatttcttaaaaatcaccaacagggatgggtgatttttgctacaggtttctcagtacattgaagtaaaattcatctgtacctgtgatgagtaaactcatctgtggtattaggggtcttttactaggatactcactcaaccttttatttcatatttactatgtttgttttattctttttgacagaaaatataaaagcaaaattatgtcaataatagtcttttcctggttttgcactaaccttttctacctgccacaa

SEQ ID NO: 1880881 - DNA, 4001 bp, Homo sapiens; identical to SEQ ID NO: 3870

SEQ ID NO: 1880882 - DNA, 4001 bp, Homo sapiens; identical to SEQ ID NO: 3876

SEQ ID NO: 1880883 - DNA, 4001 bp, Homo sapiens
tgacagtcccaactagagtgagttaattttcatttagctatttattttattttatttttgagacaagatctggctttgtggcccaggctggagtgcagtggcacaaccacatttcactgcagcctcgacctccctgggctcaggtgatcctcctgcctcagcctcctcagtagcagggaccacaggcctgccccatcgtacttggctaatttttttatttttagtagagatgggttttgccatgttgcccaggctggtcttgaactcttgggctcaagcaatccacctgccttggcctcctaaagtgctgggattacaggtgtgagccaccgtgacaggccttaactatttatttttacttttaattatttacttattttcagacaggtctcattctgtcacccagggtggagtgcaatggtgtgatcacagtcacttgcagccttgacctcccaggctcaagtgatcctcccaagtagctgggactacaggcgcacaccaccaggcccggctaatttttgtactttttgtagagatgaggtgtcactatgttgcccaggctggtctggaattcctggactcatacaatcctcccaccttagcctcccaagtactaggattacaggtgtgagccatcacacccggctccatttagctatttcaaagtaatgtgcaatgtaatgaggcaaccacaccatcttagcaggctgaccaatgtggtgtggggtggggtggggttggggaatgcccaaccccagagtgagagatgaggtaggagcctctgcttgggagatgccacacagttggtcaggagactggagcagagtgacgagcagggacagcattccaggcacagggcactgctgggtcaaaggcaggacacctggggcagcaaactgtcccagaacaaagcgtacaaagaaaagactgcgccctcactttgggcttccctcttgcatgcactcccacagcggggcccgtggagggaagatgcatctttggaagcagtgagcagcagaggccacccagttgctgtcgatgagggcagctccacagatgtgcccgcctaggtagaggagactggcctgccatggccaccgctaaggctcagccctctggcctccaaagatcttcccggtgggcctcccggaggaattgccgctgaatctggccttctcacacactgtggagacagcccagcaatgaggtgcctgcacgaaggacgccagccagccccgggtgcccccaaatatcaggatcaacaggactcggggccaccaggcccctcctctcacttcacaggagggacaagtccaaggctcaggttgaagccacgtggcccatgtgacagcaccacctggatgacccgggagcacacagcccatggccccctgtcaggggcgacggcccgtggggctacggggtgagcactgggcccgacttttcccaggcctcaatgccgtttgtgatggcgcagaagctgcctgctacagaagggatgtactgctccactgcgcggcccctaagcggcagtgccctcccttcccggcccagtgttctcccagactgaagcgaacgagagacagtccgcgcacaatcccgtctgcagtagcatttccccatcctggaaatgagggtgtgtggggcgctggactgtagaggcctgagatccaacccggcagagccagcgggggagcgccccgccctctcccctccttccaaaggcgccttcctcccagggcccggagagccagacctggcctggctgggccctcctggcgggtgtcctcatcgggcggagggggacggccacgagaggcaggcgacctctgctcctcgctctgtctgggccacccctgcccgctcacctgcagagagggacgaggtggactagacgcgcagcggcaggaggattggccagaggagggaggcggccagtgcgcagtgcccccgccggccctggcctgagcgctctgcccctgcttccctcatcaggccggtggcctgggcgtccccgacggggcggagagcgcggggcgtggccaaccgcggggctccaggaaaacgcctgcgtccatcaggatgctgggactggatctcgcgcggcgggtgcggggagcccaggtcggtaggaggcaggggtcgctggaaacccccagagcatcacagggcccctccctccaggaagtccactgtgcaggggagacatgaaggcaactatggcccaagcccagaaatatacagtaatgatgagagggcaagtgcttacatcacgtcatcaagcatttccagcttgctttccgagttcaacccactcctccataaggacgccggctcaagggattaggtcaggcccactagggacaatacaatatccttttcttaaactccagcatacaacagtcacgagagggctgtgccatctcagtcacaggtccctccacactcaacaggagggtcatagacaacagctgagtggcagcgagtcatcttagaattctacctaacacagcccaacctccggcctccagtgacgcatgtccctcccaatccccaaaatgcattcagcatacctcaaggttaccaagagcctcatcctgttactggaaaggggccgattcagacatcaagacaggattcttggatcttgcagaagaaagagttcgggcgggtccataaagtgaaagcaagtttattaagaaagtaaaagaataaaagaatggctaccccataggcagagcagtcctgagggctgctggttgcccatttttatggttatttcttgattatatgctaaacaaggggtggattattcatgggttttcagggaaagggatggacaattaacagaactgagagttcctcccccttttagaccatgtaaggtaacttcctgaccttgccgtgaactgtcatggcactggtgggagtgtctcttagcatgctaatgtattataactagtatataatgagcattgaggaccaccagaagtcactctcgttgccatcttggttttggtgggttttggccggcttctttaccccaacctattttatcaacaagatttttatgacttgtatcttttgcctacctcctatctcatcctgtgacttagaatacctaacctcctgggggctggccacggtgactcacacctgcaatcccagcactttgggaggccgaggcgggcggatcacctgaggtcaggagctcgagaccagcctggccaacatggtgaaaccccgtctctacttaaaatacaaaaattagccaggcatggtggcgggtgcctgtaagtcccagctactggggaggctgaggcaggagaatagcttggacctgggaggcggaggctgcggtgagccgagatcacaccactgcactccagcctgggtgacagagctagactttgtctaaaaaaaaaaaaaaaaggccaggcgcggtggctcacgcctgtaatcccagcactttgggaggcggaggcaggcagatcacaaagtcagtagattgagaccatcctagctaacacggtgaaaccccgtctctactaaaaaatacaaaaaaattagctgggggtggtggtgggtgcctgtagtcccagctacttaggagactgaggcaggagaatgatgtgaacccgggaggcggagcttgcagtgagccaagactgcgccactgcactccagcctgggcaacagagcggtgagactccatctcaaaaaaaaaaaaaaaaaaaaaaaaaaaatgcttaacctcctgggaatgcagcccagtaggtctcaacctcattttaccggcccctattcaagatggaattgctctggttcgaacgcttctggcaatctcattagagtctcaacttaaaattcaaaatctcatcatctaaatctaaatagaattatctcatcagctcaaaatccacaatctcatcatttaaatactccaaatagaatatggatgaggttcccagctgtaatctgctaaacacagcccttgagta

SEQ ID NO: 1880884 - DNA, 4001 bp, Homo sapiens
cagtcccaactagagtgagttaattttcatttagctatttattttattttatttttgagacaagatctggctttgtggcccaggctggagtgcagtggcacaaccacatttcactgcagcctcgacctccctgggctcaggtgatcctcctgcctcagcctcctcagtagcagggaccacaggcctgccccatcgtacttggctaatttttttatttttagtagagatgggttttgccatgttgcccaggctggtcttgaactcttgggctcaagcaatccacctgccttggcctcctaaagtgctgggattacaggtgtgagccaccgtgacaggccttaactatttatttttacttttaattatttacttattttcagacaggtctcattctgtcacccagggtggagtgcaatggtgtgatcacagtcacttgcagccttgacctcccaggctcaagtgatcctcccaagtagctgggactacaggcgcacaccaccaggcccggctaatttttgtactttttgtagagatgaggtgtcactatgttgcccaggctggtctggaattcctggactcatacaatcctcccaccttagcctcccaagtactaggattacaggtgtgagccatcacacccggctccatttagctatttcaaagtaatgtgcaatgtaatgaggcaaccacaccatcttagcaggctgaccaatgtggtgtggggtggggtggggttggggaatgcccaaccccagagtgagagatgaggtaggagcctctgcttgggagatgccacacagttggtcaggagactggagcagagtgacgagcagggacagcattccaggcacagggcactgctgggtcaaaggcaggacacctggggcagcaaactgtcccagaacaaagcgtacaaagaaaagactgcgccctcactttgggcttccctcttgcatgcactcccacagcggggcccgtggagggaagatgcatctttggaagcagtgagcagcagaggccacccagttgctgtcgatgagggcagctccacagatgtgcccgcctaggtagaggagactggcctgccatggccaccgctaaggctcagccctctggcctccaaagatcttcccggtgggcctcccggaggaattgccgctgaatctggccttctcacacactgtggagacagcccagcaatgaggtgcctgcacgaaggacgccagccagccccgggtgcccccaaatatcaggatcaacaggactcggggccaccaggcccctcctctcacttcacaggagggacaagtccaaggctcaggttgaagccacgtggcccatgtgacagcaccacctggatgacccgggagcacacagcccatggccccctgtcaggggcgacggcccgtggggctacggggtgagcactgggcccgacttttcccaggcctcaatgccgtttgtgatggcgcagaagctgcctgctacagaagggatgtactgctccactgcgcggcccctaagcggcagtgccctcccttcccggcccagtgttctcccagactgaagcgaacgagagacagtccgcgcacaatcccgtctgcagtagcatttccccatcctggaaatgagggtgtgtggggcgctggactgtagaggcctgagatccaacccggcagagccagcgggggagcgccccgccctctcccctccttccaaaggcgccttcctcccagggcccggagagccagacctggcctggctgggccctcctggcgggtgtcctcatcgggcggagggggacggccacgagaggcaggcgacctctgctcctcgctctgtctgggccacccctgcccgctcacctgcagagagggacgaggtggactagacgcgcagcggcaggaggattggccagaggagggaggcggccagtgcgcagtgcccccgccggccctggcctgagcgctctgcccctgcttccctcatcaggccggtggcctgggcgtccccgacggggcggagagcgcggggcgtggccaaccgcggggctccaggaaaacgcctgcgtccatcaggatgctgggactggatctcgcgcggcgggtgcggggagcccaggtcggtaggaggcaggggtcgctggaaacccccagagcatcacagggcccctccctccaggaagtccactgtgcaggggagacatgaaggcaactatggcccaagcccagaaatatacagtaatgatgagagggcaagtgcttacatcacgtcatcaagcatttccagcttgctttccgagttcaacccactcctccataaggacgccggctcaagggattaggtcaggcccactagggacaatacaatatccttttcttaaactccagcatacaacagtcacgagagggctgtgccatctcagtcacaggtccctccacactcaacaggagggtcatagacaacagctgagtggcagcgagtcatcttagaattctacctaacacagcccaacctccggcctccagtgacgcatgtccctcccaatccccaaaatgcattcagcatacctcaaggttaccaagagcctcatcctgttactggaaaggggccgattcagacatcaagacaggattcttggatcttgcagaagaaagagttcgggcgggtccataaagtgaaagcaagtttattaagaaagtaaaagaataaaagaatggctaccccataggcagagcagtcctgagggctgctggttgcccatttttatggttatttcttgattatatgctaaacaaggggtggattattcatgggttttcagggaaagggatggacaattaacagaactgagagttcctcccccttttagaccatgtaaggtaacttcctgaccttgccgtgaactgtcatggcactggtgggagtgtctcttagcatgctaatgtattataactagtatataatgagcattgaggaccaccagaagtcactctcgttgccatcttggttttggtgggttttggccggcttctttaccccaacctattttatcaacaagatttttatgacttgtatcttttgcctacctcctatctcatcctgtgacttagaatacctaacctcctgggggctggccacggtgactcacacctgcaatcccagcactttgggaggccgaggcgggcggatcacctgaggtcaggagctcgagaccagcctggccaacatggtgaaaccccgtctctacttaaaatacaaaaattagccaggcatggtggcgggtgcctgtaagtcccagctactggggaggctgaggcaggagaatagcttggacctgggaggcggaggctgcggtgagccgagatcacaccactgcactccagcctgggtgacagagctagactttgtctaaaaaaaaaaaaaaaaggccaggcgcggtggctcacgcctgtaatcccagcactttgggaggcggaggcaggcagatcacaaagtcagtagattgagaccatcctagctaacacggtgaaaccccgtctctactaaaaaatacaaaaaaattagctgggggtggtggtgggtgcctgtagtcccagctacttaggagactgaggcaggagaatgatgtgaacccgggaggcggagcttgcagtgagccaagactgcgccactgcactccagcctgggcaacagagcggtgagactccatctcaaaaaaaaaaaaaaaaaaaaaaaaaaaatgcttaacctcctgggaatgcagcccagtaggtctcaacctcattttaccggcccctattcaagatggaattgctctggttcgaacgcttctggcaatctcattagagtctcaacttaaaattcaaaatctcatcatctaaatctaaatagaattatctcatcagctcaaaatccacaatctcatcatttaaatactccaaatagaatatggatgaggttcccagctgtaatctgctaaacacagcccttgagtacaa

SEQ ID NO: 1880885 - DNA, 4001 bp, Homo sapiens
acagtcccaactagagtgagttaattttcatttagctatttattttattttatttttgagacaagatctggctttgtggcccaggctggagtgcagtggcacaaccacatttcactgcagcctcgacctccctgggctcaggtgatcctcctgcctcagcctcctcagtagcagggaccacaggcctgccccatcgtacttggctaatttttttatttttagtagagatgggttttgccatgttgcccaggctggtcttgaactcttgggctcaagcaatccacctgccttggcctcctaaagtgctgggattacaggtgtgagccaccgtgacaggccttaactatttatttttacttttaattatttacttattttcagacaggtctcattctgtcacccagggtggagtgcaatggtgtgatcacagtcacttgcagccttgacctcccaggctcaagtgatcctcccaagtagctgggactacaggcgcacaccaccaggcccggctaatttttgtactttttgtagagatgaggtgtcactatgttgcccaggctggtctggaattcctggactcatacaatcctcccaccttagcctcccaagtactaggattacaggtgtgagccatcacacccggctccatttagctatttcaaagtaatgtgcaatgtaatgaggcaaccacaccatcttagcaggctgaccaatgtggtgtggggtggggtggggttggggaatgcccaaccccagagtgagagatgaggtaggagcctctgcttgggagatgccacacagttggtcaggagactggagcagagtgacgagcagggacagcattccaggcacagggcactgctgggtcaaaggcaggacacctggggcagcaaactgtcccagaacaaagcgtacaaagaaaagactgcgccctcactttgggcttccctcttgcatgcactcccacagcggggcccgtggagggaagatgcatctttggaagcagtgagcagcagaggccacccagttgctgtcgatgagggcagctccacagatgtgcccgcctaggtagaggagactggcctgccatggccaccgctaaggctcagccctctggcctccaaagatcttcccggtgggcctcccggaggaattgccgctgaatctggccttctcacacactgtggagacagcccagcaatgaggtgcctgcacgaaggacgccagccagccccgggtgcccccaaatatcaggatcaacaggactcggggccaccaggcccctcctctcacttcacaggagggacaagtccaaggctcaggttgaagccacgtggcccatgtgacagcaccacctggatgacccgggagcacacagcccatggccccctgtcaggggcgacggcccgtggggctacggggtgagcactgggcccgacttttcccaggcctcaatgccgtttgtgatggcgcagaagctgcctgctacagaagggatgtactgctccactgcgcggcccctaagcggcagtgccctcccttcccggcccagtgttctcccagactgaagcgaacgagagacagtccgcgcacaatcccgtctgcagtagcatttccccatcctggaaatgagggtgtgtggggcgctggactgtagaggcctgagatccaacccggcagagccagcgggggagcgccccgccctctcccctccttccaaaggcgccttcctcccagggcccggagagccagacctggcctggctgggccctcctggcgggtgtcctcatcgggcggagggggacggccacgagaggcaggcgacctctgctcctcgctctgtctgggccacccctgcccgctcacctgcagagagggacgaggtggactagacgcgcagcggcaggaggattggccagaggagggaggcggccagtgcgcagtgcccccgccggccctggcctgagcgctctgcccctgcttccctcatcaggccggtggcctgggcgtccccgacggggcggagagcgcggggcgtggccaaccgcggggctccaggaaaacgcctgcgtccatcaggatgctgggactggatctcgcgcggcgggtgcggggagcccaggtcggtaggaggcaggggtcgctggaaacccccagagcatcacagggcccctccctccaggaagtccactgtgcaggggagacatgaaggcaactatggcccaagcccagaaatatacagtaatgatgagagggcaagtgcttacatcacgtcatcaagcatttccagcttgctttccgagttcaacccactcctccataaggacgccggctcaagggattaggtcaggcccactagggacaatacaatatccttttcttaaactccagcatacaacagtcacgagagggctgtgccatctcagtcacaggtccctccacactcaacaggagggtcatagacaacagctgagtggcagcgagtcatcttagaattctacctaacacagcccaacctccggcctccagtgacgcatgtccctcccaatccccaaaatgcattcagcatacctcaaggttaccaagagcctcatcctgttactggaaaggggccgattcagacatcaagacaggattcttggatcttgcagaagaaagagttcgggcgggtccataaagtgaaagcaagtttattaagaaagtaaaagaataaaagaatggctaccccataggcagagcagtcctgagggctgctggttgcccatttttatggttatttcttgattatatgctaaacaaggggtggattattcatgggttttcagggaaagggatggacaattaacagaactgagagttcctcccccttttagaccatgtaaggtaacttcctgaccttgccgtgaactgtcatggcactggtgggagtgtctcttagcatgctaatgtattataactagtatataatgagcattgaggaccaccagaagtcactctcgttgccatcttggttttggtgggttttggccggcttctttaccccaacctattttatcaacaagatttttatgacttgtatcttttgcctacctcctatctcatcctgtgacttagaatacctaacctcctgggggctggccacggtgactcacacctgcaatcccagcactttgggaggccgaggcgggcggatcacctgaggtcaggagctcgagaccagcctggccaacatggtgaaaccccgtctctacttaaaatacaaaaattagccaggcatggtggcgggtgcctgtaagtcccagctactggggaggctgaggcaggagaatagcttggacctgggaggcggaggctgcggtgagccgagatcacaccactgcactccagcctgggtgacagagctagactttgtctaaaaaaaaaaaaaaaaggccaggcgcggtggctcacgcctgtaatcccagcactttgggaggcggaggcaggcagatcacaaagtcagtagattgagaccatcctagctaacacggtgaaaccccgtctctactaaaaaatacaaaaaaattagctgggggtggtggtgggtgcctgtagtcccagctacttaggagactgaggcaggagaatgatgtgaacccgggaggcggagcttgcagtgagccaagactgcgccactgcactccagcctgggcaacagagcggtgagactccatctcaaaaaaaaaaaaaaaaaaaaaaaaaaaatgcttaacctcctgggaatgcagcccagtaggtctcaacctcattttaccggcccctattcaagatggaattgctctggttcgaacgcttctggcaatctcattagagtctcaacttaaaattcaaaatctcatcatctaaatctaaatagaattatctcatcagctcaaaatccacaatctcatcatttaaatactccaaatagaatatggatgaggttcccagctgtaatctgctaaacacagcccttgagtaca

SEQ ID NO: 1880886 - DNA, 4001 bp, Homo sapiens
ttgacagtcccaactagagtgagttaattttcatttagctatttattttattttatttttgagacaagatctggctttgtggcccaggctggagtgcagtggcacaaccacatttcactgcagcctcgacctccctgggctcaggtgatcctcctgcctcagcctcctcagtagcagggaccacaggcctgccccatcgtacttggctaatttttttatttttagtagagatgggttttgccatgttgcccaggctggtcttgaactcttgggctcaagcaatccacctgccttggcctcctaaagtgctgggattacaggtgtgagccaccgtgacaggccttaactatttatttttacttttaattatttacttattttcagacaggtctcattctgtcacccagggtggagtgcaatggtgtgatcacagtcacttgcagccttgacctcccaggctcaagtgatcctcccaagtagctgggactacaggcgcacaccaccaggcccggctaatttttgtactttttgtagagatgaggtgtcactatgttgcccaggctggtctggaattcctggactcatacaatcctcccaccttagcctcccaagtactaggattacaggtgtgagccatcacacccggctccatttagctatttcaaagtaatgtgcaatgtaatgaggcaaccacaccatcttagcaggctgaccaatgtggtgtggggtggggtggggttggggaatgcccaaccccagagtgagagatgaggtaggagcctctgcttgggagatgccacacagttggtcaggagactggagcagagtgacgagcagggacagcattccaggcacagggcactgctgggtcaaaggcaggacacctggggcagcaaactgtcccagaacaaagcgtacaaagaaaagactgcgccctcactttgggcttccctcttgcatgcactcccacagcggggcccgtggagggaagatgcatctttggaagcagtgagcagcagaggccacccagttgctgtcgatgagggcagctccacagatgtgcccgcctaggtagaggagactggcctgccatggccaccgctaaggctcagccctctggcctccaaagatcttcccggtgggcctcccggaggaattgccgctgaatctggccttctcacacactgtggagacagcccagcaatgaggtgcctgcacgaaggacgccagccagccccgggtgcccccaaatatcaggatcaacaggactcggggccaccaggcccctcctctcacttcacaggagggacaagtccaaggctcaggttgaagccacgtggcccatgtgacagcaccacctggatgacccgggagcacacagcccatggccccctgtcaggggcgacggcccgtggggctacggggtgagcactgggcccgacttttcccaggcctcaatgccgtttgtgatggcgcagaagctgcctgctacagaagggatgtactgctccactgcgcggcccctaagcggcagtgccctcccttcccggcccagtgttctcccagactgaagcgaacgagagacagtccgcgcacaatcccgtctgcagtagcatttccccatcctggaaatgagggtgtgtggggcgctggactgtagaggcctgagatccaacccggcagagccagcgggggagcgccccgccctctcccctccttccaaaggcgccttcctcccagggcccggagagccagacctggcctggctgggccctcctggcgggtgtcctcatcgggcggagggggacggccacgagaggcaggcgacctctgctcctcgctctgtctgggccacccctgcccgctcacctgcagagagggacgaggtggactagacgcgcagcggcaggaggattggccagaggagggaggcggccagtgcgcagtgcccccgccggccctggcctgagcgctctgcccctgcttccctcatcaggccggtggcctgggcgtccccgacggggcggagagcgcggggcgtggccaaccgcggggctccaggaaaacgcctgcgtccatcaggatgctgggactggatctcgcgcggcgggtgcggggagcccaggtcggtaggaggcaggggtcgctggaaacccccagagcatcacagggcccctccctccaggaagtccactgtgcaggggagacatgaaggcaactatggcccaagcccagaaatatacagtaatgatgagagggcaagtgcttacatcacgtcatcaagcatttccagcttgctttccgagttcaacccactcctccataaggacgccggctcaagggattaggtcaggcccactagggacaatacaatatccttttcttaaactccagcatacaacagtcacgagagggctgtgccatctcagtcacaggtccctccacactcaacaggagggtcatagacaacagctgagtggcagcgagtcatcttagaattctacctaacacagcccaacctccggcctccagtgacgcatgtccctcccaatccccaaaatgcattcagcatacctcaaggttaccaagagcctcatcctgttactggaaaggggccgattcagacatcaagacaggattcttggatcttgcagaagaaagagttcgggcgggtccataaagtgaaagcaagtttattaagaaagtaaaagaataaaagaatggctaccccataggcagagcagtcctgagggctgctggttgcccatttttatggttatttcttgattatatgctaaacaaggggtggattattcatgggttttcagggaaagggatggacaattaacagaactgagagttcctcccccttttagaccatgtaaggtaacttcctgaccttgccgtgaactgtcatggcactggtgggagtgtctcttagcatgctaatgtattataactagtatataatgagcattgaggaccaccagaagtcactctcgttgccatcttggttttggtgggttttggccggcttctttaccccaacctattttatcaacaagatttttatgacttgtatcttttgcctacctcctatctcatcctgtgacttagaatacctaacctcctgggggctggccacggtgactcacacctgcaatcccagcactttgggaggccgaggcgggcggatcacctgaggtcaggagctcgagaccagcctggccaacatggtgaaaccccgtctctacttaaaatacaaaaattagccaggcatggtggcgggtgcctgtaagtcccagctactggggaggctgaggcaggagaatagcttggacctgggaggcggaggctgcggtgagccgagatcacaccactgcactccagcctgggtgacagagctagactttgtctaaaaaaaaaaaaaaaaggccaggcgcggtggctcacgcctgtaatcccagcactttgggaggcggaggcaggcagatcacaaagtcagtagattgagaccatcctagctaacacggtgaaaccccgtctctactaaaaaatacaaaaaaattagctgggggtggtggtgggtgcctgtagtcccagctacttaggagactgaggcaggagaatgatgtgaacccgggaggcggagcttgcagtgagccaagactgcgccactgcactccagcctgggcaacagagcggtgagactccatctcaaaaaaaaaaaaaaaaaaaaaaaaaaaatgcttaacctcctgggaatgcagcccagtaggtctcaacctcattttaccggcccctattcaagatggaattgctctggttcgaacgcttctggcaatctcattagagtctcaacttaaaattcaaaatctcatcatctaaatctaaatagaattatctcatcagctcaaaatccacaatctcatcatttaaatactccaaatagaatatggatgaggttcccagctgtaatctgctaaacacagcccttgagt

SEQ ID NO: 1880887 - DNA, 4001 bp, Homo sapiens; identical to SEQ ID NO: 3888

SEQ ID NO: 1880888 - DNA, 4001 bp, Homo sapiens; identical to SEQ ID NO: 3919

SEQ ID NO: 1880889 - DNA, 4001 bp, Homo sapiens; identical to SEQ ID NO: 3929

SEQ ID NO: 1880890 - DNA, 4001 bp, Homo sapiens
gcatccatgacatggaatatctctccgtttatttggtttttccttgatttcttttgtcagaatttaaaaattttcctcatagaaatcttgcacatattttgttagatttatatgtacctaagtattttactttaaggagtgctaatgtaaatgttattgtgtttttaatttcaaataccacttgttcattgctagtgcataggaaagcaattgatattatatattaacctcatatcctacaatcttgctataatcgcttgttgattccaggagttttttttaattgattcttttagattttctacatagatgttcatgtcatctgtaaacatctatgtatttcttcctttccctaatcattttaaaactgagtagcattctatgaattgaaaatgcaaataatttatttaatctctccgcattggtatgcacctaagcagtttcctatttttcactgttcagtatagtgcactgtacacacatgcatacacacatacctctttgaacacatgtaggactatatctgcagagaagtttcccaaaggagagattgttgaatccaagatactgtatttgttagggtaggctaagctgctacaaaaacagatctaaacatataatgattcagtgtaatagaagaatgtttccccatatgtaactgttttgggtaaatgttagaagtgatcaggcagctttgctccacactgtttttaacggacctagacgctttccatcttgcagtcctgccatctcctaagacctcataacacttggcagaaagggaaagataatgtagagaagtcattccacttttcataaaagcccaggcccagaaatggcatatattactttatttcacgttgaccacctctgaatgcaaagatatctaggaagtgttggctagccacatgcccaagcaaataaggagagaatgaatttgaggagacaaattgtagtctctccctcaagtatataaatttaaaattttgataggcactgccaaattgctctcctaggaaattgtactaatttacactcctactagtagtctattgaatgatcccttaccttatcctcaccaattctggccattttcagtgcgtgtattttttttttcaagcaatctgaaagagaggtatctcatttttattttcatttcttttattgtgttgagattgagcaatttttcatatgctaaaagctcttgtttttctttggtatataactggttctaaatatgctttttttttttttaagtgagcctattctctcctcagttttcaatggactctgataatttttatcacaagttctccatcatgtttcgtttcttttctttttttttttttttttttttgagacagagtctcgcttgttgcccagactggagtgcaatggcgcgatcttggctccctgcaacctccgcctcccgggttcaagtgattctcatgcctcagcctcctgagtagcttggattactggcacccaccaccacgccctgctaattttttgtatttttagtagagacggagttctccgtgtttctcttataacagttttgttggctctttttttcgctcttgactgtcataatcaatttacaaaataataaaaaagaagccatagaagattttggtttgaattgcattaaatttgtagtcatatgtggggaaaaaaaattttctttcccaaaaatgaccattattatatcaggcagctattggtgtatagcaaacaaccacaaatgtcaggacatataataataagtattctttactcacatttttgtgggtcatcgagggtctgctgatctcaggcaaggcttggctggggccctgcttcagttcagatgcagctgggtgaatgtggcacatcattgcagtttggactcttgtcacctccaatagtgtttcccccagactcacaacaagtagcagccactacccagaggaaattcttcttgtactgatagcaagtgccagagaacaagcagaagtatgcagtgcctctaaaatttaggttgatacactgctattcctgcccacattccattggccaatataagaaaaatgtccaagtccctagtcaagaagcagtagggtacactccaacttttgtagttagttacatggcagaagacacgtactcagggagggttgaaaaactggaaccagtaattgtgatatgtaccacatcatccatgataagagaagtctggggcgttacctttttggttcagttctttttaaaaatgtccctgagtacagtttcataggaattttatagcttttgcacatttcttaagtttatgcctgttatgtttttctttttggtttttgttccatttattaataagattttttaatgtaatattttctcatttgtttttatcacgtaggaatctgttgttgtgaataacattagtaggtattgtaatgtttgaccctggtttgcattcccggaattcctgtaataagtcagcctggttaaggtgaattattcttttactatactgttgtatatagttagctaatattttatttaggattgccacaagatttaatgagactagtataatctattcatatcttttaaaaacatattaaaaattaaactccagagacttttacttgtttaaataataaagttgataattttcacaaagcagatgacattttactagtgaaaattacttatttgaacagtggaatagtgaggcaagcaaaccaacttttcatgccctcgaataaaagaaaatatataaatttattttgacattaactaaattgttttcctgcaggttgctgctccaagatagccaaaatgtggaagcactgagaatgcaggcactctactatgtgtgtagagagggggatatagagaaggtaagtggcattgtattatttaagtttcctatattaaaaaatatatttcattacacatacacacccatgtgtgcatgtgcatatacattaaagccttgaagttctcttttaaaatatacatcatggtagtttttagttgattactagagtataccttaacaaagaggtcagcttctgaaatctattggtaaagcaaaaatactatacagttaatattacccttgaaaatcccttaaatcattaattatagtatatatggctttctgtatgaaactcctgtgtagtaatatatatgattaatgtaactagatacgtaatgtaactagtgatactagatatgagaaagtatgtatgcaaaatgtaatttatagtatatttacaatttaactgaatttgcaaaaattaaatgggcttgggataaaatcccattatacctcataataaagcacatctgtttctgtagtagtgaacacattgactgtagattggatcatggagtgccaaactctaatctgaaggaagtaatattagtataacatgtagtagatttgcattttgtttagtgtggttaaattggttaatgtgacagtgcctgatagatacttcagtaaatgctaggagtatcttagtaggggtaaatcttcagtaaattttccaggcattgaaattacttatactaagtactgtaatgatttttctagtctagaatatattttgaatataaaccagtctgtataggcaattgaagggctgacctcatatacttgtaaatacattatcattcgtatctcatttgtgtcatgaattaactattgaaggcggagctgggcatgtacagttaatggaatattatgggtgtcttcgcctatccaaaggtttccattcaataacaagtattaaagaaacacattctaaaacacatttataattattgagtttgttagaatcttaaatatgttttataacatataatcatccattgaaggaggaggaatttataaaagcaaaggtcttttaaaatactagtagggtaatgctttgttagtgtgtatgtgcatgtattatgttgtttttacttagtatattttaagttaataccagttccttttgttttag

SEQ ID NO: 1880891 - DNA, 4001 bp, Homo sapiens; identical to SEQ ID NO: 3936

SEQ ID NO: 1880892 - DNA, 4001 bp, Homo sapiens
agcaaatgtttaaattatcgttagatgtattcagcaattttgtttaaaaagcctagatatagttctcatggatatatttatccccaaaagtttatcttctaaatatatcaagaaaaatatttttaggagagctgattcaactcggaatcagctgtgattcaatatctttgatggattttgaacatctacaattcacaatcttttgtgctaaacaccacagggaacaatacaaagatgattaacacggtatagatactgtccctcaaagagcatagtgaacggaaaaggacaacttcagggaaaatgatcagttgtgaatctgagtccatattggctactgcagctccaaattgagacagaacaaataaaggacctcagaactaaagaactattttattcccaagtctagatcagttgttttaaaagcatggtagaatgacagtatatggaagactgacactattttaaatagtgtcattctactatgctttttaaacaactgatctagacttggtaataaaataatgccaaaaatatctgtatttgtccacttcaatttgttaatcataattataagcctatgatgttatttgcctaaattcacctccttaatgtaggtacaggtgaccaaagctgaagcaaatgtactgtcagttttcattctccagagaaaaatcctgggtcttcattaatttattcagcaagttttccgtcttaagtcagattccctaaaagcagagcctgagacggggattcttgtctcagaaattctttgagggattattactctcagggaaaaagggaatggggcagccagcagatagggcagaggaagcaagctgagcacgaatgtggtctcagcagaagcctcagccagatctcacagggagcttcaatcgtaccacagagttggttccatctaggagcaagggggctgacattttgtacccccttaccaaccagtcaatggctacaggctataagctgaggggctgaggagggatggaagagggaaataaaccttcccaagtgaagaggggtgcctgttggccaggacaattctccgtggactaacgcagccaaacagtgaacaatcgagaaatcgatggaagaatacacatttcctgggcatctaagtgatgccaacagaacccactacatcatcttacaatgttaaatgcctattcttaccttaaaatgagaggcaggactggctaggtgatgcctaaggatgattcccagccttgacatgctggtattctcacatatcctatccgtggctgatatagtctgtgcggatgaaaattccaaaaccgaagacaggatttcgcacttgctaaagttggagctcccaggcgctgagatccaatttgggcctgggagagtggggagggagagcaatctgcccagtgaaggagagctgcgctaaaggcaaggttttacttctttttatcccttagcgaaaagcccactgcctctgaaagtagcacggtgtggccacacggacacatgggggaagtcagtcagaggcgctccaacagaacggccagaagcccctttcctggcttaccaggcagcctccttcccctaactcctccagaaacagcgctcctctgaagacgcggggggagggtcttccggccccacaccccaccttccgcaacgccaggagtggttcctcagcattatggcgtcatttccgagtcagacccgctcttctctccccatgtcaacagagggcgacagggagcaccaagccgaggcgtgctttttggttccaatctacgccctccacaaaacccatgagcaagcttcactgtcatcctgccccttttttttattcacgtctattttataaaccccacaccctggctacatgatcagccgaatcatgttgcaattacatgtctgcattcaaaaccctgagggccccgctcaaatctaggaactgctgtttactaacttacttcacctggggcaggttacccaacttctccattctttgacattctcgtccataaaatgagaataacagcagcaacctcacagtattattgtgacgattagacaagttactacttgtaaaactcagaacagcgcttagcagagcacccaataaataccagcaatcattattctgttagggaccacagtacagaatattgaagctagggactagagaagcagcactttagaggggacctagcctaggtctcactggtactcattagatgtacggcaggccacctttattcttgggcaacctgtcccaagatcccccagtggaatcctgaaactgtggatagtactgaatcctacaaatactatgatttttccttttttttttttttttttttttttgagacggagtctcactcgtcacccaggctggagtgcagtggcgcaatctcggctcactgcaagctccgcctcccgggttcacgccattctctggcctcagcctcccaagtagctgggactacaggcgcctgccaccacgccaggctaattttttgtttttagtagagacagagtttcaccttgttagccaggatggtctggatctcctgacctcgtgatctgcccacctcggcctcccaaagtgttgggattacaggcgtgagccaccacgcctggccatgatttttcttatacgtacatgctgatacggtttggctgtgtcctcactcaaatctcatcttgaattgtagctcgcataatttccaccttgtgagagggacctggtaggagataattgaatcatgggagccgtttcccccatactgttatcatggtagtgaataagtcttacaagatctgacggttttataaggggaaaccccttttgtttggttctcatttctctcttccctgacaccacgtaagatgtgacttgctcctccttgccttcgccatgattgtgaggccttcccagccacgtggaactgtgagtcaattaaacctcttttctttataaatgacacagtctcaggtatgtctttatcagcagcgtgaaaatggactaatacgcatacctatgaaaaagtttaatttataaattaggcaaattaggcacagtaagagattaacaacaataatagaatataacaatgtactataataaaagttttatgaatgtgatctctctgtctctatatatcttattgtactgtactatgggtaacagaaacagcagaaagtgaaaccacagatcagaggggactagtgtattcattttctagcactgctggaacaaagtaccataaatcgagtggcagacacaacagaaatgtattgtctcgcagctctggaggttggaagtccaaaatcagggtgttggcagggttggttccttctgagaactctgagggaagaatctctcctaagcctctctccttttctgtagatggctattttcatgttcacacgacatttttcctgcatgtctgtgtccaaatttctccattttaggataccagtcatactactgaggctcatcctagttactccacttcaacttaattacctctataaagcctatcaccaaataagttcgcatcctgaggtacttgaggttatgagtccaacatctcttagggagggacataatccaacctgtcaccctagatgtggcggacatggaacagcacctctttatagtaagtgttctgagggaatttctgaaaagacagattttttctctatccaatagtagctgattatgtagatgaaccatagaggttgttaaaccagaaacgatgaaccatagaggttgttaaaccagaaacagcccataaaataacaggttaaattgatatctccatggtgactgattcaagaagattgttttatgatcgtgctccagaaagaaaaagtaattttcagttttgtttactctgccccaaacgtaattttgagaaattcaggtagagaaagtcatttccttgtaataggagaaaatagtgactgctacttaagtaggacttttgaaaatagactgg

SEQ ID NO: 1880893 - DNA, 4001 bp, Homo sapiens
tgtcctttgtaaggacatggatgaaattggaaatcatcattcgcagtaaactatcgcaagaacaaaaaaccaaacaccgcatattctcactcataggtgggaactgaacaatgagaacacatggacacaggaaggggaacatcacactctggggactgttgtggggttgggggaggcgggagggatagcattaggagatatacctaatgctaaatgacgagttaatgggtgcagcacaccagcatggcacatgtatacatatgtaactaacttgcacattgtgcacatgtaccctaaaacttaaagtataataataataaaataaaaaataaaaaaaaacagcccatgctaataagttcttttaagcaaatgtttaaattatcgttagatgtattcagcaattttgtttaaaaagcctagatatagttctcatggatatatttatccccaaaagtttatcttctaaatatatcaagaaaaatatttttaggagagctgattcaactcggaatcagctgtgattcaatatctttgatggattttgaacatctacaattcacaatcttttgtgctaaacaccacagggaacaatacaaagatgattaacacggtatagatactgtccctcaaagagcatagtgaacggaaaaggacaacttcagggaaaatgatcagttgtgaatctgagtccatattggctactgcagctccaaattgagacagaacaaataaaggacctcagaactaaagaactattttattcccaagtctagatcagttgttttaaaagcatggtagaatgacagtatatggaagactgacactattttaaatagtgtcattctactatgctttttaaacaactgatctagacttggtaataaaataatgccaaaaatatctgtatttgtccacttcaatttgttaatcataattataagcctatgatgttatttgcctaaattcacctccttaatgtaggtacaggtgaccaaagctgaagcaaatgtactgtcagttttcattctccagagaaaaatcctgggtcttcattaatttattcagcaagttttccgtcttaagtcagattccctaaaagcagagcctgagacggggattcttgtctcagaaattctttgagggattattactctcagggaaaaagggaatggggcagccagcagatagggcagaggaagcaagctgagcacgaatgtggtctcagcagaagcctcagccagatctcacagggagcttcaatcgtaccacagagttggttccatctaggagcaagggggctgacattttgtacccccttaccaaccagtcaatggctacaggctataagctgaggggctgaggagggatggaagagggaaataaaccttcccaagtgaagaggggtgcctgttggccaggacaattctccgtggactaacgcagccaaacagtgaacaatcgagaaatcgatggaagaatacacatttcctgggcatctaagtgatgccaacagaacccactacatcatcttacaatgttaaatgcctattcttaccttaaaatgagaggcaggactggctaggtgatgcctaaggatgattcccagccttgacatgctggtattctcacatatcctatccgtggctgatatagtctgtgcggatgaaaattccaaaaccgaagacaggatttcgcacttgctaaagttggagctcccaggcgctgagatccaatttgggcctgggagagtggggagggagagcaatctgcccagtgaaggagagctgcgctaaaggcaaggttttacttctttttatcccttagcgaaaagcccactgcctctgaaagtagcacggtgtggccacacggacacatgggggaagtcagtcagaggcgctccaacagaacggccagaagcccctttcctggcttaccaggcagcctccttcccctaactcctccagaaacagcgctcctctgaagacgcggggggagggtcttccggccccacaccccaccttccgcaacgccaggagtggttcctcagcattatggcgtcatttccgagtcagacccgctcttctctccccatgtcaacagagggcgacagggagcaccaagccgaggcgtgctttttggttccaatctacgccctccacaaaacccatgagcaagcttcactgtcatcctgccccttttttttattcacgtctattttataaaccccacaccctggctacatgatcagccgaatcatgttgcaattacatgtctgcattcaaaaccctgagggccccgctcaaatctaggaactgctgtttactaacttacttcacctggggcaggttacccaacttctccattctttgacattctcgtccataaaatgagaataacagcagcaacctcacagtattattgtgacgattagacaagttactacttgtaaaactcagaacagcgcttagcagagcacccaataaataccagcaatcattattctgttagggaccacagtacagaatattgaagctagggactagagaagcagcactttagaggggacctagcctaggtctcactggtactcattagatgtacggcaggccacctttattcttgggcaacctgtcccaagatcccccagtggaatcctgaaactgtggatagtactgaatcctacaaatactatgatttttccttttttttttttttttttttttttgagacggagtctcactcgtcacccaggctggagtgcagtggcgcaatctcggctcactgcaagctccgcctcccgggttcacgccattctctggcctcagcctcccaagtagctgggactacaggcgcctgccaccacgccaggctaattttttgtttttagtagagacagagtttcaccttgttagccaggatggtctggatctcctgacctcgtgatctgcccacctcggcctcccaaagtgttgggattacaggcgtgagccaccacgcctggccatgatttttcttatacgtacatgctgatacggtttggctgtgtcctcactcaaatctcatcttgaattgtagctcgcataatttccaccttgtgagagggacctggtaggagataattgaatcatgggagccgtttcccccatactgttatcatggtagtgaataagtcttacaagatctgacggttttataaggggaaaccccttttgtttggttctcatttctctcttccctgacaccacgtaagatgtgacttgctcctccttgccttcgccatgattgtgaggccttcccagccacgtggaactgtgagtcaattaaacctcttttctttataaatgacacagtctcaggtatgtctttatcagcagcgtgaaaatggactaatacgcatacctatgaaaaagtttaatttataaattaggcaaattaggcacagtaagagattaacaacaataatagaatataacaatgtactataataaaagttttatgaatgtgatctctctgtctctatatatcttattgtactgtactatgggtaacagaaacagcagaaagtgaaaccacagatcagaggggactagtgtattcattttctagcactgctggaacaaagtaccataaatcgagtggcagacacaacagaaatgtattgtctcgcagctctggaggttggaagtccaaaatcagggtgttggcagggttggttccttctgagaactctgagggaagaatctctcctaagcctctctccttttctgtagatggctattttcatgttcacacgacatttttcctgcatgtctgtgtccaaatttctccattttaggataccagtcatactactgaggctcatcctagttactccacttcaacttaattacctctataaagcctatcaccaaataagttcgcatcctgaggtacttgaggttatgagtccaacatctcttagggagggacataatccaacctgtcaccctagatgtggcgga

SEQ ID NO: 1880894 - DNA, 4001 bp, Homo sapiens
ataaataaaataagctgggcatggtgttggtgcacgcctgtggtctcagctactgaggaggctgaggtggaaggatgaggtagaaggatggccttgagccgggagatggaggttgcaatgagctgagattgcaccactgcactctagcctgggtgacacagcaagacactgactcaaaagagagagagagagagagaaagagaaagcagaagtagcttgaaaagatggggtggagagaacggaatgaaatgtagaaagaagggcttctgcggagaccaggggctgagtgctgagaccattaaggtgcgggttgcagatcctgctcttgggttagagacagaagagaccaagagtcagaatcatccaagatatgagaatctcgattttcttcttttctcttcagaggcaacagacattttgatagcttacaacaatgtttccactatgacatcactgtctccttttcacccacgaaaatgtcaaggactcagtgaggttaagtcacttgctcaaggtcacacagggtagcctggaggagaatccaggtcctgaggtcccccggtcagcgctcccgcagttctggcagcaggggagtgggcaggtgccctcagcgagggcatcatagtgactgcgctgatgacagcgccactgacccgcgggcggccggcgagccgcggcagattccggggtcggccccggcagacaggctgcggggctcgactctgcgggagcgcctaaggcattggcaatctggggctcaggctgtgcagttctgggtcctcggccgcccacaggcgtcggcgaaaggctgccgccccggccggggaccaggaagcgtcaggcagctggcaagggctccccggggacgcgccacagcctcacagccggcccgagtctcctgggaggcagggctggaagggcaggggtgaaggccagctgtggccgcttgggaaggaccgcctcgcctgctcccgacctaagtcagaacacctggatgaccggtgcctccaggacgcaggtgcaggtgagactcgccctgccacagcaccctgcatctccgcggaggccctcgggagcccagcgtgtctgctcaaaacgaggaaagaatggttaaagcccgaatcgcgactcttaatcccagcgggacaggtgagggacccccgcgcagcttggggagggtaccaggccaggctccgcccctcgggggggccgcttaccctcccgggaggcgtggcctgcgggccgcccagcctctagtgggcgagcggggaacgcgggccccgccccccccccgcctataagggcggtgcggcactgcagctagcgcagttctcactgagacctgtcaccccgactcaacgtgagacgcaccgcccggactcaccatggtgagtgcggcccggccggggtcgcgcctgtcccctaattgcccctctcctttgggggacacttcttccaggcatgctcggggacctccaccgggcgttccgggtctccaggaggtgcgagggttttgcatcctccctccccaaccccctcctggtgactttggccgagccgtatagttcaccttcggtggctggggttggggcttggggtggagtgcgactcttcagtaacagagaggaacccttcctggcactctgctcctgccttacgagcatttgtgtcccgactctgtatgagagtcacgcgggcccgcgccccgtcctttccgcgggcaaaagaagacgggtttggctgccctcttacatccccagtccctggtcctcagcactgaccgagcacgtgcttggcgctagaaggtggaaggggtcaggttacctggtgccgcatccccctttcctctgtgtatgcattccaactatccacagaaccaccccccccccgtgactcagcaccccgcgtctgagctgagagggttggtgggaacggggttcggcctcctgaagcgagctggccctctccagccgaagcccgggtgcgcggatgggcagagacagctggcgctgagcactgcgcgggccgaggccaggttggggggaggggagagaggtgcatgtagggggtggtatttatagcccaggagcgggggccgaaacccaatccccgctttgggctgggaaataactgtaaagactccagagggagagcggatgtagggctgggctgcaggatggcgcccatcctgcccgggacaaggcgggtcacctctggggcctcaccgcaggttccacttcctttctgggtatttggaaaccgtcaccccgccatttcggtgtgggaagagcgcgcgggccctgccggactttagtgctttaggggttaatttcgggctgacagggacggagcctaaggcagtgagcgccccagtaccctcaaaccttattgctggcccctgctgtctgagcttacaagcattaccgccgctatttccgtgcgggctgacacgggagatgaaagtggtgaagacacccagggtgcgggggtggaggtggggagaggagccagatgggattgatccccagagccagatgggatttaaaggtgagggaggagggcatcctgatggcgtgtggtcagttgatgccagattggatggctgagacacctctgcagcttacaggaaagaaagagggaaagggttctatgaattctagctgttcatactcaaagcaaataattaatcaagtggggggggggcctctagctgtaaacccatacctctaggaaaccttttgtcatgtggagccacagtgctcacttgacagattccccactgagaagtgggctaagaggttggcctgcattgctgggtgcctccaggtggggagtcctgtacctgggagcccgggcaggctgctactctcttctcacctctgcccagccccaaccctccactcttgccaactgagtcatcctagctggtagatgatagggtggaagagagactcgcaaggtgaggacttgtggatgtggggctcatgctgtgtcccctctctctatccctcagcgtgaatgcatctcagtccacgtggggcaggcaggtgtccagatgggcaatgcctgctgggagctctattgcttggaacatgggattcagcctgatgggcagatgcccagtgacaagaccattggtggaggggacgactccttcaccaccttcttctgtgaaactggtgctggaaaacacgtaccccgggcagtttttgtggatctggagcctacggtcattggtgagaggaagtggggacaaaattgaagggggtggagcatgactcaaagcttctccctggagagagagggtatttagaccaggcattcctagccctgaaaattcctagccgtacttgaagctgcagaaggcaagctgatctgagactggcctgggcagctggtctgggtttctctcacactctggtatctcaggctggcaggaggatgagtccttccatgcatctggccacagctaccaccctgggggaggaaggtccctgctgagcatagctttgtggtttttgcccttccagatgagatccgaaatggcccataccgacagctcttccacccagagcagctcatcactgggaaagaggatgctgccaacaactatgcccgtggtcactataccattggcaaggagatcattgacccagtgctggatcggatccgcaagctggtgagagtgtgtcttgggagggagggaacttttgagactgtgctaatggtcaggaatattttttttcagatcctttcaggaggtcatctctaactatacatggtctcgagtgtggtgctgctatggcatcctcagtatttgccctgactgctgatgtatcttacgctttatggagccaggtgatagagtccctcaggcccctcccctacctaaactgttctttctcgttcttgcctttcagtctgaccagtgcacaggacttcagggcttcctggtgttccacagctttggtgggggcactggctctggcttcacctcactc

SEQ ID NO: 1880895 - DNA, 4001 bp, Homo sapiens; identical to SEQ ID NO: 3949

SEQ ID NO: 1880896 - DNA, 4001 bp, Homo sapiens; identical to SEQ ID NO: 3954

SEQ ID NO: 1880897 - DNA, 4001 bp, Homo sapiens; identical to SEQ ID NO: 3954

SEQ ID NO: 1880898 - DNA, 4001 bp, Homo sapiens
aaaggagagagagtacgtgttcttggggagagatgcagcaccatttgagatgaaaaaaggaggaaagctatacattaaaaaagagctttgccactctgaccccacattcttaactctacaggtaaaaccagaggaaaagactgtccagagaagcagacgtaagaatctcactgaagtggtctctgctttgagtatgtcttcattttataggatcccttatcattctgaccctaggggttcttaaatgttgcttataaagacaaacagtctgagataatggccaacagaatgtgccatgtggctttgcatgataagcattatacttgcggcatgatgaataaacagaaaacactctttaacaagttctaggcccaactatcaacaaccatccgtaggaggctgaggtaggaggaccacctgagcccaggaggtggaggctgcagctagcaagatcatgtcactattctctaacctgggcaacagagcaagactctgcctcaccaacaaaaaataaaaaaataaattaaaacactatctcttgcaccattgcactccagcctgggtaacaagagtgaaactccatctcaaaaaaaaaaaaaaaaagaaagaaagaaagaaaattatcacatcatcttgtattgttacagggaaacttagataaaaaaagaaaatgctcacagacagctgcaggaaagttctaagcaaattttcttcttactttcatatattcccctgaagttcaatgtgcattataaatgtgctatgctactgtacaaagtattatggtcacttcctttaataagtttcatgtggccaggagttcaagatcagactggtaggtaacaagacctcatctctacaaaataaataaataaataaataaataagaatttttttaaaataagcttcagctaagtttatcaaaagcaagtcaagtgttgctaaattcgactggcttaaaaaaaaaaaaagcaaagtgaaaaggctacaattattccaagttttgtggtgctgttaaatagctatttaaaatgtcttcaaacgcctgcaagtgtaagattcttgaaggaaagagggcactttacactaaaattggctggcaagtacatcaatgaatgtttccaaaacagttagtgtagcacaataaggcaaaagaccccaggacttcaaacgaacaaaattgctccttctcaaatctggcaagaaatgcaaaacaactgcagattctggccaaggaacaaaaacagttcacatctataagttattggcgacggacgcagatctcattctggcaggtcccacgctaaaagtgaaaccatatcatccaatttccagccaacagatcacagtgttaaaagaaaacagtaaccaatacgcatcaacccgaattcattttaggaaaaattgaaatctattttaaaaagcacgtcgttctgcaatcagggtcctgcaaagtgctgcttctcaactcactgaggatcaagcttggtctaaatccatggtaggatacctcccccatttccttctgcacttggcacaaggatctaaagctcttcaaagaaggttcaagaccgctgaacagagcccgccgccacccccgcggaagcgataccttgccaagaagaccactgagggcaactcggggcgctcgcgaataggggaagggataggacaccagagggtaaactgagtcacggtagaggcggaagctcaatgtgacaggggcacagggtcgccttgtgccccaaaccctctctttgtccacgaggcctcctcacgccacccctgggtacctgtcaccggcagcgcacccgcggcacacgcaccgctcgcgtctcccttgcagcccatgcccgggccgtggtcagtccgccacagtgccagagacaacgccagggcagggcggggcgaggcggcagcggcagtgcaggctgcgccagtgagaggccgacacgcgcctttcccgcggctcgactcaacacccagcctcgcaaagcaattgcccagctgccggccgcccttttacttccgcttcctgcaggcgaacgctggaggacttccggataccgagtcgagacctagcagcccagagcgtcgcgcggtcgccctctcatctccgagggttggggaggggggagtcctgcctctctcctcacttccgcctttcagggtggcgggtaggctgccggtcttcaaggtcttgggaaggttcgttgggccaacagctgagacccgaaagcttcaacagtcagtcggtgaaatccagtttggactctgggacttactcccttaaacctttgttaaaagcttactccctttagcctttcggtggcacagtaaggacaattgtcttaatgtttctgagcatcttagactttatactaaaccctaaaattttgatagctaccttccaggaggcatgatgaaaggaagactttttaaattttatgagccgcttgagctttcttattcggacagcggcagcttagtctacagggactactttgtccttttagtattttttttttaactaatataaaccagtttaaaattgttttggaataggtagcatttaacccacccaaaaatgaatacctctttggagggtatatttttaagtatattaagtcaaagtgaatgaaaagccaaaaatatttttttggagttggagtctcgctctgtctcccaggctggaatgcagtggcgcgatctcggctcactgcaacctccgcgcccccgcccgcgccccccaccccccaaccccccgacccgcattcaagcgattctcccacctcagcctccccagtagctgggattacaggcgtgcgccaccgcgcctggctaatttttgtatttttagtagagacagggtttcaccctgttggccaggctggtctcgaactgctgacctcagatgatccacccgcctcggcctcccaagtgctgggattacaggcgtgacccactgcgcccggcccaaaataattttaataaataaacatgagccaacatgatgaaggggaggaaggagaggaggatgaaggagatgactaatggaacactgatggaggccgggcgcggtggctcacgctgaggatggaggctgaggcaggagaatggcgtgaacccgggaggcggaggttgcttgcagtgagcagagatcgcatcactgcactccagcctgggcgagagagggagactccatctcaaaaaaaaaaaaaacagcaacaacaacagcaaaaaaacactgatggattccaaccttcctttttttacattttctccagtccctgggagcaagttgcagtttttttgtttttttgttttttgttttttctctcttgtgctcagtcgccctgttcttgaggtttcttttctctacactatagttctcaacttattttgggggaaataacttcagcagaatacaatgggaaaagagtctctacccctttctgttcgaaattcatttttatcccttcctgtctgagcaaaaactgtatagaatcaacatcaccccagctctgtgggaaaaaagaaaaacctgctcccttcgccctgctggaagctggagggctctaggcccatgtgtagcagagcattcaattctagctttcttcctgctttctctgtatattgggctcggagagtacactgggtctctatgtgaatatggacagttagcatttaccaacatctttctgtctactttctcttgtttaaaaaaagaaaaaaactttaaaaaatgggattctagaagtcagcaaagggtgggtctgagatgtttgggtgggttaagcggacattttgacaacatggcttctcctttggcatgtttaattgcgatgtttgacacacatccttgcagtttaagatgacgcttttaaaataaattctctcctaatgatgacttgagccctgccactcagtgggagaatcagcagaacctctaggatcttatttggaattgacattctctattgtaattttgttcctgttta

SEQ ID NO: 1880899 - DNA, 4001 bp, Homo sapiens
cttcatcttgattggatagggactcaaacccagctcaagaagatatagtgttaagaattgcaaagcttccaattagggttcacagccccattgggcagataaggtgcctacgcagtgggaatgcagttgggcaggaagatggttcctgtcaattagcaaggaagcacacccttgtcctgaggcacaaagcatagccagcggcaggtgagctggattttatcccccactggtttattcagccaggtgtgcttgtacagtgatcactacacagccatacttcttggccctgttttaactacttgtcctaatgtgtttaaggacagggctctcccgctgggcacggtggttcacatctgtaatcccagcactttgagaggccaaggcgagcggatcacctgaggtcaggagttcaagagcagcctgaccaacatggtgaaaccccgtctctactaaaaatataaaaaaattagctgggcatggtggcaggcacctgtaatcccagctactcgggaggctgaggcacaagaatcacttgaacacaggaggcagaggtaacagtgagccgagattgcaccattgcattccagcctgggcaacaagtgaaactctgtctcaaaagaaaaagggctctccaacaggttttctgcttccatttctgctttccactgggtccaagaaggtttctccctcttcaagtcattgtgcagtttattctgctctacttctctaaagcacaggaccctgttgtttcacatagcctttgcctcaccagtgttgccaaacttcagctccccacgctgggcaacctgcgcctgtgcaccattcaggtgatgatctgtcatctcacaagggctccaacagatgctgggaccgcctttgagacagaatgccaggcacacttctgatatgtgaaagtatttccacccttgcaataatttaagaaacatccgggccaggcgcagtggcccacgcctgtaatcccagcactttgggaggccgaggcgggcggatcacgaggtcaggagatcgagaccatcctggctaacatggtgaaaccccgtctctactaaaaatacaaaaaaattagccgggtgaggtggcgggcgcctgtagttcccagctactcgggaggctgaggcaggagaatggcgtgaacccgtgaggcggagcttacagtgagccgagatcgcgccactgcactccagcctgggcgacagagcgagactccgtctcaaaaaaaaaaaaaagaaaaagaaaaagtaaaaaaaaaagaaacatccaggaatgcactcatagcctgtaagtttttggtgaagctggtcagtaatttttcccacactatcctgtttccttttcccagattcctccgggtctctcaccttcccctctttgcttaccaacactggccatgttaatccttacctactctacactgacacctacatgtgtctatttagaatggatgtcctctggtctctgccgtcttatttcaaataagtgttgatcagtcgggaaacacgtcttggacactgatttctggctagtacattgtgtacttgtatgcaggaaagcaaaaagtatctaatgaaagcagccctcctccggagtttgctgagccacaggaaccataagccaaatcccaggcgcttggatttcttaagaaacagccaagtctttgtgtctgcttctctggacccaccgcagccctggccagaggcaggcatggggcgccacgttgagagagcttcctagaggactcaccgttggccggtgcaggctgcaaaatgtgcgcagtggcggagagacgctcctccagccatgtgcacggcgacaatcccaggtagagctggaatgcaggctgccccgagatccccacctgctgacgcttccccggcaggaatcggttaaacggaacctctagtcatctcggttttagagcggtcttcacgccacagccctccgcgcccaggtcctccgaagttgggacaccgcccacgtttcccccgtgacgcgggcgcgggggctcgggagttgtagtctcgggcagggcgcgggcaccgaggccggggctgcgcggactccacgtcccggcgggcggcgcggcgaggcctggggcctccaggggcggggccgctcggccctttaaacctttcagggctgctccgagggccgcagctagagtcggcgccacgagggggccgagcagggtgcggcggcggcggggcgctccggggaggtgcgtactgggctccttcccttcctccgggcttccaggaatcacctggggactctcgcgtcccgggtcctggggggtcgccggccgcagggtccggccccagccggggtccccgcgcccaggcgagcgggggccgggccgggctgggctttccgcgtgaacccgcccctcgcccagggcgccgatggtcaggtggttgcctgcgcgccgccgactcgccaccgctccactgggccggcacccagcctctccttggcgtggcctcttcggttgtccagcccttctcccagccctggtccctcagaaggagggtaactcccttccagatgttacggtccgcctgcgtctctcagcacgccggtggcatttgggttgaccgcggaggcccccagtgccagagggtgttcacgttctgccgtgggctcagcccaaactttggacgctcagagacccaacgggagcgctggataaggtgttgacccccttcccctcccccttcccggccagttacccactcctggactttgatctctctccaccaggccaggacagctgatggttgtggcagaaacatctcaaggtagctggtccgcccccacttccccatctacctcttgtcctccccccaacaccaccaccaccctggctcccctccctcatgaccgcctggatcctcctgcctgtcagcctgtcagcgttctccatcactggcatatggactgtgtgagtaaaggggggtgcccggggggcaacaggagcttgatgacgcacacaaagtctcttgtcctgtcatagccacggtggtacccagggtcactctgggtgtctcaaaagcctgacttggtgcctgggcacacagccccttgggacaagctggcaccactgctgtccagcagggtggccctgacaaatatacttctagccagggcaatttccagagggcctgtagctgggggcatgctgcaggtgctggtgtggcatcaagccttagggacctcaacttgagtccccagcaacaataatgaggctgaatggggccagaaatcaaggttgaagagaagggtcatggggtgggttgagtggggctcgggaaggctgccagggtgacagttctgttcccacaggtatgccatggctgtgatgaaccaccatgtatgccctgtggagaactggtatgaaggactctgcagacaaccttgctctaaagcttccttcatctctgtcccctcttgggcctgaggctgccacgagccagactgcaaccctgagcctcactgctcttctctgaaattggtccccaggcatggcttcttgccacctacccacttcccactatccctttgcccctttggttactgcttcaggcgggcactggggagtgggatcttctgtccctgtaggggaggtctgggagagagtcctctttgaggcctgaggctataggccaagggcctgggggcagtcccttcccccagtctactccctgtcctgcctgccaggtcctacaacgagtcctgccctcctgaccctgctgagcaagggggtcccaagacctgctgcaccctggacgatgtccccctcatcaggtaaggcctggacattgggccggtcagggagatctaagggcctcccagacagcccctcaagcaaagagctgtccttgggtctcaggaacaataagtatcctaagagccacttaataacaacactacttgacagttactgtggggcaggcactctgctgagtgctttatatgcattgtct

SEQ ID NO: 1880900 - DNA, 4001 bp, Homo sapiens; identical to SEQ ID NO: 3981

SEQ ID NO: 1880901 - DNA, 4001 bp, Homo sapiens
tgcttgctagcaaatctgttgtagaaagaaaaatttattttaatcagtcttgtgtgcactctatgaaaccataatcaagtgatatcaagactataatcaaatatgatcaagtgaaatggatagtccatttgtgagagagggatggcttgtaaataatatgtctcaaaaagagaaacactaatgagaagggtaagcattaagttcatgactctttggggatcatgaccaggtgtgtgtgtgtgtgtgtgtgtgtgtgtgtgtgtatatgtatatataaagtaaagtatatctatataaagtatatatataaagtatatatatagagtatatatatataaagtgtatatatatatatagtgtgttgtgtaactattatttcatccaattcaactttcttacactttcagtttaaataatgaagggtttcatgagattatataccttttgtggagaaatatatatttttcagatgtgtgtgctagtatgctcagactgccataacgaaataccactgggtagcttaaacgacagacatttatttctctcagttctagaaactgggaagttcaagatcaaggtgatggccgattcagtttctaatgacaactctcctttcagtttgcagataggcatcctcttcctgagtattcacacggcagagagtaaataagaaggagaaattgtcccaaatctctctctctcttcctcttcttataaggccacagtcttacggcattagggccccacccttatgacctctttcaatcttaattatctcctaaaggctctatctccagacagtcaccttggtgattagggcttccatatgaatttgaggggggaccacaatttagtccacagtggtttggctacagattttcattttttggtcactttaacaatttttttttcttttttgaaactgggtattgctctgttgcccaggctggagtacagtggcatgaacatggctcactgtagccttggtcttctgagttcaagtgatcttcctgccttggcctcccatgtagctgcatttggctaatttttaaatttttggtggagatggggtctctccatcttgcctgggctggtctcagactcttaagctcaagtgatccttccgccttggcctcccaaagtaccaggatttcaggtgtgaggcaccatgcccagccttacttttacaaatattacatataggttcaaagtgttatgttggtggatacattcattgtaatcttcctatctcaaggtcaaaaacttaattacatttgtaaagtaccctttgccatgtaaggtaacataatgacaggttctgggggttaggatgtggactgacattcagggttgcctttattctgtctaccacatgagccaagagtagagcaaaatctaggattcattcatttatttagtaattgtcttttagggaataaataagtgccaggcaatacactctgtgtgtatatttttaaatggttaaaaatgagattctggctgactggaggagtcactaggctttatctgtgaggatcaggagaagtcctaagtttaaaatgaattttgcttcagtatttgatattagattgacaagtccttcctagaactgtgagagaggaaactagaagtaagttaatctactacataaagttttaaatagggaagaagaaaatctcagaaccacaaagtaccttgtcggtttttcacagaaggataaattgaatgatacaatgtgggggagaaactggaaataatactgttttcttaggagactgtctagaactaacagaaagcggctccaaatagaggggccagataacatgtaaatgaattaaatatttaatgcctactcattaatgcataaagggaataaattatattttctaaacatttcagcacagccacagagaccacaaaagtacaaacataattgatcacaatctatgataatcaattcagcttacatctggatcccatgaattagttattaggactgacaacttcagaatgagtatcaactggctttctgattctgaaaaaagagggatagaataacataatgaagcttgggatttaatttaaaagcaaaggcaatcaaaattgagtcaggtgacttctgtaccaaaatcttacgtattttgtaatcccatagtttcaactgggatcttattttactagtttatagttatataaatgataaagtatatttagccaataactttacttgcaaaaacatctaactttcattttaatatggcattctgatcaaacttgtttgtttccttcaaaaggccatccttaaattgataataaagaggttgattaaaatatgtataaatccacaatcatgaaaagaataggaagggagccattatcagcagaaaatgtcaacagctatctgttagaaagaaaataactgagctttaaactggggtagagaaagttattgctggaattctgcagtaaggggttacaaccagagagtcaatatgacctgcaggacccaaaagcaattcacttctcaaaaacacaggaaggtgggagaagacagtgaggaagaggatacctgaaaatgactgtcttcaaatcagctgcattcccgctacccctcttaccctctactcccacttccatccaaatctacgatatccgggagtcaaggcttccacctcccaggcagtgcaatatcatcaacgaacacattttttttttttaagtagcaaagtttttctttagagaagtagaaaaaaaaattctgtcttggggtatataggctgtgtcttgaaactagagactagaatagcaagtagagttataatagctagtatagattcaagaacaaaatatctaaattttattaagtaggaatctcccaacaaaatagccttatattactatttcatcaattgcctcatgtttaaacatgaatgtacagtcaaaggtaatacatacgttaggaaaattcagtctcagtttagatgcgagcagtttatatgggaggtgatttctagaaatgccagtgtgaaagtggggaagtgagactaggaagggaaagaggctcaagcctgtgtgcatctggagcagaatcccactggggaactctggcaattcagtgagaaatctcccctcagagtgattccagagaggggtgagcattctgtggtctgctctgcccagaaaatgaaagagaaagacaaggaaaggcaaggcaagacaagaaggaggaagggagggaagaaaaggaggagggagggagaaggaaaggaaaaaaagaaaaaccattgaggaatcgaactcttttagggaatgggtcagaacttccacagtaaaactcagattaaattctccagtaaatttgcaaaacaaaaacagaaacaaaccaaaaaaacacaaaattgccccaaaatcttcattgaaaaagaataggctattacatacaaacaaaaatctaaaaacgtgaaggagcccttggaatttaaaatatgacttttacaaatctatggaagtcttagaagaaaagtcaaggattcttatgaaaaaaaggaaaatatggggaaaaggaaattggaaactctaggatagaacaaattcacactagttacacaggaaggaaaatgtaatcgtagttaactacttggttgttagtgaaaaataaattatcaatgtgtttataattccatcatttagaatcatcctatgagcaaagcttgataggaaactgtaaatgttatcaaccttgacaataaaaagtagaaatggcagtttgggagtagacagggaaaatgtgggatgaaaaggggagagacagtagcatcttcatcttaccaaatggcgaatccagagaaaatttctgtagttttagaataagaaataaagctaagtatatcatttaaaagtgcacagaagagccgggggtggtggtgcacgcctgtaatcccatcactttgggaggctgaggcagcggatcacgaagtcaggagatcagaccatcctggcta

SEQ ID NO: 1880902 - DNA, 4001 bp, Homo sapiens
gctaatacttacacgttagaaccattctgagtcctcaagaatctcatttaactcttattatcagtgaatttatcatccccaattttacataaggaaatggggttagaaagaccaaataacattttttcaacatcaaaacactagcttgagatcaagcccagacttgatctgttgtctgaattccaagctttttgttatttattgatatgttttgttgttttcatgcaataatgcaaatcttagcccattttgttagtagtaccaactgtaagtcaccttatcttcatactttgtctttatgtaaacctaaattagatctgtttttgatactgagggaaaaacaagggaatctaacactaaccagcccgtagtgtgtggtcaacactttcgttactttagtatacatcaccccagttgtttgtcttcaccacacactttggagttaggtagtagtatctatttttacaaataagaaaacccaggcacaaaggggttgattagcaattatcttttgaaaagcctgtagttgctcatctgaagaagtgacggaccacctcttatttagtggacagacaataactagtggagaagacaggggattttgttggcggaaaaaaatttttatcaaaagtcgtctcctatcagggagttttatgagaaaccctagctcctcagttccacagtgggtaactgtaattcactctaggtctgcgatatttcctgcctatccattttgttaactcttcaatgcattccacaaatgcctaagtattctttaataatggtgggtttttttttttgcatctatgaagttttttcaaattctttttaagtgacaaaacttgtacatgtgtatcgcacaaaatttctagtcgacagcactgctttacagaatgtaaaccgtgcactcccaggaaaatgcagacacagcacgcctctttgggaccgcggtttatactttcgaagtgctcggagcccttcctccagaccgttctcccacaccccgctccagggtctctcccggagttacaggcctcgctgtaggccccgggaacccaacgcggtgtcagagaagtggggtcccctacgagggaccaggagatccgggcgggcagcagctgcggaagagccgcgcgaggcttcccagaacccggccggggcgggaagacgcaggagtggggaggcggaaccgggaccccgcagagcccgggtccctgcgccccacaagccttggcttccctgctagggccgggcaaggccgggtgcagggcgcggctccagggaggaagctccggggcgagcccaagacgcctcccgggcggtcggggcccagcggcggcgttcgcagtggagccgggcaccgggcagcggccgcggaacaccagcttggcgcaggcttctcggtcaggaacggtcccgggcctcccgcccgcctccctccagcccctccgggtcccctacttcgccccgccaggcccccacgaccctacttcccgcggccccggacgcctcctcacccgcgagccgccctcccggaagctcccgccgccgcttccgctctgccggagccgctgggtcctagccccgccacctccgcccgcgcctccgggtcctaacgccgccgctcaccctccgctgcgccctccccgagcgcggctccaggaccccgtcgacccggagcgctgtcctggtggaccgagtcgcgggcctgggcacggaactcacgctcactccgagctcccgacgtgcacacggctcccatccgttgtcttccgagcgtcaggccgcccctacccgtgctttctgctctgcagaccctcttcctagacctccgtcctttgtcccatcgctgccttcccctcaagctcagggccaagctgtccgccagcctcggctcctccgggcagccctcgccctgggtgcgccccggggcaggacccccagcccaggcccagggcccgcccctgccctccagccctacacattgacccgctttcctgcgtctctcagcctatctgaccttgtctttacctctgtgggcagctcccttgtgatctgtttagttcccacccccctttaagaattaaatagagaagccagacgcaaaactacagatatcgtatgagtccacttttgtgaagtgcctagagtagtcagaattcacagagacagaagcagtggtcgccaggaatggggaagcaaggcggagttgggcagctcgtgttcaatgggtagagtttcaggctggggtgatggaaaggtgctggaaatgagtggtagtgatggcggcacaacggtgtgaatctacttaatcccactgaactgtatgctgaaaaatggtttagacggtgaattttaggttatgtatgttttaccccaatttttaaaaagctagtgaaaagctggtaaaaagaaagaaaagaggcttttttaaaaagttaaatatataaaaagagcatcatcagtccaaagtccagcagttgtccctcctggaatccgttggcttccctccggcatttttggctcttgccttttagggttgccagattaaaagacaggatgcccagctagtttgaattttagataaacaacgaataatttcgtagcataaatatttcccaagcttagtttgggacatacttatgctaaaaaacattattggttgtttatctgagattcaaaattaagcattttatattttatttgctgcctctggccaccctactctcttcctaacactctctccctctcccagttttgtccgccttccctgcctcctcttctgggggagttagattgagttgtaacaagaacatgccactgtctcactggctgcagcgtgtggtccccttaccagaggtaaggaagagatggatctccactcatgttgtagacagaatgtttatgtcctctccaaattcttatgttgaaaccctaacccctaatgtgatggtatgtggagatgggcctttggtaggtaattacggttagatgaggtcatggggtggggccctcattatagatctggtaagaaaagagagcattgtctctctgtctccctctctctctctctctctctctctctctctctatctctatctcatttctctctctctctctatctcatttctctctctctctttctctcctctgtcttttcccaccaagtgaggatgcgaagagaaggtggctgtctgcaaaccaggaagagagccctcaccaggaacccgtccagctgccaccttgaacttggacttccaagcctccagaactgtgagggataaatgtatgattttaaagtcgcccagtgtgtggtattttgttttgactaatacaacctgaaaacattttcccctcactccacctgagcaatatctgagtggcttaaggtactcaggacacaacaaaggagaaatgtcccatgcacaaggtgcacccatgcctgggtaaagcagcctggcacagagggaagcacacaggctcagggctctgctattcattctttgtgtgaccctgggcaagccatgaatggagcttcagtcaccccatttgtaatgggatttaattgtgcttgccctgcctccttttgagggctgtagagaaaagatgtcaaagtattttgtaatctggctgggcgtggtggctcatgcctgtaatcccagcactttggtaggctgacgcgagaggactgcttgagcccaagagtttgagatcagcctgggcaatattgtgagattccatctctacaaaaataaaataaaatagccagtcatggtgtcacacacctgtagtcccagctacatgggaggctgaggcgggaggatcacttgagcttgggagattgaggctgcagtgagctatgattgtaccactgcactccaggctgggcgacagagagagaccctgtctcagggaaaaaaaaaagtactttgtaatctgtaaggtttatttcaacacacacaaaaaaagtgtatatgctccacgatgcctgtgaatataca

SEQ ID NO: 1880903 - DNA, 4001 bp, Homo sapiens; identical to SEQ ID NO: 3997

SEQ ID NO: 1880904 - DNA, 4001 bp, Homo sapiens
tttctttttaatggtggctcacacctgatccagcactttgggagggagaggcgggaggatggtttgagcccaggagttccaggctgcgatgagctatgacagtagcactgcactccggactgggacagagctacgccatccctaaacaacaacaacaaaaaacaaaaacaacccaaaatgcaatgtaaagaaattttactttgtgtagaaatcaggaagggcatcatacattagataatctgaactgaacattggaatagcaacaggtagccaggcttggtggctcacgcctgtaatcccagtattacgggaggccgatgtaggcagactgcttgagcccaggagttggagaccagcctaggcaacacggtgaaaccccatctctaccaaaataaaaaataaaaaaataaaaagtacaaaaaaattagttaggtgtggtggcacacacctgtagtcccagctacttgggaggctgaggtggggaggcggaggttgcagtgagctgtgtttgcaccacagcactccgggctgggtgacagattgagaccctgtctcaaaaaaaaaaaaaaaaaaaaaaaagccactggttaccagaagctaagtgatgaacaatacaaggaacgaaggaaaggtagaaaaaaataagccatgtttcatgtttgtcattcagggaaacttaaagcgggatggggtcttacatactttctattctaggcttaacagtccaaattgtattcatcctttatctaccagtttaatccctacctcctccaagcagattctctccataggttttgatccccagagttaacctaccctgcacttgtagtctattacaaccctgatctgataatgactgatcattttttcaggtaacaaaatcaacactttttaaaaactataaacagctataaaatgctagttactatcattattctctaattctttcactagtaatcttcaaaaaaaccttgcaaacctaatctttccacaccctgcttaaatcctttcagttgtgtccgttttttcttagaaaaaaggcataaatcctttgaatgtcctacagatcttgcaatgtctggttcctgcttatccctctagtttcttaaggagataaacttcttcccatcactgagcttctgcatgtgcagaagccctggaaaccttgtcctttactcctagtttgacctagttagcttctgcacataccaaaatctgttttcattcatcccaaatctgttttcactctcattgaaccgtaaccgtgttcctttgtgtgagacaactcatctcggtttgtatttatgtatcgttgctttgattattgaactgagtatctctcccactagaaaataaactccatgagatgggggacattaccattcacatccctgggaataccaggcactcagctgatgcctgtcgaatgtgttaggttgcctcttccaaccacactgcaggcatcctggtgcccgctttggctggactgcactgggggtggcaggacggttgggcgcggaggaactaccccgcggatgagaagaaaggttttaaataggaaacattcctcagtcggcggtcagcttctctggtctcgcgcggctcaagccatgctttgggggacgctgggcgaaggctctggcaaagaggaatgcagaccccaggatccgcactcgcccccaacggcagtccggatcctcgacccggcacccacctcccgaagcagcttcaggtccccgtgctggatctcgtacagctgaatgacgccggtgccccgtgcgaagttgcccatggtcacaaatttggcgctgcagggcacccacttacagtcaaacaccgtgtagttgaagcccttctggatatgggcgatgatctgaggcttctcgaaggccgacatggtgcagccaatttcagctacggcaaccgccacacccagagcccccaaaaacggcaacctggaaaccagactccaaacattggcaatttgtccctcccgctttccgtattctgccccagatgccctggcatgttggctgtagttatccccggataatgccagatgcgctcctgcgatcgcacagaatgttccttcacaacagcacgaatttgtttatcgcctttacccactgcctttcgcacacatacatactagagattacaaaatacttgggctgggagttgcgcggctggagtgagcccaagaccatcaggcatatcttaggacagcctaaccccgttttcccccccaccggccccaaatcctgcaggtccccggcctgtgacgttttaggaaaggggcggagctgcaggggtggttggctgaggctggcttctgcgtggtgcagctgcgcacgtgtttcagccggcagcgctttaagatttccggggatggaatccgaaatggaaacgcagagcgccagggcagaggagggctttacccaggtcacccgcaagggtggccgacgggcgaagaaacgacaggctgaacagctgtccgcagcaggagagggcggggatgcgggccgcatggacacagaggaggccaggccggcgaagaggcccgtcttcccacccctctgtggggacgggctcctggtatgtggctgggaccctaggacagcaacgaggcaagggccagacgcggatcaagccgatggcctctggagaatgttgaagctgcggtggggctgttctgccgtgatgctcagagagaagtgattctttgaagtgtaactagttcagttaaaggaggccctttgtggatcagatgtcattttaaactccatcaccgtccctccatagccttctgagttgtgtgttcttttatttacagagtgggaaagaagaaacaaggaaaattccagtcccagctaacagatacacaccattgaaagaaaactggatgaagatatttactcctattgtggaacatttgggacttcagatacgctttaacttgaaatcaaggaatgtagaaatcagggtaaggaaaatctcaatcatttcccaatacaccaggctttctctcctacagagatgaaaaggcatgaataggctttacttaatgggacttttctgttgtatggtttttgtccagtttaaaaatttaccatattgagtttgaacttcccaaatgccttaaaaatctgcattcgatacaaatattaattgaatttgtaaattagttctgagatcacaccaaaatactggctcttcttctgtgtatcttttataatgttctatgtcaaattgagaaaaggtcgagtaaagagattgccataaacagaagcaggtaaataatgaatataagcacttgctgctttacaagaagtatatacagtcagcgtcgggaatatgttctgggatatgttttgtcagatgacttagtccttgtgcgaatattatagagtgtacttacacaaacctagatggtatgtgtatatttgtttatatatttttttcatatggaaaaccaaatgtcccagcaccattactgaatatcagtcatttcatctacttgatctgcattgccggtatccagtgccatatatcaggtttctgtatattctccattatactgttatgagaccaccatggtatgagcggttggtcactgatcaaaatgtcattatgcagtgcatgactgtgttttaatggtgctcttttgattaaaaaatgtattattttgataagaaacatgcatatatatgtgtgtgtgtgtgtgtgtgtgtgtatatatatctttttattttgctctttcacccaggctggagtgagtggcatgatcttggctcactgttaacaggtgcctgccaccaaacctggctaatttttgtatttttagtagagactgggttttagcatgttggccaggctagtctcgaactcctgacctcaggtgatcacatctcggcctcccaaagtgctgggattacaggcgtgagctgccccaccgagcctatgtatatattttaaattctgtgctatcaatccgggaatta

SEQ ID NO: 1880905 - DNA, 4001 bp, Homo sapiens
actcgggaggctgaggcaggagaatcacttgaacctggcaggtggaggcttcagtgagccgagatggcgccactgcactccaggctggccaacagagcgagactctgtctcaaaaaatatatatatatgcatatatatacgtacgtatatatatgcatatatatatatatgatttgttgaatttcttttagatattttaagaccagtaagctagaaagtgaatactggaagtcttaggtactggtgtttgatctagatgtatgtagaattgaaaaatatactcttcctgctgaaaaactctggatcaaggaatgcttcaaatatcagaattgaatgggtcatgttcatcagatttatatgacttggagttttttaatatgacaattgcctgcccttcacttttattctctaactcataattttaattttaatcttctaagtcatcaacatgtaaaatgtcaaaagataaaatatatattcaaagtcactttttccaggcttttgcaataaaccttggaaattacctgctgtatttctctttttattctgctccattaaaactaaattcattctttattcttataatggccattcatctcctctgacgggttttacaaaacaaactgagacttctgttctttcagttttctactgctctttacgtgaggggatccttccagtcattaatgtttctaaaatactgtagtatgtatatgtatttgtgtgattgtcatttacatatcttattttttgtttaaaatcagacattttagagtaatgacgtccaatagaaacttctgtgataatgataatagaagtgtcctatatctgtgcggtccaatatggtaaccactagccacatgtagctattatgcaattaaaaagtagctagtgcaactgaccaacataattgctaatttcattgaattttaagtaatgttcatgtaaatcgtcatgatattggaagctgacattcgtccaatgagctgtctaccgttttcataagagttgatccagatgctaattattcattttaagtgatcctctatctgccaatttacctttattaaaatgtatgtggataaggagaaagttcatgttggcaaaatagataaaaggcaaatagcaataattcacatattaaaaacttgtcttcgagaactagggatgatctcctctctttagtattttctggtgataaaattaagaaaaatataatttcaactgtgttcccttttcaatgtgctgataaagcaatagttttatcatagaaacagaaatactactgtgaggctttgcattcttttttccataacatcttttctagagcttaattgtcttggaaatatgaatcccctcaggtcagaagcaaacctttgtctaaatacctaagattaacaaagttaaatgaaatggtgcaacaggctactttaaaattaacagcaccatttctttattaaaacagggcttctttggaaacttcggagtaaatcagacatttagtcacagagtagttccagctaacaccatcgacaccatttgttttgctctgcctgaactgtcccctctaacgagactcagaggacaggcttttataactggtctctggatacacgatggtggacccaggactcccagcaccggcttctgcttccggacttgcttccctacctactgtaccttatttcatgccccaaataatgttattttagttcatacaggagacatttcattaggaaaaatattgtcagtggatcaccatctaaaacaattctgtggtgatggcctttgtaaaataaagaatccattttttgtatcagtaatcatctctaattgatctgcttacccaattaagtgtttctctttcttacagtcagatccacctgcagatttttgatgactcccacatgttccttttagtcactattacagtcagtgagtcaaaacacattccagagttaagtcatggcccagtaagaaggggcagctgggagtttgctattctgaggactgtgtaatgaaaggtctattcatgaggtcgttcacgtggtaactataaatcagcaccttggaatgctggaaaatttccaaaatcccaggaactcattttgagcttgcacgcggtcatatttaattttaaaacatgaggccattgaagaaagataacaacaaatttaagtatacctttaaaaaatcattcattcactttactaccctgaaattggaaaaaactaaatattatttttaatattctgactgtagaatgtcagaaatgtgtacatatttctaccaaatatttttgatgtgctgttttcatttgcccattcatctgttcattcatcaaacaaataagtattgagtgcctatttgtggcaggaactattctaggtgcttggagacatcaatgaatgaaagacaaaaagaaaaagaaaaaatcctgcccatggagcatattttctaacaggagatcatacattggatgaaaaaataatgaagaagtaaatggtatatcggaagacagcaagtgctatagaaaacataggccaggatagtgggaatggtgcatgatggaaattcctaattttaattaggatgatgagaatcagccacacgggaaggtgacatttaaactaagacttgaataagtaaatattctcagtgctttgggaggccaaggaaggaggattgcttgaggtcaagagttcaagaccagcttgggcaacatagcaacactccatctctacaaaaaataaaaaattagctgggcttgcggcacatacctgtagacccagctaccagggaggctgaggcaggaggatcccttgagtcctggagttcaaggttacagttagctaagatcatgccactgcactccagcctgggtgacagagcaagaccctgtctcaaaaataaaatatagaaaagaaaatatacatagttatattttgttaaaggcaaatgtatctcctaaggtttgaggcagaatattctctgaatgatcccaggccccctagttggagcaactatattgctgattttttgcagtcacttgaagatagaggaaacataccgcagtaaaatcctcatatcttgccactgtcaccaatgggaagtgtgtggaatcactcctaccctggtttatcagtctgcaccttgtggatttctgatattgttctattctgttctacagggaataggccaagaaaggagagcagagggcaaaaagttcaggtagaaccgcagggctgactgagggcttggagcccacacatgagagccaaaccaggaattagttattataagaaaggtacaggccgggcacaatggctcacgcttataatcccaaaactttgggaggccaaggtgggcagatcatgaagtcaggagtttgagaccagcctggccaacatggtgaaaccccgtctctactaaaaatacaaaaattagctgggcatagtggcatgcacctgtcgtcccagctactcgggaggctgaggcaggaaaatggcttgaacccgggaggtggaggttgcagtgagctgagatcatgccactgcactccagcctcatgacagagcaaggctccatcacaaaaaataataaaaaataaaaaaataaaaaaaaagagagaaagaaaggtacatgggatttgtgttacctaatgggtttgaaattagaatgtcagtacaaagctgaaacacaagaatcccacttcttaaactgagttcatgactccatgtatctattcaggttggcatggctcatgtgactgtcaatgctccaaaataaagacgttagaagttcacaagtgcagacggtgctatgccagagaagtttgatgacaggtattggtgatacaatcctagcaagactgagtttaagaataaaaagcccagtcactaaggattagggcatggctaaaagaaactcagtgttctggggcagtgattttgaaaaaatggaaagaaggaaaggaaggaggaagggaaggagggaaggat

SEQ ID NO: 1880906 - DNA, 4001 bp, Homo sapiens
ttctgtagacaatgtaaaacatataaccactttgggaaacagtttaccattttcttagaaagttaaatatatactgcctacatgagtcagcaaccctacccctaagaatttgctcaggagaaatgaaaacttatgctcaggcaaagatgtatacataagtatttatagcaactttattcataacagccccaaattgggtacaacccaaatacccatcaagtcatgaatggcaaaacaaaactagtaaaataaataaataaataaataaataaataaaaacctatgcataaatacaatagtctagctgtatctcaaaagcattctgtacagtaaacaaaacttgatacaagggtacatactatataattatttttagtattgaaatatctatgcatcactttaataacaaatcattgtaactgagttcaaaataaaggaaagaagatgctttatttagcttccaatttctgggagactcaagaattataagtattctggacaacaaaagaaaataagactgtgcttacagagcttgttctgccatattctttctttaggatggctattttattgttgccctttttgttacatggaatgtgcacaacaggttttaaaaggtacaacatttctataactgagtgccactttcagaaactgaacaggcaaagaaattacactgaacatcagcatctggcagtattttttgggaaaaacgtgactaaaatggatttaaatgaacactattaaatcacatctaatatttgatactacatgactctatacagctatatgatacaattatacaaaatgtgttaacatcaaagaatataaccaaaattcatatagcaaacaaatcctatataactttttttacaggaaaatatttttgaagcatgcatgtaactgcccattctttcaaagaaaatctattgcaagcaaaattatcaacctccagaaaaatcacacatagcattactaagcatatcttcaaaaagtgtacaatatgcacacttagaaaataaaaaatttaaaaaattataagcaacaaatgagcttcatacttgcaagaatgtaaacagaagtcccatttttagcactgttgtataaagaattgtcttttgcatctacgagttgtcctgttgggaacacactttacaaaaaaaccatgtttttgaaacaagattagagagcaagataaagcatcttttaaagcctttttaaaattcatgtgtgtggaaattgaagtccagtgaaaagcatttcccacggtcttcaaacgtgaactgaaacagcttctctccagtgtgaaccagtttgtgtggtttttgttttgagctctcaacaaaagctcttctacattctgtgcagaagtggactccgtgacagtgagtgtgcagatgttttctcatgtcagttatccttgaacatctttgtgcagccttggcgagggccagctattgttcatggaacatcatcttttaaatttttcttggcttcattctggcgaattctgcagttttttgggatctgagctgtcaatgccaggtattcctccaaggaggaagtttctttcctgtcatatactctgaataatcaggaggtgagttctctccagtgatctgtttctcaaccactattttatggttaatgtctttttgttttcatccgagtaccacatggagacagataacttgccctccaggttcctgatctgcactcgcttctgcccccacttcttgttgcccaagatggtgccacatccacccttgccagcccccacgatggtgaccagggcctgctcgaggtggtggtggtggtcgccgctggccagctctggcaccaggatgagtatctggttccccatccaagtcgtcgctacccaccacctcctggcatgcctgcaccaggatcacctcctggtggtggtgaacctgggtgaggtcgtcgtgaggaatggctgcagcagatcctggccaggtggtgtgggtggtcacaccctatgcctatggccacccctgccaccgtcttcattgtcattgtcctcctcctcgcctaccatcatggtctcaatggtcttcaccaggatgatgtccacctagatctactgcagctgcaagatctcagccagcatctccgaggcgtctgtacccatgcagagggtgtcatccagtggcctgggctcctcagctgtggtggcaggcaaggaggtggccaactgtgaggaaggaagcttaatttttataaagatctagaataggaaaaacgaagctatggtaatagtaatcagactgtctcagaacaggggatatgggaatttcctgcaaagagggatgcaagagacattttgagatgatggaagtactgtatgtcttgaatagggtgctgataatgtgggtgtacacatttgtcaaaagtcatctaagcgttctcataatctgtgcattttactgtgtataaattatacttcaataaagtgataaaaaatttaagatagataaatagatcaagctatgagtagatattcttcatacaaataggccccaggtcgattccccagatgtgtatacctaaattctttggacctttggtctggggtccttgtttttctccaatgtttgaaaaggcaatttccccttctgtgagtgaactagggaaaaatactctaattgatttgatcagcaaacccaaaccttcctctatttaaagagaaaccaatttgaacattctgtaactgcatacagatcttgccttgcttgaaggggtctgcctagtaatcccataatacataactctatttcaaatgggattgaggttactgaggcagagcagaaacatttgctatgcttatttgcattaaccaatagttggactggccttggggctcaaagatatttgtggaaggctctatggtctactgagctgatgaaatggcatggctttctgtatacatagagataactttttgataactatgatcactaacaaatgttgctacagagagatttagacaagcatagtctctgattagaagggatttataatctagcatggataatattggcatggttcaacatgtggaggatttaaaacagacagaaaaagatactaaccaatacacaaaatgacatatttcaattctctatgtatccaaattttgagccttgtatttgggagtcattggaaaacccaaacaaaaacttaactaaaaagatttaatttcattacccttttattcttgatctttatgtacctaataaaaacaaagtattgaatcaaaaatggaattaacctcagaaatttagaagatatctgacaaggtagaatagagctgcaaaaaatgttttggaaaaatttcaacccctgaatattgaactatgactttacaagtaactggccccattcctcatccttctgcctatgtgtagagaggccccacattctcactgggaatgtagtagaggtcaacgggtatgactttttgttttatgatgcacaccagcatcatgggagtaggtaaggcatgtgtcaagctcagctcaaaagagctaatagtcacaaaaggttacacacctaatacatatcattcacaagtgccctctgattagttctcctcatggttctctctaacacgacacataaagagcaatgaggagctgttatcttaaaatctggagcaaggatgcccagaaataaaacctttattctcagtttggagttgttggtctttgaatctcatctgctctcatcctcttccttcactctctgctagccattgtggccccttggcattactcaaacattccaaacaggatctccatcttctcaccagctggaatggtctttctccagatagtcacaagatttggtccctcacttcttccgtctttgttcaagcatcatcttagggagataggctccaaatatcctattacaaattgcacaaccaaccagtatctccctagctccttcctgcttgaatttctttgtctttatcaccatct

SEQ ID NO: 1880907 - DNA, 4001 bp, Homo sapiens; identical to SEQ ID NO: 4030

SEQ ID NO: 1880908 - DNA, 4001 bp, Homo sapiens
tgtgctctgaggttctcaagcactttcactctttaggaaaaaaaaaaaagtctcacagttatttaagaaattgagcctgaaccatccgaggataggagatttcttccttttccgataaatgcctgtgctcagcatcctcaaatttggctgtctttatttacttctatattagttccaattatgtgcagtgtaaaccagctttttgattaacaaaacagcagagcattggttaagaacacttaaacttcaaaaaaattcccctgggaagtgggctctgaattggttaataatgtgcagtacttgctaaattgctgacttccagatgtggaaaatatctttcttgtttaggacctatgtaacctgattggattacgacagaagcgtcacgttggaagcttttgagtgattatttaattaaccatacagtagaaagctgtattctccaggaaatcccttccatatttgcataaccaatcccttcagagcaaaggtggagtcttttctttttaatcttactttaattgtaatatcaaaaaatatatactccaaaacttagaccccatgccgtttaatatcatgctctcccttccctgctaagtttctctatggcctttctcgtttctcctcctgcctccctacacactctcccttactttgtagtgaggtctccccgaggtgtagagagattcagagatcggccaaccgagtgttctattttaatttacttagagaccctttattaaaatgccaaactactttttaatattgggatccagtccagaaattcatcatgcacacaccctaatacacatgccctaagatgcagctcccatgcagcatttttttttctggctctggtacctaaaaagaaaaaaataacaataagagaaagggcagagaactttgttccagaagctgtactgagatacctacacaatttgatgtgcatctcaaatctggtcattagagatatctgtataagaagagactatctggattgaggacccgggatctttccctttaactttcgccccttggagttctccagttctgtgaatggtgtgcaccgttttccgccctgtactctgtaggatttagtgatgaggataatgatgccaaaggcttgacgggcggggaggggggggtggagggggggagaagggagggaggggggagggaggcgaaggcgaaagggagggagaggaggaagggagggaggtggaatttcatttcttccactaaagcgtttgcggagacttcaaggtataatctatcccagatcctttcccagagagaaacttggcgatcacgttttcacatgatgctcacgctcagggcgcttcaattatccctccccacaaagataggtggcgcgtgtttcagggtctctcgtctctctcctacagaaaagaaaaagaaaaaaatgtcattagaagaggcgtaacacgtcagtccgtccccaggtttgtgtttcctggagtggccgaaagagatcagttctaacctgctctgcaggaataacggtcctgcctcccgacactcttggcgaggtttttgtacagtttgctccgggagctgtttcttcgcttccacctttttctcccccacacttcgcggcttcttcatgctttttcttctcaccatttctggccaaaactacaaacaagacttcgcaggtaggttttttttcctccccttttctctctttttatccctttttggtgtgctcgtcctccatcctccttttctaattttctcattttgagtggggatgtgagtctgaagtgagaaggggtgtccgtgggtaggaatttcaggtgggtttagctcctttatggcaagcttttctcaagagtggcttcttcgctttctcttacactcacactctctctccttgcttttctctcctttttccctcccccaaataatttcccctgtacctgttcattcaggtaaccaaaggtgtcctttgctatccagcccaggaaaagttttattgagaattatatggctggaataaaaactcatcaaggggagaggtcctgctctattttcgcatctagttccaattcattatattcagcaattaggacttggcaaatacctgttaataattacaaaacttggtcagttacagacctacaaattcgggggcaagtctttctcttagacatggcagttcatcctctcccaccgagaaggctgttttctaagcagaaagttgtctgtttttgtctgcttagcgagtttcatttctttatttcattctttgtgtgtgtatgtgtgtgaagtaacacctcacttctgtgattataaataaagaagtgaaagtcctcatggaacttgagtcgtttaccaaagtggaggggggggcactacagctgggaagaaaactgctgtcaggatatcagggttttaaattaggataacttttaaaattgtatttttagtggcaaagtaatatagacatggatttaatagaagacacatacacacatatatcccattccatactttggcactgaaaagtcgagagagagatagcaggagttcccaggaacagtgatgagcccggctaacatgaatgtgtttatctcccacctactgatatattttacatgctccccctgtaatgatgaaggcaagattactaactccagacttaggagtaacaggcaaagataaagtttacagcacaaatgccctgtctctctctctcacacacacacatgcccataaaactagcaacttactttattaaacatgtatttatatgcagtcgtgtgtctcaggatgaatatagacaggccagctgtttcatcccagacacttgtgtgaccatttctttatttcaggatttcccctaacaatttcaaatcaataggacaaggaaagaaatgataaaatatgtcaaacttaaaagtctcctactatgtatgcctaggtaaatttaaggtgctttctaaaatatccacttccccttctctctgcccccctcccttcacccctctcagcaaatgtgtggaaactgatactcactttccaggttttctgcaaagcttctagcacaggagacaataggtgtggggcgtggggactgagtgtgcccggcagagaaagggttaatggcccttgtgttacagtttgcatctgttacatcttttatagccccctgtttaaactaatcctcgaggcacagcatcttcccaacctccaccgagttttcaggattctcctcctctcctgcctgcctccgaggtcccccttctccaagttttgacagtttcaactgaaaaaatgcagcgcctctctcgatttttaggtacaaaagtttcgaagccagaaaggatacgatcatttagtagagcttaaaagtattgccgtagtggttggactttctctttcctttcttaagggaaaaaaaaaattctactggaactatttaagggaaccagtgtgggggagcatgtgtgtgagtgaggtggggggaaatacttaagtaaatattgtcaaagtggcgagggggggtggggtaaaggacagtgtccaaagaggcttataattatatttatcattgcggcgtaaaacgggaaatcttaatttgggggcgagggtggggggaggaagagacagtgcctcgataaactccaaaaggggaggggagggggcgctgggcgagtgggcttcctataattactattatcaatttgcccgagtgtgcttcatccaggggctgtttcgcgttgtttgtttgtttgtttcctctgggaattggggggtggggggatgagaaaagatgagaacgaaaagaaaacctcgcctcaccccaagttcccgagccgggggctgaggacttttcgaaggaaagggtccgcctagccctgagtcaagcggtcttactgtaccgccgtgtgcattccctcatacggtcaggagttatgactcattttgaagatgtaattcttgtctctctgatcccctcgcgggtgcaacacaccaaa

SEQ ID NO: 1880909 - DNA, 4001 bp, Homo sapiens; identical to SEQ ID NO: 4033

SEQ ID NO: 1880910 - DNA, 4001 bp, Homo sapiens
ttggttgggctggtcttgaactccagaactcaggtgatccacctgcctcggcctcccaaagtgctgggattacaggcgtgaggcaccgcgccgggcctggcttcccgaaactcttatcttctctcttctggcgtcctaagggcactctgtacacagccctatcagaaacgaggtcacactgcactgttgtttacctgtcagtctctctccctagatgtatagcttttttagtaatttgttgacattatcacttcaatgatattactttgtgatactgacattatcacttcaacgaacacaaatcacccacaatcgaagattccagtgaagaaccacagatatggagctgcattggagtaaagctaggtatcttgtacaaaaccagtggttcctcacctataacgtaacacatttggagaaatttcaaactcattaactgactatggcctcaaactaaatatgggaacataactgaggaatgaatgacaattgaattgcataccctgttatacatggctaaaatgagtttaagctgaataattagtaattaataagaatgatgggaatcacttcatgaaattgagtcacagacaagatgcaaaaagaaaaaaagaagaagaaaccaggccgggcgcggtggctcaggcctgtaatcccagcactttgggaggccaaggcgggccgatcacctgaggtcagaagttcgagaccagcctggcgaacattgtgaaaccctgtttctactaaaaatacaaaaaatcagcagggtgtggtggcacacgcctgtaatcccagctactcgggaggctgaggcaggagaatcgctggaacccgggaggcggaggttgcagtgagccgagatcgcaccattgcaccccagcttgggcaacaagagcgaaactccgtctcaaaaaaaaaacaaacaaaaaccaagatcctgcaatctgatagtccctatttccagaatcccatggactcaaaacaacagatcacagggattcacaaggtggctggaaagtgcactcccgtggtcagagggattctctggaaactgcagcctccacttactgaatattatcgctgttctggggaatcttcaagcttgaccatacatggcctccggggggagccaaggaggacgctgagccgtcaagattaagaaccttcacctgcgggagggcagggtgaggtaggagacaggtgggcaccagagaagaaatacgcttatcttccgggcaggagggctgaggaagagaaaggacagactaaggcagagagaaggcctggagaaacaacgggccccggcctagcgacccaggttcccacctgcctctggctctgactcaccgcgtggtcttggacagacacagtcgcttcgcttctctgggcctcagctttcctatctgtaaaatggaggtgatgacagtgtccacatcgtcgggcaggagctggatcataagagccagcgaactggaaaggcggtttgtaacctggaaggcttgggatggagcatcgtcatgattttgtcctgagagcagcaggtacccgggcggggtccagaaccgtgacgcgactgcagcgccggggcccagctcgtctgggtgctcccttcagtacctccttccgagagttcccagcgcccaggcccaccctgatcccggggctcgaaaaactttgcctccagctcgctccacccgcattcccttcccagttccgccccgcagccgctcactcacctccagacccagagccggcgggagccgcatctctatggtcggccgcggctggaacggcccccggggcccgctttgtgcgaccgcctccggctcagccgcctctaggatattggggatgtggaagccactctctcttcctcttgccggctgccggggtactctatgttttgtctctgtggtttttcccgccctccacccccactccagccctgaagccggagaagcaccatcgagagctctggggtagagtggcgtgggcttctctgtgggtgtggcgggaagtagatgaaaggacccggggcggggccgaacgcagcttccccaaggtgcaggcgcggtgaaaccatcgagacggagggccagagagtcacggcggtgagagggctgagtgacgggttaccccaaaccatgtggctggaggcgcgagctggggtgtgggcgaggttcaggagggggttcctgggtgtcgcggaggggccggggacgggagagctttgtctgtggccttccatgcataggtgttttggaattctggatcccagttctgaggctcagccgaggtcactgctgtcagctcacctccctgcatgccaggcgcagggcaaagtggccggggttcggggttggaggagaggtgtactagaaacaactttgctcttgtccctcaggatcttattgtctacgatgtgacgatccgtggagaaagtagcagatgggcagattttcatttggggagaatgagggagaaaagaacgggcattccgagccaagagcactgcatgagcaaggagttgggaggttgcttacttgttgaacatatttgttgcgtatttgcatatttgctaaacaggtagtgttaggagctaatccatgaaaggtaggtgggcgccgtattgtagagagccttgagtaccaggctgagtttatacccaattcaggggtctgctgggagccagccattgaaggtgctggagcagagagagatatggtattggagctgatccctatgatgaaagatctggacccttgtgtagatgttccgtgaagcaggaggtgaagacctattaaaatgccatttcaagaactacgattttaaagacagtttaggtgggaggtaataaaggtctaaacaagacgttaaatattggggacgtaagggggaggatatttgaaggacattactcataacaagacatagggttactgacaagtcaacggacgcttctcccttgctgactgcagccaatggacccctttttatcatagctggtcccagggaccacaaaaatcctgtccatccattaccctgatgtgaagcctgtttatatagctctttttggtttaaggcatctccagacatggtcctctggtaggaaacaggtatgagtagactaatgaaggacaaaatgggatgagggacctggagcctccacccttgcattccaataccacccttaccccacaaaaggagggtattgacccacacagtaatgctgacctgtggccagggctggggaggtccaatttctaatctgtgctttgtcccatctccactgttccccacccctaggttttcgtaacaccccagggcctgtaaggtttggtgtttccctttcaagatgccactttcagactttattctggctctgaaggacaatccctactttggggctggatttgggctggtgggtgtgggcacagccctggccctggcccggaagggtgtccaactgggcctggtggcattccggcgccattacatgatcacactggaagtccctgctcgagacaggagctatgcctggttgcttagctggctcacccgccacagtacccgtactcagcacctcagtgtcgagacttcgtaccttcagcatgagagtggccgcatttccactaagtttgaatttgtccccagccctggaaaccattttatctggtaaggtggggagctagggagggctgtgagagtagaaaagaatgatgggagctgggtttgacccattcactcactcagttttgatcgttcttattcaggtatcgggggaaatggattcgggtagaacgaagtcgagagatgcagatgatagacttgcagacggggactccttgggaatctgtcaccttcacggccctgggcactgaccgaaaggttttcttcaacatcctggaggaaggtgtgggatggcacaggcaggctttctagggacattgcagggatggggacatttgacatcagatgagcagtttggagaagtggaataa

SEQ ID NO: 1880911 - DNA, 4001 bp, Homo sapiens; identical to SEQ ID NO: 4037

SEQ ID NO: 1880912 - DNA, 4001 bp, Homo sapiens
ttcagaaaataataagatacaagtcatgtataacttaaatgtatgtaaaactttagtttaaataaatgtaccatctttcagggacacagccatcttacttcttagtttgaaaagttgaatgaaagtattttttccctattagaaacattttaaaagtaaggatctaaatgaagtgactactaagaataaagcctgtccaaatatacacctttttttattatgtggaaggcaggaatttattcaatgtttccttcggttttaaccagaaacaaaaagtacctcatgccttccaaaaatgctcaaagataacgaggaattacactgcctcatcctaattctctcaagcttaaatttcttaattacagttgtttgccagcagttctttattagtatagagtcagcttccaacaaaggaggaatcattagtgcagcaagatagctggcctcttcgggaggaaacagacagctggaagtccacgaccaattctcagtaaagggacactgcatgggtaggaaaatggttgaaagtaaacttaggtagctgaaaagagccatgtctgccatggcctcgtgttgaagttagagcagagcacacctatttattctgacaatttaagacctcattaactagacactgcttagggcaaattaattgtgttgaaagagaaacacccatcaatacatttattaagtgtacccctattattagaatctttatattttatattctgggtagggtggagacagcgaacttgctctataaatgattagtaaagtgttttttgtatatttgagtcagactaaaaagtgtccaaatatgtgctaatggtaacccagtctctaaaaataaactatgtgcctgttgcttacaatgctggcttctttgagatctattttacatggtttttccatgcccagaaaaaaagaggtgcggctcttactgcaaacacatttgaaaatctatctgatgattttgtagggcccagaaagcacctaaacatgactcacatattaccagcttcagagcaactgaagcgatcgtagcgattgttttttaactccccacagatgttggaaaattacaaggcttgtgcttcataaaaatatcactctacctacgcctggcttctgcctttattttaatgaatgagaatgtgtaaaaatttggaattgtgcatgtttgaattccataggcagtgattaagattaactaattgattgtgcaaagcttcagaaaattgaaaccaacttgctatatttcatgggcttctatcaaaacaaaataaagatttgtttggcctttttttttttttttcattttctgcttttattgcctcttctttctccttacattttatcagaagacaaatattttgggggcttgaggagaacagaaaagggcaaatttctccatgttataacattttcttatagaatctgactctgcaaagcagagaagtgattcagctaacctccctcaggttttctttcctaaattttatgcatgagaaactgatgctcagaaagatgttcactggttattcccagacccagaaagcaaagtctattttctttattcgagccatgtaactactaccaaaatttttcactgagtataaccaaaactaacttcagatgagttaaatccaaaaggaattgtcaaagtttgttgtatactcacagaatttccggaaaagctggaatgttagactctgaaaatgagcaggaaccacgaaaagctgagtagcaggaacacgaccaaaattattcctcaggaaacgttgggatgggcgttattgagaggtgacagcgtgctggcagtcctcacagcccgcgctcgctctcggcgactcctctgcctgggctcccactttggcggcacttgaggagcccttcagcccacggctgcactgtgggagcccctttctgggctggccaaggccagagtccactccctcagcttgcagggaggtgtggagggagaggcgcgagcgggaaccggcgctgcgcgcggcgcttgcgggccatctggagttccgggtgggcgtgggcttggcgggccccgcccccggagcagcgggcgggccccgccgaccccgggcaatgaggggcttagcacccgggccagcggctgcggagggtgtactgggttccccggcagtgccagcccaccggcgctgcgctcgatttctcaccgggccttacctgccttcccgcagggcagggctcgggaccggcagcccgccatgcctgagcctcccaccccctccatgggctcctgtgcggccccgagcctcccagacaagtgccaccccctgctccacggcgcccagtcccatcgaccacccaagggctgaggagtgcgagcgcacggcgcgggactggcaggcagctccacctgcagctccggtgcgggatccactgggtgaagccagctgggctcctgagtctggtggggacgtggagaacctttatgtctagctccgggattgtaaatacaccaatcagcactctgtatctagctcaaggtttgtaaacacaccaatcagcaccctgtgtctagctcagggtttgtgaatgcaccaatcaacactctgtgtctagctactctggtggggccttggagaacctttgtgtctagctcagggattgtaaatacaccaatctgcactctgtgtctagctcagagtttgtaaacacaccaatcagcaccctgtgtctagctcagggtttgtgaatgcaccaatcgacactctgcatctagctactctggtggggccttggagaacctttgcgtggacactctgtatctagctaatctggtggggacgtgtagaacctttgtgtctagctcagggattgtaaacgcaccaaatcagcgccctgtcaaaacagaccactgggctctaccaatcagcaggatgtgggtggggccagataagagaataaaagcaggttgccccatccagcagtggcaacccgctcgggtccccttccacactgtggaagctttgttctttcactctttgcaataaatcttgctgctgctcagtctttggggccgcactgcctttatgagctgtgacactcaccgcgaaggtctgcagcttcactcctgagccagcgagaccacagaacccaccagaaggaagaaactccgaacacatccgaacatcagaaggaacaaactccagacgcagatgcgccacctgaagagctgtaacactcaccgcgagggtccgcggctttattctcgaagtcagtgagaccaagaacccaccaattccggaaacattatggccgcactgcagaataccaggtattgcccctaccaaccccggacattgcctgtcattagcgctgtcaccagcactgttcagactctggaactcttgtctctgctacctgcactgggacaaaaatctcctttgtccctgtatctttgcatcacttgctctagagtggatttcctggcaggttatatgcctttatcctcggtactgcaaaatctgcaaaagcaagcgcccatcatttcttacttttgtggacaccgaaagtaatggataattccttaccccattccttgcccaagaaaggaagggactgcatgtgataggcagccaccaccaccagtgatatcagcctaacatatcatgtttatattattcagttagaaaaggaaaaaatggccacttttaaacaacatttatataataaacagttaaaaaaaaggaagaagctgcacaacccaaagaatgtagaagaaagagcccctctgctacatctaaaccaaacctgttactactttgccatgttaccttgaacaggacccttcacctctctgctcctgtttcattgtcttacaaatgaggggttggaccaagtgatcttaaggtcccttcttttttgatattctctaactaaaacatgacagtatcaaagggggagactaggtggcttagtctgtggctttgccaatcagatctcaattggaagaaaca

SEQ ID NO: 1880913 - DNA, 4001 bp, Homo sapiens
gaagtgaaatgtaaaaagagactaagcactttcaagagaaatgacattattttagcgtataaatatatatatatacacataataaatacaaataataaagcaaaacaatgacccaaaataaatatttttataaataattccagaataactttttaaaaataagacttgaagctatattccagtgaaactgacccaagtccagtaacaacatacactggaccatttagcaagtttgaactgagtgagtctacttacacacagatttttaaaaattaaacttgaggatgaaaaatataatatatgtggtatgcaaaacccgtatatacagaggaccaactctatatgctaataaaatgactagaaaattaagtaactaatagaaaatgaaaatgtggggctgaatgtagtggctgatgcctctagtcccagcgtgttggaggcaaaggtttgggggattgcttgaggccaggagtttaaaaccagcctgggaaacagaacaagaccccatctctacaaaaaatgtttaaaaaaataactaagcatggtggcatgtgcctatagccctaactgctcaggaggccaagtagtgggaggatcacttgagcccaggagttccaggctgcaagaagctatgatcaccactgcactccatcctgggcaacagagagatcaagaacccgtctttaaaacaaacaaacaaacaaaaaaccacaaagagggctgggcgtggtggctcatgcctgtaatcccagcactttgggaggtcgaggtgggcgggtcacctgaggtcggggggttcgagaccagcatggccaacatggcgaaactccgtctctactaaaaatagaaaaatgcactgggtgcggtggcgcatgcctgtaatcccagctacttgggaggctgaggcaggagaatcacttgaacccaggagacagaggttgcaatgagctgagattggaccactgcactccagcctgggcaatagagcaagactctgtctctaaaaaaaacataaaaatagaaaaacaaacaaacaaaaaccttgagaataaggcatgtatcacacttattcagagctgcattaaatgccagtagagaatgttgaaacacctaaaaaatatatgcaaggaaacagagtgtgagccaagtgttaaatatccaggctaagtgtccttgaattatctttttcttttgctacaagaaggcagtttgctacagagaagtttccaggaaatcatgaatggcttcatatccaagtagttagcctcactagaaaaaaaccacaggtctccgagggccagtgtggacactgggggcagccagccagggagctgccctgtcgcctcagcggctcactctccttcaactgagaatcatgccgtgtgttcaatttcccttgaccttttaccagttgaccttttgacagaatatttcagtgagaatgcattttcatgcctgaatccaagattgttgtgtagaattttctataactaatcacagtgctgctcaattctaccttttctgaagtttatacttcataaatgcttcattctgtcagtattcatgccatgaaaatcacagtaagattgtttttctcagccagcatattttgttttctaatatttaaaattaaaattacttgaatacttccttcatacttattctgttagggatttgtgttaaagaatgaagtttgtttttttttttaaggtttgaaaatcgtcaagcaaactttaagagcaaaatttccaagacagcagaaagttttaaaaataatatagctggtaattattttctcctgattaaacttaaatattcacagagacaatgaaattctgaacttaccaaatttgttaccattttcacaggtgtagctatccacaccagtcaccagagttcctcaatattatctgagagaggagtataaacataatatgccccaaggacccctgcaatcagaaacaaaatagtctttcttcccatgatgtttcccttctgctctttctactttggcaacacagcaaatacttgtttgaaacatgcagtggctgaattttcattgttttaagccctgccataaagtgttacataacttcctgagtacaaattccactgttcagttttcatttcatgggcagaccctaaataaatatacttagcagaaatacaaaggcgagctctgagaaacaatcagcacttattttctgcaagttctgtcaaatccaacagccttattacgttgctaggcagttagtaaacaaacatttaatgcacaattactaagagctgaataccttatttttaaaaaggccatgtgacagtgcaagaaacgcagtgtatgtctcaaataacaaaccttcgagtaaggaagaacaaacagaattttttcgttgttgttatgttttgttttgtttttttgagatgagaatctcactctgtcgcccaggctggagtgcagtggcacgatctccactcactgctacctccgcctcaagggttcaagcaattctcctgcctcagcctctcaagtagctgagattacaggtgcacaccaccacgcctggctaatttttgtatttctaatagagatggggtttcaccatgttggccaggctggtctcgaactcctgacctcaggtgatccatgcgcctaggcctctaaaactcctgggattacaggtgtgagccaccgcacctggcccaaacagaatattttaaaacttacaatcatggtggaaggggaaaccggcacaacttcacatggtggagcaggagagagagcaagtgaagggagaggtgctacacactttcagacaacaagatctcatgagaactctatcacaagaacagcatggggtaagtctgcctcatgatacaatcacttcccaccaggaccctcctttaatatgagatttcagtggggacacagagccaaaccatatcaacatctaaacctagaaactgtataataaaaatacaatattacaatcctttgagaccaccatcaatatgtgcagtctttcactgaccaaaacattgctatgggtgtacgactgaatgtagatgcagatatatgtatgtataaaacaggaaacatattgtggaaattggctcttgtgattggagaggtgtagtagttccactatctgtcatcttcaagctggagaaccaggaaagccgataatgtaattcagcctgagtctgaggcctgagaaccaatgctgtaactcccaacctaagtctgaagttgttattaacctctgcatttctatctttttaaatttgaggataattgctttatggccaagaattaaaaaaaaaaaagtttaatgtgtactttactttaaaagaatgtgtattatgacattatttggtatgggttcaatttgtgtaaattaagtcagtagtattaactgtgttattgaaacttttttttttttacttaatttttgtgtttttctatcggttactgaaaaaatgagttaaaatcttctacacaggttctcagcttttgaaaatccccaaatctccttagaagaactcacagagaaataaaacaaaaccaaaaacctatggacaacataatatgaagaaaaatatgaggcaaaaatataacaacaaaccaacttccaagtatctatgttggaaataatttaccaacaactacaaggcctgtgtggtataatcttccctatgtgcaggtggaagcagaggaaagcgatgaagtatttgacagaataagaattaaccaacaaatattcacctgaaattgtggttacaaatctgagaaaacagttgaaactggctggggtttgcatagtcttatgctgtgtaagctatctgcagtgtgacctgaaggggttggaacaggctgggccctactgtccctcaacactaatcaaccaaaggttcttccagggaagaaccccacactgagaagaaactaagaatctaaattaagcaggaaatggggaaagaagtggattaaattgtgggaataa

SEQ ID NO: 1880914 - DNA, 4001 bp, Homo sapiens
tttaatcctatttatatatgcacatgtagatcatatgactccacgagccctgatttttttttaagatgcagtcagtgtttattcatttttttaaatttagcaaatatttgaacactcttcaagatgcatgcacagcactgaaccgagtggtctggtgcagataaagataaattggtgctgggcctgcttgtccaccaatagaagcttaaactcacaacacgtactctacatagatgactgtaatttagatgctgtgggaattagtaaaaggagaaagtgcttctctctcagggaactctttaggaggaggtatcatttggctggaaacttgaggaatggatagaatttggagaaatgaagaacttgccaggcaaaagaaagagttgtgggatagggatacctagtccttgttggtattgagcatcaaatgtgtgaagtcttagctatagtgcaatacctcagtgaatttcacattatgtgtggggtttttttgttttttgttttttgtttttgaggtagagtctcactctgtagcccaggctagagggcagtggtgcgatcttggctcactgcaacctccgcctcccaagttcaagcgattctcctctctcagtctcccaagtagctgggattacaggcacatgcaaccacacccagctaattgtttgtatttttagtagagatggggtttcaccatgttagccaggctggtcttgaactcctgacctcaggtgatccctccgcctcagcctctcaaagtgctgggattacaggtgtgagccactgcgcctgggcatgtgtgttcttgaataataagccaaggagtttggattttaattgctttaaattaatatttaagcaaaagcaagacaaagcttgtcagatgcttttatgagctttattttattgtggtggtggtttgttttcttagtgctctcaggcaaaggtaagggtgccttgtttttcattagcatgtctaatctgggaaagaaggaagaatggaaaaataagcagaagtgggccgggcgtggtggctcacgcctgtaatctcagcactttgggaggccgaggcgggcagatcacaaggtcaggagattgagaccatcctggctaacatggtgaaaccctgcctctactaaaaatacaaaaaattagctgggcatggtggcatgcacctgtagtcccagctactcgggagactgaggcaggagaatcgcttgaacccgggagccagagtttgcagtgagccgagatcgcaccactgcactccagcctggggaacagcaagactctgtctcaaaaaaaaaaaaaaaaaaaaaaaagcagaagtaaactaaagttcatgtaccattattactggcacatgaactttagttattttttccccttctctcaaaagtgtgtcattggtgggattttcttcctaccaaattagaatatcctgtgtctaggaaaggtaacaaagcaagtattcataaaatccagggctcttacttagtatttccttagttctgtggtaggctgaccctttaatcttggttggagttttcataattaatgctttgaaatattttggtgagctcaagttgtatcttagggatcaaagatgtgggtctaatctcttaccagaaatgattcgaagatgtattgttaggaaagaaatatgggctcattatagaaaatgtacaaagtgtgtaaagttgtagaaaaaaagtaaccacccttaattcctctacccagagacagccattgttttcataaaatagttttgtctagtacattgtacttttagagtttgctcctgaaagcttttctttacagactaaggacgtgtgaatttgtctatgcccttgtgttttccaagtcaagagtattacctgtgagtcggcttgctgttaggaaggagagcaggaggaaggagattagcattttgcagctctgcattatttttctcttgattgatactcggtgactcagcagattttctggacagggttaagataagtaagaatacctgcctttttttttttttttttttcttctctccctgtaggcatccataaagctttatgaggcacagtagtctcttaggcgctgctgggtgtgacaccgtatctggtctggtgccaggtgttggtctccaatagcagcccagagatctccggctgaggtaacaacagtgtgcgattggtgtggagcccaggtggctctcatgcttggtaactgcattgacagctcgctggggctcttgaggttgggctgctgccgggatcatcagctctcttatgccgtttgctgcaagactgccgcggctttcctaggaagtgctgcttaagggaaataaatatagcctgttggcatgagttaaaggaactttctgtcaaaggggaagaaaagtgttggaattagcttcctgttttttttttttttaagtacctaaatctttatttggttaagataacttggaagttacaaatggttaatgaaaactttttcaatgaaatattgtttccacagttaggtgggtttccgttaatgctttcttttttttagttattattatactttaagttctagggtacatgtacacaacgtgcaggtttgttacatatgtatacgtgtgccatggtggtgggctgcacccattaactcgtcatttacattaggtatatctcctaatgctatccctcccccctccctgttcatgctttttttaatgtcttaccgtttttccctctcttttagtcaaaaataaaaaggtcaacgcaaagaaacagggactccagaaggctttgcaatggttaaacctgtcattattaaactcacagactaatgtgaagttaatttggtgcactgaagtccactaatgagcagaattaaatttatccttttcctccctgccccccttttaaggagttagcctatttagataattagatgttatatatgttttaactatttaagattattttatgaattagctgttcaaagaatcaattgttactagatatcagatgagaacttccacttaccaaagcctgctcatggaggtagaaagcaagactgacatgtgtactttaaaagatggatggaacctcaaaggccgtcttgcccagtccccatttagcctcacctctctgtaggtgaggcccaggagagacacttactaggcagactatgctggggctgggtgagcttcccaaggatgttctttctggaattcggtggctcagaatacagcacttggctcctctttgaagcatgatggctctgttgcctgtctctggcccagtgtgctgggctgctgaaaagagcatggaaccacccaggagacgccacgacactgacagctgtacctgacctgagggttcaggatatgttttcaaaagcaaatctcgctaaaaaggatttgtatgttattatgaaatctatatttatgtggtggaaatagacacactcaggcttttagagataaactacacagaatgggttacaataaatgcttataattgtttggcttttttaagaatcctgttaacttgacaaccttctgtttacttttctttggtattatgcaggtatgatattgagcagtcacttagttttcttaaatgttgtgtctcacagtagaaaaatagccaaaccactcagcccctgacctttgtgtttgcttctcacggtgatcagcagttctggtctgctctgcagtatggtggtcacatgatggaacccagaaagccttgtactaagcatttaacacacattgtgttaggcactggaggaagtttcatttacaaattatattttggcctttttttttttttttttttttgagacggagtctctgtcacccaggctggagtgcagtggcatggtcttggctcactgcaacctctgccttctaggttcaagcaattctcctgccctcagtctcccaagtacctgggattacaggtgtgcaccaccatgcctggctaatttttgcatttttagtagagaca

SEQ ID NO: 1880915 - DNA, 4001 bp, Homo sapiens; identical to SEQ ID NO: 315241

SEQ ID NO: 1880916 - DNA, 4001 bp, Homo sapiens; identical to SEQ ID NO: 315242

SEQ ID NO: 1880917 - DNA, 4001 bp, Homo sapiens; identical to SEQ ID NO: 315247

SEQ ID NO: 1880918 - DNA, 4001 bp, Homo sapiens; identical to SEQ ID NO: 315248

SEQ ID NO: 1880919 - DNA, 4001 bp, Homo sapiens; identical to SEQ ID NO: 315250

SEQ ID NO: 1880920 - DNA, 4001 bp, Homo sapiens
tgcatatgggaaaactgaggctcagagaagtgaaatgactgagacctccaggtgccacctccctttcagctgctcctgccctgctccaagcaaggatgtgccaagtcaagagaagacagaggacaattaatgttatctgaggatctcggagcctcatccctgagctatgatggtctttccctccttagttgggagccccatcacgttcctccgaagctctagttgtgtgataaggagggtggaatctgagacagagaacgatggccctccaaggagggagttcggggtgaggaaaacagcaaaaccatgtgctagacaagatcttcaactgcagggctctggaggcaactgggaagttttgaaagtgcagattgaagctcagggccgctgtgggtggcgcaggaactgcagaagacaagataggattagggagggccagcaggttgccagaggcccttttccacctgctgggcttagaggggcgggactctgcccgctccctcacttggttgggtttaaatgaccactccccgccctagctgtgcctttgagtgtgtggcaagggattgcagacgggagactgcttgtcaattcagggaagtcagcctctttctgccacttaattcgcccatcagtagagatccgactttcccacggttcactgtcacccccattgcacaggtggggaatccaaggcacagaggcgtctgggccagagtcccgggactatccactcattccggggttgtagggcagcatgtgtcaggagcttgggctcgagcgtgcggggcactaattgcgagtgcagtggccacaggctcccgggcaaagtggtcaggagcccattcccgccacctccgtccgcgcgccccgccctgtcctccagcaagttggtgcacgcgcgtcctcccacagggcgcgggatgggggcggggcctccgtgttgttgtttctctggggccccgcccctcaggggggcgcggaccacgcggccggagggcccgcctcccctccccctccccgcccagcccgcccgcctctttgtatccaacatccgggtttccccgctggctcggctccgtggccgccgctcaggagccattttggactcggttcagctcccctcccccccacccctccccccgttcatggcccctccggactcggcccctgcgcccggggcccgggcccagccccgccgcgctatgcctgagtcgggcgcgccccggcccgtgccccgccgccgccccccggcccccgcgtcgccccggagcccgggccgcagcctgcgccgcccgcagcggccctgagcccggccccgccgaccggcccttggagcccgaacgctgctcggggacgaaggcgcaggaagcgcgcagggaacgagaccgaaggaaggagcgggaaggagagcgcagccgccgcctggccctgcgcgccccgggagcgccgtgcggccctgcccgcgggctccgggtgtgcgcggggcggcgccgcggaacatgacggcgccctgggtggccctcgccctcctctggggatcgctgtgcgccggtaagaactgggcgcggcgcggggacgccgagagggcgcgcggggctggcctctggcgccgcgcggtgtttaccaacaaagggcgggcccggggcctcgtcgccgcaccacctgtattcagccctcacctccgggggcgtgggctgggggcgcggtgggcgcccggctcgccgaacttgggggcacgatcttgtctgtgcagtcatctgcgggattctggttcctagaggcgcccctgcgatgggggccgggacgcggagcctcagggtcggagttcgggctacgcgggcgcgtggaacccagggaaagagtgaggaaaacctgagcgtggggaaggcggccaagaggggtgggcagatctcattgggggtggcaggattgtaggtgcagcagcagcagcagcatgcggggagggttgcatgtccctcagagtcactaagtgtagcgaagcgaagggggcggcttcacgcagcccaaagtcccctgcatctcttgccaccagtctgcgtcgcgttaccggcccggcgggctgttggtgctggctcccacctgctccctctttccctgccgttggccccgggatgcggagtgtggtcgcttcgcgggaccgctttgtttgggcacttgggaggggagggggtgggtaagatggaaaacccaacaggtccctcttccttcgggcctccaggaggcacgtggcggggtgggtgaccagcgctcagctcgcccgcggctgcgggcgtgtggctggaggtgttcggccagcgcatgtgtgtttgggggtatgtgggcgcgggcgtaaacaagcggagttccgcctggaaagcttgtttctcctacggtccaagcaccgatttccctctctcagtggtgccggggtgcgcctaaccccggcgggcgcgccgggacgtcccctggccagtcctgggaaacgtggggagctgggcattgaagctctggcgagaaggtcggggcggctggtacccggccgccgggtcctgcgcgtctttgttcccagcccccattacacatgcagcgcgggtcccccgccgccctcggtggcagccgcctggagtctgggaaaccctcgaggggcggggccgggcgtgcaggggcggggccggagtccccacgctgctgcgggggtggggatttgggatctgcgtcccattcccaccctggttctaccttctcctgtgcgtcgtcgtgaggcttagtttacaccgaaagcgagtgagttctgtagggtagtagcgcgcgcgcgcgcagcctgagtccggaaaccgaagggcaaagaccagctggcacctgagtaccgtatggaagagggcgttgcagctctcctggagccgcttcttggaggcgaagtggtggtcgtgttggactttctgctcttttttgccccgctcccttgggatgccttttccccaagaaggagtgctcgaaagtgaaaggggaggcattggtctgctagagggagggcggcagcaagctgacttgataggcagaccgcagcccacctgactgcctccagacccgctgggtgcctgatccctggaagtgctggggctcttccaagcccaggcctttaggagagcttcctcccaagacaggacagcttgagacctgggatctggggatcacaccagtctcacacctccctccttaggcagggcagggcggcatcagacccctggaaggactgtatgtcctttctttttcctctgcttcagtcacctagcttgggcagtgctgagcagtgtaccctgccagggggcagtcagagtcacactataaggacctgtattcctgccctgggaggaaggtgggggtcactgggtatttcttgtagtcacatcaaccagtccctgacctgtggagaactgtgaaaagagctgccccaggcccagtttggagcagacctgaccgtcctgttgctttggcttcagggatgccctttaatttcaagctcctggcttgctgtttggaataacccccatactgtgcagcacacaatgcctgctagaaggaacatctagaagagtgctgtgtgacagaaatagtgtatgaactatggatagatataaaacaacgttttctagtagtcgtgttaataaaaggaagaagaaacagctgtgtcttagctggggctgccataacaaaatactgtagactggtggcttaaacagcagaaatttatattgtcaaagttctggaagctctaagtctgagcccagggtgcagggtgctggcatggttgggttctggtgaggaccctcttcctggcttgcagatatctgccttcttactgcattctcaaatgacaggggtggggtggggcaagggggtgttttcctctttttgtaagactgtgaatcctgttctcattacctgatggccccaccctcatgacttaatctaaccctcactacctcccaaaggtcccg

SEQ ID NO: 1880921 - DNA, 4001 bp, Homo sapiens
ccaaattgaaatagtcaaaagactttttggttgttgtttattgatgatgataatatttgaacatgtccatcatttatggggtaactctatcatgttacagtacattcttttccagtgtaatcaatgggaaatattattcatgtagctctaatgagcattaaatggccattctctatagatagggtcatcacttgtgttcaggaatcctcccattacacccaggacataatgactttaaaagtctggtttcttgtgggtcacaaactcattcaatccaattaatacaattgagcccaaacaatagtagctatgttgatccaaaatattttcttctgttcagctagctttgatgtgaacatatggttctcctctctggcatagatttatctgaaacagtatgatttctcaagttaccttctaaatatcgttacctgttttcttaaaatctgaaatggagagaaaattaccattcagcagaatacatttgggtgtgattcttgatagtaaatttccattaatagtctcaaagaaagttgaatgttgctacaggttaattggaaaataattttttcaagtttgaaaggtcatgattctattatttaagaagacttcctcttaggaatatggctttaatgtatgttaagcttattttctcaacaccagaccaaaaaatggaggctgagctatcacaaaaatttggaaataatttttaatagctaagtgtaataatataccattctttccaaatgttgcctttagtttctggctgtcaaaaccttaatcaagacaataattcttggcctggccataagtgagattatgaaacccagcaatgaggaaaccattaaaaaattaatttagaggaaagttaattgcagatttaatatggtgttttgcaagttggtcagcaaaatgtttcaacatgattaacaatatttttcaagggctgaaaacattaagcccgaggaaatggtttttcctgtcagcttttattcttcatatattcatctgaggttgtaaatagacacaaattctttagtgaattctgtggttaaaaaaatatcgccttatctccatgaataggagcaagaaaaggaagagactggagaaaataattctacttataaagtcctaaaatcttcagtggtttacttctccttgggttatatttttaatctgccaagaaattcttcttgtacaacactgtctctccagttttcatgagtctcaaatcctccaggatagaaatcatttcaagttttcatttctcatggcagcactatttccaggttgtgctaaatgattcataatgatttttattaacctcttcaatcctctaagaattacattaacttgagggattcctccaaacttgagcaccttcctcactctccagcgtggataagataagcagtgagtttccaggtttaagacatgatctaggatccctttcattgcaaattagaaagcgatgtgatagctatgaaagtcattggattaggagtgcattcccctcctctgtgaccctcgacaccccccgcccccccaaaaaataaatgagccgaagctcccacttacgttctctgtcttcttagtgctctgtgtcctgtggccgaggcgtacagcagaggcatgtgggctgtcagatcggaacacacaaaatagccagagagaccgagtgcaacccatacaccagaccggagtcggaacgcgactgccaaggcccacggtgtcccctctacacttggagggcagaggaatggcaagaagtaagtagagccacaaaggggtacctgccaggcatttcacgtgtgcgccccttgctatcctcacatctgttccctataaagccagagaagtcaccgagcacggttacaatgctggctctttcccaaaaggttcactgtcagactcgcgcattcgctccaacaagggtgggagaacttcttgtttttaagcaattcctacgtctgtctgtattcctgagtgttccaagtctggccgcctcaaaaaaaaaaaaaaaaactttaacaggctgtgggccgaatgcattcagatatctttcacagaaggagggggagatagaaggaatattttaaatacgtgtctccagatttggtcattctgtatctgtttaaatagccgcagggcagactttaggtagaacctactctgtatttttcctctttctatgactttggctgtcaggtagaagataggcattcatgtgaaaccttgattaattagtgaaagatttctaacatttaaaaaaaaaaaaaaaggatggtatctgaagaaactgctccgttgatggtccgtgcagaagtggacaggccttgctttttccctggcttcaagttaatgtttggttaaggaaaacattgtgtccatggggaaaagtttggccagggaggttttataggaggtaacctctgtttccagaacagaagattaaactgtagaaaagggggggaaagaattagaaagcaaaacaatatccactgatgttggcataaaaaacaaaatgcatgctgcttgaggtgcagagataatgaaaaataaggcaggaaattccccaccatgaagagtttttcagaacataaagaaagggtatggtttggagaacagttagactgtacccctggcactgtgctgggtactttttgttcattgcttcccttaatctttttaaccaccagacaaggtgagcattattattattatcatcatcccattttgcaggtgaaaaaactgaggttcacagaatctgtgtcatttgtccaagtgtcacatacctagcacctagcaagtggaagaagcaagacttcatgctaagcttgttctcttaaaccattaagaaatactagaactgcattctttaccccattgggattcagccgcccagccctgtcttcctcttccctcgcctcctcatggattacttccattggttgcagtaatttcttttctttaggaaactcaccctctccatctactcagtctttttcctgttttccttctttacttttttattcccaccagacagtggcagggaggaatgcctaaagcagttacatttcagattaacagctcttgagccacaccagttatttggaaccctagagactataaaattctacagacttggttcatatcctagcactgccacacattagccaagggaattagaacaaggattcttgatttctctgagccttggattatccatttgtagaatggggataaaataacttttcagagttgttctgagaaaactggaggtaatagtgttatctattatggtttggggattggcaacgtcagatatagaaggaagaggagactccctcatctctctcgctctccccctcagtgtgacctcttgattctctttttttcagacctaccatggcctgctctctccatctccctctttgtgtcacgctaaactcaaccctgctccgaggagcggaaagtaagagagtgttcagaaatgaatctaagctgactgcttgtgctttagccagcttttgaaaatgctagagccaatcacgaaaatgcacactctgtttacaattccttttgcatcccgaagaatggaaaaaccttgccacatatgcactgaggaaattcctcttctctgatcatgcacaatatgcctaaaatttacttctttgcatgtgtcgtgcagatggatcttttttaaaccttactcaaatattcctgttaaactctgtggaagaatagacggcttcaggagataacctggcctgggcctctatttaagaagcttactagagggttgccattctcacaaagagaaaagactctgtgagtaacaggaaaagcagagtctaatagtcaccctcctgggaacacgctttctcatctgccttcacccaaagtggagggtctaaggaaggaatactggggtggtgaaagtggacggaatatcataggagtatctcctatgatattcctatggtattctacaggaggcc

SEQ ID NO: 1880922 - DNA, 4001 bp, Homo sapiens
acgcgacggagcattaactctgccactgacccctggcctgccttcgcctcctcctcttcctcctctacctcctcccaggcgcattaccgcctctctgccttcggccagcagtttctatttaatctcaccgccaatgccggatttatcgctccactgttcactgtcaccctcctcgggacgcccggggtgaatcagaccaagttttattccgaagaggaagcggaactcaagcactgtttctacaaaggctatgtcaataccaactccgagcacacggccgtcatcagcctctgctcaggaatggtaagtgggcgcgcgccacctcctctccccttccgcctcctcgcccgcttctagaagacttaattgtcctctaagcctagagaccctcactgtggcgaggctccgctcctctccggcgttaaatatcagctagaaactcgtatggtttgggtagctagctctgtgcgtgcgagtacactggcgtggagcgcacacacccgcccccaggggcttctggatgtttcagagctttctggagtttggactcggttcagcggcgcgttgcccaacgctgcgaggcggcctggaagtcagtttccaaactcggagaaagttactggagttgcggttccctgcagcaaacttggccacccgggagcggagccgctgagcgcagggcggaccagactccttattggtgcgccttgcatcggggatgtggggctgaggatcccctgcccaaggcactgggagttccttcagtgtgtgttgtggagggcggtgcgtaatctagagtccccgctttctctcagggcctttattcacgcgccaggaaccctgaggctgaactggattgacagggagcaggtcccgtcccaggaacggaagggtgggccgagggctctgggggcgggggagaaggcggagcctaccccggacgctttgaattggggtggaaccgagagtgggggtgcagcgcagtccaactctgcaccctactggcggggtggccgggagaaacgggatagtgggagacagcctggagaggctgtccggacgtgatttcggttcctctggggtttctactactcacgggttccagggagtggagagagggagcctgcggcgcacgtttccctagggactgaggcagggcggggaggccgccttcttgcgctgccaaatagcatttagcagggaatccacgttggttccccgactctctgtcgacccccgcatgtgccctccagtggatcttacaaggcatctgccccccacttctccacgacatttgaggagtcgctgcggtacggttctggcccgagcaagggtggtccttgactttcccaagcgacgtgcgtttctgccacgcgcgtgtgacgcagaaactttcccgggtcagtctctcccagcgcacggcgctgtaagcgcaatggggtcgtaggcactgtgcccggtgatgcctttattcttcccgaagcacccacagcccctccctcccttttctaagcggggccttggatactcacccccagacactgggctgctccatcagtgcgctgtcgttcgtgggtcttaaagttcccaagcacatccttccttctctgcctttcaatggaaggatcgggtggagagcgtggcaagcctgaagactgggagggggtagttctagcctgctgggattcaaggaaagggataaacccctttagcccccagcaaagcgcccggagccgtggctcccgaaatgcgctgtcgagattgtttgggggtgggcggagacggcagcttggcgaagtgggagggggtgctgcagtgagtcatcgctgccccaggacctagggcaagagctctggaatccttctggtccttgaaaggttaaggctcgggtaggcagaagccagccgtctgagcccagagcctggagtgcccctagattccaagatagtaacccccaattccaggaccgtagggataggactgcgtgtgtacgtcaagtttgtaaacagcctttactcctcctctctccccgcctccacacccgctgaagcctagtggccccagcagttgtataaatattttactgcgcaggaccttcattttcattggcagttttaggtggtagtgcgcacgtggtttctttgggaactgaggactagggcttcagaaacgactacctggactgtgataacctcatttatattgcgtttaattcgcagtctgcctcttttggggaaaagggccctcatacatcttaaagatatgcgttctggttcttcgtatcttcagccattaatctagctccaaaacccctgcccctttgtcttccttctggaagttatctcctcccaagacttccccttaccacttctgcagcagtggcatcaagatgttgctagttctccgcctaggagtcttccaggaaatcttgaagagtctaccagagtctaccagattttggagtgggctgtgccatcctgccacccctagtcagttgtcagtttttctgaatttcatctgagatgggtcgcccgcctctcctgaacatctctaccctaaatctatcccgcttcacttttctccccctctctccttaggactgatgtctaagaaatattacactgggcttcttctccagtctttctcctcgatcgctaactccatttggcatttaagactatttacagtgcactcactcacatccacatgtccagtctcagctcccaatctttcctccacaaatcctgcatttcaggccatgggttttacactgctttctctgcaccccaccctcaatcctagtcttcattgcctttgtgccttggaatttacttggtcttctcactcatcttcacatgctcaaatcctacccttctttggaggtgtatataatttatatctcttctttcccagaagaccttttcatagttccccatgttgatgtcatctctccccctcccccttcatagacacttctgagagtctctcttatgatgcttagtacgttctcccttgtatcaaggttcttggtacacatgttctatccttttctccttggcaacagggtcagcatcaactcatttttctcctatattggagctttgtatgttgtatatacttagcatatatgtttgaataaatagtcaccttaaccaagaaaagataactcttaggcccacctttgtgaatcaacagtacaattaattttggcatcacattgatatgatttattgagctcttactattaatgtctgcctggcactactgtaagtagtttacatatgtattatctcatccaaatcctccaagaacccaatcctcagaacaacacattttactgacaaaaaaaaatctgagactttgagagctggagacttgctcaagatctcacagctcgtaagtggcagcgctgggatttcaaccgggtctttctgatccatgtgcttaaccatagaccagagactgatcctgttctcctgaagagaacctcagggttcttttataaaaaggcacgagactaaagtcaggttagactcaatgctgtgcagctgcttctgtaccattgaaggggaatttgggcccaatcacttcctccttctgtgtcttggtttccccatttaccaatcaaaggtggcaaatcgtcaccagctgagctccctggctctttcccaggactcatgtctctgataggcttcacatgttgtgatatgctctctgatttgtgctcagagaacaccagagttgtgtattgaacacaggcagagaataaatttattaaatcactgcttctctggcaactagctactctgtctcttagtctgaccacacctgagctgcccttttcttaaaccaggggctcatgaatcatgtggagagcttttaaaacaaaaaacaaaaacattctagatccatccctagaaattctgaatctgtgagtagggggtaatgccctaaatctaatttaaaaacaaaaacaaaaaaccttcccaggcaattttgaa

SEQ ID NO: 1880923 - DNA, 4001 bp, Homo sapiens
gtaaccaacctaggcaggagttctgttctttgtagtcactgaggtcttctcattccttaggtcttattggtcctaagggagacatcggtgaaaccggagtacccggggctgaaggtccccgaggctttccgggaatccaaggcaggaaaggagaacctggagaaggtgcctatgtataccgctcagcattcagtgtgggattggagacttacgttactatccccaacatgcccattcgctttaccaagatcttctacaatcagcaaaaccactatgatggctccactggtaaattccactgcaacattcctgggctgtactactttgcctaccacatcacagtctatatgaaggatgtgaaggtcagcctcttcaagaaggacaaggctatgctcttcacctatgatcagtaccaggaaaataatgtggaccaggcctccggctctgtgctcctgcatctggaggtgggcgaccaagtctggctccaggtgtatggggaaggagagcgtaatggactctatgctgataatgacaatgactccaccttcacaggctttcttctctaccatgacaccaactgatcaccactaactcagagcctcctccaggccaaacagccccaaagtcaattaaaggctttcagtacggttaggaagttgattattatttagttggaggcctttagatattattcattcatttactcattcatttattcattcattcatcgagtaactttaaaaaaatcatatgctatgttcccagtcctggggagcttcacaaacatgaccagataactgactagaaagaagtagttgacagtgctattttgtgcccactgtctctcctgatgctcatatcaatcctataaggcacagggaacaagcattctcctgtttttacagattgtatcctgaggctgagagagttaagtgaatgtctaaggtcacacagtattaagtgacagtgctagaaatcaaacccagagctgtggactttgttcactagactgtgcccttttatagaggtacatgttctctttggagtgttggtaggtgtctgtttcccacctcacctgagagccattgaatttgccttcctcatgaattaaaacctcccccaagcagagcttcctcagagaaagtggttctatgatgacgtcctgtcttggaaggactactactcaatggcccctgcactactctacttcctcttacctatgtcccttctcatgcctttccctccaacggggaaagccaactccatctctaagtgccgaactcatccctgttcctcaaggccacctggccaggagcttctctgatgtgatatccactttttttttttttgagatggagtctcactctgtcacccaggctggagtacagtgacacgacctcggctcactgcagcctccttctcctgggtccaagcaattattgtgcctcagcctcccgagtagctgagacttcaggtgcattccaccacacatggctaatttttgtatttttagtagaaatggggtttcgtcatgttggccaggctggtctcgaactcctggcctaggtgatccacccgcctcgacctcccaaagtgctgggattacaggcatgagccaccatgcccagtcgatatctcactttttattttgccatggatgagagtcctgggtgtgaggaacacctcccaccaggctagaggcaactgcccaggaaggactgtgcttccgtcacctctaaatcccttgcagatccttgataaatgcctcatgaagaccaatctcttgaatcccatatctacccagaattaactccattccagtctctgcatgtaatcagttttatccacagaaacattttcattttaggaaatccctggttttaagtatcaatccttgttcagctggacaatatgaatcttttccactgaagttagggatgactgtgattttcagaacacgtccagaatttttcatcaagaaggtagcttgagcctgaaatgcaaaacccatggaggaattctgaagccattgtctccttgagtaccaacagggtcagggaagactgggcctcctgaatttattattgttctttaagaattacaggttgaggtagttgatggtggtaaacattctctcaggagacaataactccagtgatgttcttcaaagattttagcaaaaacagagtaaatagcattctctatcaatatataaatttaaaaaactatctttttgcttacagttttaaattctgaacaattctctcttatatgtgtattgctaatcattaaggtattattttttccacatataaagctttgtctttttgttgttgttgttgtttttaagatggagtttccctctgttgccaggctagagtgcagtggcatgatctcggcttactgcaacctttgcctcccaggttcaagcgattcttctgcctcagcctcccgagtagctgggaccacaggtgcctaccaccatgccaggctaatttttgtatttttagtaaagacagggtttcaccatattggccaggctggtctcgaactcctgaccttgtgatctgcccgcctccatttttgttgttattttttgagaaagatagatatgaggtttagagagggatgaagaggtgagagtaagccttgtgttagtcagaactctgtgttgtgaatgtcattcacaacagaaaacccaaaatattatgcaaactactgtaagcaagaaaaataaaggaaaaatggaaacatttattcctttgcataatagaaattaccagagttgttctgtctttagataaggtttgaaccaaagctcaaaacaatcaagacccttttctgtatgtccttctgttctgccttccgcagtgtaggctttaccctcaggtgctacacagtatagttctagggtttccctcccgatatcaaaaagactgtggcctgcccagctctcgtatccccaagccacaccatctggctaaatggacatcatgttttctggtgatgcccaaagaggagagaggaagctctctttcccagatgccccagcaagtgtaaccttgcatctcattgctctggctgagttgtgtgcctgtttctgaccaatcactgagtcaggaggatgaaatattcatattgacttaattgcagcttaagttaggggtatgtagaggtattttccctaaagcaaaattgggacactgttatcagaaataggagagtggatgatagatgcaaaataatacctgtccacaacaaactcttaatgctgtgtttgagctttcatgagtttcccagagagacatagctggaaaattcctattgattttctctaaaatttcaacaagtagctaaagtctggctatgctcacagtctcacatctggttggggtgggctccttacagaacacgctttcacagttaccctaaactctctggggcagggttattcctttgtggaaccagaggcacagagagagtcaactgaggccaaaagaggcctgagagaaactgaggtcaagatttcaggattaatggtcctgtgatgctttgaagtacaattgtggatttgtccaattctctttagttctgtcagcttttgcttcatatattttagcgctctattattagatatatacatgtttagtattatgtcttattggtgcatttactctcttatcattatgtaatgtccttctttatctgtgataattttctgtgttctgaagtctactttgtctaaaaataacatacgcactcaacttccttttctttcttccttcctttctttcttccttcctttctttctctctctctctctttccttccttccttcctccttttctttctctctctctctctctctctttttttgacagactctcgttctgtggccctggctggagttcagtggtgtgatcttggctcactgctacctctaccatgagcaattctcctgcctcagcctcccaagtagctggaactacaggctcatgcca

SEQ ID NO: 1880924 - DNA, 4001 bp, Homo sapiens; identical to SEQ ID NO: 315273

SEQ ID NO: 1880925 - DNA, 4001 bp, Homo sapiens
cagatgcagggacgtagccttgaacatgatggctgtcagggttcgcttcttactgggagggaacttgtgacaagtccgtgagcaagatgcttgcagaggggggtcgtgctgggaagaaggcaagaagaggggcctggaggagacactccagccaggaggcactgggggcctctctggtgtggtggcacctgtgctacccagacctgcatagcagggaggagttggccatgaagacccaggggcccgtgtttctggctgagggttcagcaggtccttgggggaaccagctttggtcgtggagctgcagagaggccagagtggtgggagtgggccaagggggagcaggagggaggagagaaggcctgagaggcaggtaggggccagattgaaggcccatgggccatggtcaggggctcaggttgcatccttagtgtaaagaggagccatgggaccaaatgtacccccgggtgaacaccacgggtgttgcaagtctcccagtagaggtgaagttactcaggcggcagcaggcggggtccaccggcacatagcaggcggggtcccccggcacacagcacaggctccccagtgctctgcctgctgggtggcatggagttctgctccggccctctctccctgggctgctccaagccttgggcctcgtcctgctctctcagcaggggggactagacaggtctgatgggcaagcttggcaagggtggctggcaaggtccggggaagccatatgctgtctcagaggtcccacctgtctctccaggctcctgtgccagcccagagaccacagggaaggtcatgctgaggctgggggtcaaaggctggtcactgtttccagttttctctcctccccctgcccccatctttcaagccctgcagaagcccccaagggtacccatgagaggggcccatgtgtgcccacagggctggactcacatgcacgcatgtgtaggctggacactcctgcttcctctgtccctgtcggcctcctcttcctgccttctcccaggccaccttcctggtgtccaccaggggaatccatgaggcccatggccacccagggaaggctgtggctgccaagtccccaggacgtgatctgggccccttatgaatcctccccgagttccctcagctccctcctaaccctagtccccatgtcctgctgagaggaccagcaccctcctgggacaggcccacaagccaagccttccaagcagcctgcctgggcagactcaggacctcagagggacggggcagtgccactcctggggccagccagagctgctggggagctgtcaggcagccccaggcctcacacttgtcatggggctgagatgcaccagccacatagcactgccaaggcctggggcctcagggccctgcgaggcatccccttttcccagccacagcttgatgcagacgtagctgggggcagccatgagagaagagatgggccagtgagtctgggcagtaacgccaagtctctccacccccttccacctgaaggggcttcccactgtccagacaaggcggtgggagctggggaagattcttaaatggctgcctcagattggctttgtattctggggagtcctggcccactatccactgccagggataacctgggtaagattcatgacctcgctgggcctcgacttctcacctggaagtggggtgagccagagctgcccccacgtggttgctgaggaataagacacttgcagccccgagcagtgccctgcctgtggtgggagctgctgtgacctttgtggtgtcttacaggagaggcggctctgaacgagtacctgcgggtcaagacagtgaccttcgaatactgaagaaaggtctttgtgagaagaaagtccctgcccctccctcgtggctggggccccctccctcttgagcctgggtgcacagcacctcccacctggggggctagtggaagccctcctgcctgcacaccatgtctgcatcttggacgccctctgtccagtcagaagcagcccttggctgggtgaggtgtgcccctcccagggagaataaagcttctgaagagagaccgtccacatctctgcgtttctctgctccacctgtgggtgttcctgggtgggcctggaagttgcgcaatcacctgggtatgatggtgttgcttggcctgggagagccagacacctggggagagagacaggaggaaatgggtgtgggtcatctcaggccccaaagagcagaagctgcgacagtcagggctgcaggaggtttggaagggtaacccctgggaaacaggtgggaagacggggattgagctgggtgagccctggactgggaagcagctcagactccctcagcagatggggccgggccctcgcccctgctctgtcagcacggccgtgctctcagctggtagccagcccgagggcctgcagtggagggctgggcccagctgggaatgccaggcagagctgtcttccgtctgacacggtgtctcctatgtacctttatggcttctccttggcccagggacctgagctatagctctctttcctgtgccctctccctgtaggagcttgcggccctcctctctgcacccacatcctataggcaccaaacactgcaacctgacctacctgctgttacctcagtttccccacatggagctctcttcttagcatctcatctccccacccacctggctctgcccctctgggtcccacaggcccactgcaggcccctctgtccctcccacaggcccaggccatgctgagagctccaggcccagcctctgcatgtctgggaacatcttcaggcctctctgtgcgtcatgctgcccttcagaggcctgtgagttccccgtctcctcagggattccctgccctgctttcctttatgattcctgctcttctaggaagtgtgtgcttccataaaggcctgtccagaccccgcctttcgaaggctgccagcagcaataacaacaggcagtgccaagctccatactggctacacttctgtcccttgagccccagctcgatgccaggcaagaatccaaatcctccatgcatgtttctcttgctactcatgatcccagggaggcaggaggtatttttatcaacatttataaatgaggaaatggaggcaaagagacatctaactgcccaaggctgcacagctactgtgaaattgtattccccttacttcccaagttaggaggacgttgaagctccctctgcctgtagaggaactcacccctcccaggtgccgagtctcccggaataggccttggctgggggtggcctggcagaggtggctgtgctcctgggcacccacacccaccataggggaggctctactctcccatggccaccccaccaaagcaggccttgctggtgatgccccgtgcactgctggagtcaggctgagctcacaggcctttctagaagtccaggagaaacccaccaactcccactctgtgcagttcctcagagcctgaagcccaggcccaagccaggccccccgggagcctcctttttcccacttcccacctgccttctgcggcagggtcggctcagaccccggcgtgctcctggcatgtccagcctcacatcttgctgcctccagacagaaaagaatgtgccttcacttctgcttaaagccttctgggctctgttcctagctcagaattggtcttctaccacaatgcctggtgctggagatggcagcttcccggagagaagctgttcccgtccctagcggtgggacttgccctagcacgtgccacttataccagaacagatgagtccatgtcaactgcttcctgagttccctttgttctgcctcaaacactaccagggctggggtatccacggcagcatccaagcacatgcagctgcctctcagcccacagccaggccgctcacactcctcccaacaagaggtggaagccagcctggtgtctccatagggtcagtcctggcttccccgtaaacatccttcgt

SEQ ID NO: 1880926 - DNA, 4001 bp, Homo sapiens
ggctagggaaagcttccctgaagtcatggcattttagtaggaacttcctgaagaatgatgggggttctctggacaaagatgaacggcacatggaaactttatgagtcgagaagttccacagatatgagggacagcagggagacctgcaggctggagcctaaagaacaaggggacagtgcctgaaagtaggctaagtggatcagcaggcacaggccacctcaatcctgggtgcccatactggcttatgtgagcaaaatacatgcattaagccattcaacaaacatttatttagcaactgctacaagccatcactgtgtattggggatacaacagtgaatacatctcacaaatttcctgtcctcaaagagcttacagtctagtgggagagacagacaatgaacaaacaaagaaacaaggaaatatcagatatacagttaagtgctgtgaaggaaatagaacagggtgatgtggcagggagtggctgagggacttccttagtttgtgtgacctggaacagcctctctaaggctctgcatcagatatctgatatgtgataccatatgggagcaggctctgaaagaacactacaagtagagaggtaaaggcaggggctgcagcaagcctgatgtgttcaggcactgagcagagagagggccaggtggtcgggacttagcgagagggtcgcctcaaaagaagtgaggcttagcagggcacggagcagtgcggccgcaggtgtggtgggaagggtgttccaggagaaggagccacctggacacaggcttgcagtcatgaaacaatacgcaattatcactcccggcattctacatggccttgcctgagaccgggctggccaggatctctgggaaccaggaggaggggtctgcggcaccaggactgagtagaagggagagagtggagaaggggaattgcagagagaaaaccaggggctgtttttctctcggagaggcgggtaggcactgggcgggcagaagcgccgctatccacccggatgcgcagctgctaaggggccgcctctgcaagcggctgcaaattcccggagggcagcgtctcctttcgctctgctgtgtccgtagcacatggcaggtacttggcccatcaagagtgagagagggtgagcgagtgagtgagtcaccggcttggcgagggtctcctctgacccacttagccttgccagcgctcagaactgccagccctgctgggtgcttgggacttttcaaagccctgggaattctccaagggtccacagtaagtcttcttgacctaagcgggaaagagcgcaggcccctgcggggttggcttttacatggcatttatagacccgcccggagagggtgcgctgcgctcccgccatagtcccaccaccggtgagcgccgcccccactcggctgactctccgcccgccccgcgcccctcccctcacgggctctggccttaaccagagctcgcggactggcggggacaggtcccacctcctggctcccaggacgggtctgcaccaacctcagtttcggggctgcggctcacagaagtctaacctgcccgggacgcccgcaccaactcctgcgcgcggtgagtttctgggctctcgagagcgctggactcccggcggaaaggaggctgccccggctgcagctccgggggctccgggggctccaggggctccaggactcggttctcaccgcaagggctcctgcggggcccatcaacttcgccgctgggacgccgggctcggggtacgggtccggagttctttggagcaattgaggctgaacctggccaggggtcatcaggctaaatgaccgcagcgccaggactggcccgccgaggatctggccggccgcggtggtagggcccttacggagctggcgccaacctgtggggtgggcactgctggcccggcttatggaagagaaaactgaggctcgataagagaaagggaccagcgaaggcgacgcgatgatttgtgactggggactacctgtttcctgggcccctcgaccccattctgtgacagggaaaggtcttccctgattggccaaatctgggggcctggcacgagggcctcttgtgattggaggggtcgacgtgagcgctcaggggctgcgctggagtcccagctccagccactgcgctcaagtggacggtcgcgcgtgcagagggaggccggatagcagaccccacaacgtggctcctggggccccgctatcgagagctcaggccccgcgggcacttgcctaggagaggaaagaatcttcccaaagtgcagacagagacggaatttaatcaggagtcccagacttggagtttggaggcatgggctctggtgtcaggtgactttgtttcctccccacgcctccacttctccttgaccttgggcaagtttcttgtgttctgaatcttagtttcttgtctctaaaatcgggaggggcaatgaacagtagtgcctgcctcccaagattgcttgagaattacatgagactgccccgcgcctggccctaggaaaccctcggagaatgttggctgctgtttgtttgtttgtttgtttgagacagagtctcgctctgtcgcccaggctggagtgcagtggcacgatctcggctcactgcaacctccgcctcccgggttcaagtgattctcccgcctcagcctcccgagtgctagaactgcattcatgggccccagggccctagcaccagaacagagggcccagagctgcagtcctgcagggtggcccagcctcacagggactagaagctgggtcctggagagccaagcctgggctgggaattgggtaggagggttgggaggcccaggaagcctcccagtgtccccacaccaccaagtgaaaggacactgagcggccatgactgggggaggaggtggaggcctggaggcggcccatacggcccacaaggggctctatgggcttcactgcaggcccctgctctttctggggccaaagggcaagcctgattgaggcccctcccaaggctcccgtgcctgccattctggctttccctggactgtgacaacagccccttggtggccacctggactctgcctccctgcagggggggaacgacatactcttttatttttttttttcagaagtaatcatgtacaatataaaaaaagaacattcagttaagaaaacaaaataattacagtcgtcaaaaacctctgaaacccaaaaccctttacccagtaactttcaacatttcagtgtaaattcttctaggcttttaccctgcagataaacacacgcatgcacacacagacacacacacacacacacacaaacttaagccttacacaattatcgtggtttgttacttgttgggtgttttgacagtgtcaggtttgtataactcaatatttaccaatattttctaataatttaatgttttcttcttatatttgattttcaagtatttatttttaacccaattggactgtattttagagtaagatgtgaactatagagctagattcatttatttatttcaattagtagacatttttagagcagttttaggtttacagaagaattgaggacggagtgcagagttcccatattctcagtctgtcccttcctgcgcgctttctcctatttttctttctattcttttcctttctttttttttttttctttttttttttttttgagacagggtctcactttgttgcccaggctggagtgcagtggcacaaacacagcttactgcagctttgaactcctgggctcaagtgattctcatgcctcagcctcccaagtagctgggactacaggcatgcacaaccacgcctggctaatttaaaaatttttttgtagagatgggtctcactttgttgcccaagctggccttgaactcaagggctcaagtgatcctctgccttggcctcccaaagtgctgggattacaggcatgaaccactaggcctggcctcccctatttttaacatcatgcattgataggatat

SEQ ID NO: 1880927 - DNA, 4001 bp, Homo sapiens; identical to SEQ ID NO: 315277

SEQ ID NO: 1880928 - DNA, 4001 bp, Homo sapiens; identical to SEQ ID NO: 315279

SEQ ID NO: 1880929 - DNA, 4001 bp, Homo sapiens; identical to SEQ ID NO: 315284

SEQ ID NO: 1880930 - DNA, 4001 bp, Homo sapiens
ggactttttcctatgtacataagtaacttgtggatctgcagaaaagtacgttgctcacttttagagttcttttcttgtggatttgatttgaaagaattccctataaaataaagatgtgctttttatctgtatataaataactgatatatataacattatgtcactattatatacaattttttatatgtataatcagttatatatcataatatatataataaaaagtaaattccctgtaggatgaagatacacttttcatctgaatatctatttatatatatattagtaaaaacatatacatagtaaatatttttcaagtatgttatcgtttgttaatttttttcttatacacaggggggttttaatttttttttttttttttgagacagagtctcgctctgtcacccaggctgaagtgcagtggcgcgatctcggctcactgcaacctccacctcccaggttcaagtgattctcctgcctcagcctcccgactagctgggactacaggcgcgtgccaccatgccaggttcattttttgtatttttagtagagatggggtttcactgtgttagccaggatggtctcgatctcctgacctcatgatccgcccacctcagcctctcaaagtgctgggattacaggcgtgagctactgcgcctggcctgggggttttaatttttagtttgctaaatcaaccttcagaatgcctgcttgtgaggtcattcttaggaaggcctttggcaatgtaaaatgtacctgtataaataagcatttgtgttttcttctggtacttttctcattttgcatatgtaaaaaattcaatctgtattccatcaggaactcatttttgtgacataaaatttcattagttttcttcaaagagcaggcattttattaacaactcaacccttcctactcatctgaaatgttaccattatcagtccttacatctatatcttacatatatttcagtgtttctgggtttccattctgttccatgtatttatgtcttttcagctgatagtaaataattgtgggaattaatagcacattttgatatctagaggagcaagtctttttttcactccattataaaaatttttaaatgtcatcacaatattaagacagcagatgtcgtgcaaaaatgataaatccttgatattttcattcggtttatgtaaaactgataaacatggaaagagctcatgttttgagaaaaccgagtcttcccattcaaggaacccgcctcccacttccaagtgtccctctaagaagctccagtaaagaacctgtctacctgggtggattcggatgtaaaaccgacacaggcttttatctgagaactttccgcctactgaacatgactcatggtatttttgacatgggaatgagttctcattaagcacctccatgaccccacgttttaaacgagtatatgcttaactttgtgagttgaatcactcaacttctccaccaagtgctccaggcggggaattgccagcgatggaacgcagctgaggctccgtttggctccgccgctctgagggtgcccagcgccctccaaggcccccgtcccaggggctgcggggctgcggggaagccgggcctggggaccccctcccaccccggctgagcccccgctacctgtcctgggcatccacgtcccggcacctgcgcgccaggcggcgctccacctccgcggcgtcgcccttgagggccgccctgtggatcttccgcagttccgcgtccctggtgtggtacgcgggacccgggtactcgtggtcgatggagcccaggaccgcccggcccgggcgtctcccgaagctgaagagcttcctcatggggcgacttctcctcagacgcccaccaccggctcctgagcccccgcggctcctcgtggcctttccactaaccctaaccccaaacccgagatgtagctcagaatccgcgacccggccgggtccaccacagccttcagcagcgacactcgcagcctctgacctctcagcccgcgaagccgttaggcgcgcgcctgcagctcagcgcccgcgcggactccggaagccgctcccaagcccgcgctgccggcagggggcggctgcggctcgggcgcaggcgccgctggcttgcgggttctcctgggctcgcccgggacgtcccgtagtcgcaggcgcgcaacccgcccggcctgagggcccgcctggccgtgacccccgccccgctcctcctccgaagagagatcggggccgctggcaggggccctccgcagccaccagggatggggctgtggggcagttcccgccccggtgcagccgccgccgggcagaccgcctggcttggctgcagccgcggcatctggctccggttctgcgaggctgggagctccagcgagcttgggagctgccaggcggctgctgcgagcaggcagagggcgcctggagcttgggccctcaggcggcggagcatggcctgggcggcctctggatcgcgagtgcacctggcctgagagcctgccaggccctgcccccgctcggctcctcctctgccggagctccggaccgctagccaggggccctctgcagccaccgggaatggggctgagggcgggttcccgcccctgtgcagccgccccagggccgactgcctggctcggccgcagccactggtacatctggctccggttctgagatgttgggagtgcgggcgggctcgggggttgcctggaggctgctgcctgcacacagaaggcggctgcagcttgggtgcccaggcgggctggaggggcatggcctgggcggccccgggatcgccagcgcgcccaactgagggtccccaggacgtacctcccgccccactcctccaccgcagggagttcgaggccgctggcatgggcactcggcattcaccccgatggggttgagcggctggttctcagttctcgcccctgtgcagccgccgccgggcagaatgcctggcttggccgcagccctcgggacacctggccctggttctgcgatgctgggagcgcgagcaggctcgggagttaccaggcagttgttgcctgcacacagagggcgactgcagcttgggcgcccaggcggcggagcatggtctgggtgggctccagaacgcgtgcgcgccaggcctgtgggcccccctggtggtgccacccgccccgctcttcctctgccggagcctggagcagctggaatggccactctgcagtcactggggatggagttaagttttcttatcccatgcatgcacacgaaaaggtaactattatgtgaggtaattaacatgttaattgacttcattttggtaatcatttcagaatgtgcatatataaacatatcacactgtccaccttgaatatgtgcaatttttatttctctattaaacctcagtaaagctgaaaaaattaacaagatcaaaaggataaccccgcagttttatagtagtagttggacacttcaatacctcatttatgggcaaggacttcatgtctaaaacaccaaaagcaatggcaacaaaagccaaaattgacaaatgggattaattaaactaaagagcttctgcacagcaaaagaaactaccatcagagtgaacaggcaacctacaaaatggaagaaaattttcgcaacctactcatcggacaaagggctaatattcagaatctacaatgaactcaaacaaatttacaagaaaaaaaaaacaaccccatcaaaaagtgggcgaaggacatgaacagacacttctcaaaagaagacatttatgcagccaaaaaacacatgaaaacatgcttaccatcactggccatcagagaaatgcaaatcaaaaccacaatgagataccatctcacaccagttagaatggcgatcattaaaaagtcaggaaacaacaggtgctggagaggatgtggagtaataggaacacttttacactgttggtgggactgtaaactagttcaacccttgtggaagtcagtgtggcgattcctc

SEQ ID NO: 1880931 - DNA, 4001 bp, Homo sapiens
ccttccctttcactaatatcttggacattgatatggtttggctgtatccccacccaaatctcatcttgaattcccacgtgttgtgggagggacctggtgggaggtaattgaatcatggggccaggcctttctcgggctgttcttgtgatagtgagtaagtctcacgagatctgatggttttgaaaaacgggagtctccttgcaaaagctctctcttctcttgagtgcctttaatcttccaccatgacttgtggcctccccagccatgtggaactgcaagttcattaaacctctttcttttgtaaattgcccagtctccagtatgtctttatcagcagtgtgaaaacgaactaatacagatgtataaacattgacccatcctctttaacttccatataccctttttaaattgcagaaaaatcattcaattagtggaaaaattgctcaagtaaattttatcatctttcacccaggcccggtgatttcctattcagcagcaatttcacatatatatatatactatatatatatatatagtatatatatatgtattatgtatatataattatatactatatatgtaaaattttaaaatcaatgttttcatactttttaataatacatgcttatcctcattgtagataaattgggaaatacataaatgttttagaaagaaaaaaatacttgtatgtaattctatcacccaaagatgtaacattttggtggatttccttcaagtgttttttttctatgtacattttcatattgtgattacactgtgtgtgtgtatatatatattatatatatatatgattttgtgtcttgctttcttataaccgaagtctttattcaagttataaaaccctacatataacattttaaggctccgtaggttttgttttgttttgagacggagactcgctctgttgcccaggccagagtgcagtgtcacgatctcagctcattgaagcctctacctctcgggctcaagtgattttcctgcttcagcctcccaagtagctggaactataggcccacaccaccacgcccagctaacttgtttttgtatttttagtggagacggggtttcgccatgttggccaggctggtcttgaacttctgacctcgggtgatctgcccgcctcagcctcccaaagtgctgggattacaggcgtgagccaccacgcccggcccatagtagtttatcatataaatatgccagtttattccctgcctccattactggacatttatagttatgattgttttaattttatgaacaagcccacagtgaatattgtgaggcatatggctcttttgttatgtaatatttctttggaataaactcccagaagtaaaattgctggattaaaaggtgtgttattagtcagaactctcttggttgtgactgaaggaactctgacataagaaaaaaagtgggggttaattactgattcatagaagcaaactttggcaaagacaagaagggagctggctttagggagctgggaccagaggctggaattttaacctcctgactttctccttgtctcttgaatttatcttagacataaatgaaaatagaggtaactcaaagcgtctaacccacagtgacaattgctgctctgtttttagagccgggattttgttcgtggacttgccttgcctggtggttgaactttgcagccccttcctcctccgggcagcttctctcagtggcagctgtgttccccatggtttgtcctggatgtctcccttgtgccatccttgcaagcccgcggccagcgcctccacccacgctccggccttgctcccactcccaccgctctgccacctcccacctcagcctcccaccttggtgtggagggaccagcgtcgaagacaaaggaatctctgacgagaaccggccagtccgggagggacggcggggaagggggtgctgctctggcggagccctcacttcactcgcttcccctcgagcgcccctctaggctggggcccggccgctctgggcctgctcctcctcccgctcctgttgcggggcaccaggtcagaccctacagggggctccgccagggggagggggagaggggctcccttcaaactcggcccggccgcgggggtcccgggtgccctctgctgggctccttccacgtccttgtccctcctgaactcccgttccagccctgcccccgccccgcagtagggaacggactcgtttctgccccgccccggggtccgggcgcccgcccggcgcttcagcttcagcaacgtcaaggccacgttccctccgctccagctcgaaagacggtggcgctgactctgctctgcgcgccgcagcttcctcccgctgctccgcccagcggtttctgatcccctttcggcgctggggactcacacgctgcggcgacaggaaagcccgcgcccccggccgcttcccggaacgccctcggggacggctgagtcacttggcgcccgcccgcgcggccaccgagcccagaagcggggaaagcccagaagcggggaaaccccagggacagccgccggccctgggggcagccagcgctccaggccgcccagcacctcgggcccggatgggcttctcgcgccccagggctgcggccacaccccgccggcccagaccccgcgggtagagaaaggaggtgcaaccctgagagccaagacgttgggcttggctttgctttgcgtttctttccttttttcttttgtttcttttcttcttcttttttttttaaccacatccaggaagaggagaaacctgtctcatgacaggaaacgaagagggaggatgcatccgaactgagggacattgtttcagttgcctcacctgacatactgtctcacctgagagagggaggccgaagaggcagccaatggtggctggagcaagccctgtcctcgttacctgggctgtggctgagccctggggctcaccggctgtatggccctgggcaagtcctcggagccttaggttctctgcaaaatggagatgatgtttaatagaaaatgtttctataacttttgtggcttactttttgaaaagcgagggagggacttttgtccttccctcctcgcatctcagtcgcagtgctggttcacaatcaggctgttaacgcggtttccacatttcctgtcctcccccttcccctttcctgctgggaataagaaggtgggcccccaaggagacagagggtacactcgtaaatgaaaaagaaaagtcagcacaaggaccctttgctgcggagatttctttttccaggtatcctaagtggggctcttgccatccctgccatccctgctctacaccgaaggggtgaagtcctgggactctgttatgcccatctgtatgtaatcctaggcaagattattacagtagcgctttcctctttttagaatatacccttgtctagcccctaccccatcttcaggacagtaaaggttctcaactcacttcaaaccctcctagccgtctagaacagtggctcacaaccgcagacccataggaaatgtagggccatctatgtaataaatttatccggatgtattataacaattttaaggttacacttgtcctttcttgaacaggacaattctttattctaagactatatgcttcatagttttagttattttgaattgtccattctgttatgaaatacgatagttattgttggttgatgtcctctctcagaaaaataaaaaattagcagtcctaggtagatcccccaaaatcttttaaacttgatctgtgaaatccaaaaagcttgggtaccattgctgtattccacatgtggttcacatcaaggttccttgtccctcccaaggagatttgtagctattaaaagaaacaaacaaacaaacataaacaacaaaaaccctttcgagaatcagatcctcaaagaatgtttaaggatagacgtggaaaaacaaagagtggggagaggagtctttctctactctcaacccctagcccttagtgta

SEQ ID NO: 1880932 - DNA, 4001 bp, Homo sapiens
ctatgaagtcgtcacaaatattggttatacttgtttgtagaagcaacataatttcaagaaaagccaccttctcacatcaccttttacagcttcttaacataggtcacaggttgcattttgaattaggtgaatactccatttgtcagtcggtaaccacttctgaaattaatttattatatttccccaatataacagcaatacatgttggtatagaaaacaccttatattaaaaaaaaagtctatgtacctacatgtgagtatgtaatcagccatgtcttccacccaatgtggaaaatttctttcttaaaaattttcttaggccaggagcggtggctcacacctgcaattcccagcactttgggaggccaaggtgggtggatcacctgaaattgggagttcgagaccaccctgaccaacatggagaaaccctgtctctactaaaaatacaaaattagccgcgcgtggtggtacatgcctgtaatcccagctactcgggaggctgaggcaggagaattgcttgaaccctgaaggcggaggttgcggtgagccgagatcgcatcattggactccagcctgggcaacaagagcaaaactccgtctaaaaaaaaaaaagtttcttatacatttttcgatgccgtttctttttttctttgtttatgaaaatgtctcagatcaaagtaatatatcttcattgtccaggatatttcgttaagtatagaaaaatataaagcagcatgaaacatactatccttcatctcaccacccagagatcacatcttaatatttttggccattgcattcaatctagggcaaaaacaggcagcataacttgcacacagtggatgctcactgcatccctgctgaatgcatgaatgcagaaagagaacttggagaagggcccatttgtcttgctaatagaatcaattatacagctcttatggtctaaaattatttgtcttctcaagtttgcctcattattgtcacacagcaggagcctggccaagacacagccatctttctactatttgacaaccaagcactttggaaggaatggtcactgttttcacttcattcctgtcattcattctctcactcattaaataaatattaagtgcccaccatgtgccggaaatacggagaagaaaaaaaaacatgacccctgccctcatgcaaattactgtgtaaagacaaaagacaataaacataaacacataaatatatatatatacaaaattttataagtgcaaaaatagaagagaacaagtggctgggaaaataaacggggcaatggtataattaaggaggggacagggaaggcctttctgacgcagtgacaagtcgggtcaagaaggaacgaaagggaaggttatgaggctgtcaaactttgagtgtggccaaaaaaataatgaagaaagtgatggaggaaagactaggctgaagaagtagggcagtagtgaagtgtcttgtaagccatgctaaggattttgagttttattctatgtactgttggaaaccaatactttttttgtagtgtaaattgagcttatttttcacagataggtttcaagatgcaaagcatacaaggaccaaaaataattatatgaaaactctccctccctccggtttcctagccacccagtttccctcttcagagctgccagtctttcctacggaaagactctaggcacaaacaagcccatctatctgtttatattataatgcattttcagcactgggacgagcccatctgatttaagaccacctgaatgctgagagggcatgactctgcgttagaactctgcgctactgcccacgcatctcacaaagtctactacgccgcgcgttctcggtttcaacgcacctccaggattcagggcttcctaagctgcaattcagcagggctcccttgcttgttctcactctgtgcccccggcaacgaccccgcgcgcctacactcccgtgccgcctcagctactagtccgcaacttctagccccaaaacgctggagctcagaacccagctcaggtgcgctcgtcggtttcccagggagactggggctgattgtaggcacgcgggggcgggaagacagcttcttgcttctggctgcgatggaggcggatctgggcggggccgaaacgggggcggggccaagtgtgggggcgtagtcaggcgtgggggcgggccggcgccggcgccgcggtcggcggcagcgctctcctaagctctcgcggctgcgcttcggtcccggacccgggccacccacggggtagtgggtgctcctcggccccggacattgcaagccccagaaggtaaatttgcgtgggagccgcgcacctggagcgcgagggtacccatgatgagggcgggaggctggatggcgacagaagggagcgtcccgcggcgagtttcccaagaaagctgaactcgtcccaagtttcttgtgcctcggcttgcactcagtgaatgggtggcgggctcatttgctgcgggtggtcttttggcgcgggagggacgcggaggtgattggattaatccgcctgggcggcagcccagatttctgccgggaaccgcgcaccgcagtggtgcagtttttgcccgagaaagggcgggtaagtgcggtgcagtcgtgtcctgcgcagcagcagggggaccgccggtctgggagcacgcgagtcggccaggcgtccccggttgtccagaggcacagtttcctaacttctttcctctttaggcaagactaactcggtgttgctcctcccggcgctgacttcgaggcccggctatggacggcgagagcgaggtggatttttctagcaacagcataacccctttgtggcggaggcggtcgattcctcagccccaccaggttctgggccggagcaagccgaggccccagtcctaccagagccccaacgggttactaattacggatttcccggtggaggacggagggacgctcctcgcagcgcagattcccgcccaggtgcccaccgcctcggacagcaggacggtacataggagccccctgcttctgggcgcccagcggagagcggtggccaatggtgggacggcatccccggagtacagggctgcctctcctcgacttcgacggcccaagtcacccaagctccccaaagcggtgcctggcggctccccgaaatccccagcaaatggcgcggtgaccttgcctgcgccgccgccgccgccggttctgcgccccccgcggactcctaacgcgcccgccccctgcacccccgaggaggaccttactgggttgactgccagcccggtgccttcgcccactgcaaatggccttgccgctaataacgactctcctgggtcaggttcgcagtccggccggaaggcaaaggaccccgaacgggggctctttcctgggccccagaaaagttcttcggaacaaaaactccccctccaaaggctgccctcccaggagaacgagctcctcgagaatccttccgtggttttgagtacaaacagccccgccgccctcaaagtggggaagcagcagatcattccgaagagtctggcctcggaaattaaaataagtaaatccaacaatcaaaatgtggagccccacaagagactcctcaaggtgcgcagcatggtggagggcctaggaggacccctgggtcacgcaggggaggagagtgaggtcgataacgacgtggatagcccagggtctctgcggagaggcttgcggtccacgtcttatcgcagggcagtggtcagtggctttgattttgacagtcctaccagctcgaagaagaagaacagaatgtcccagcctgttctgaaagtggtgatggaagacaaggagaagttttccagtctgggaaggataaaggtaaaagtgggcaggagtgtggcacgccattcactaagcggaaagtaaatgtgttgggagtggggaggaggagcgtagaggaaacccgaagaagtcattccgttttaattctgtgttttgctcttgattgctagtg

SEQ ID NO: 1880933 - DNA, 4001 bp, Homo sapiens
ttttcaaatgggaaaacttctaccagaatcatccccaaagacccacagcaattaagtagtggatgtagcttttgaacccagtcagtctggtttcagagcctgtgttctcaacaatgtgatgattgtaacaagtgcaattgatgcagaggcatataatgtaaagcatatatttataggatttaaaccataactaaagaaaagcacattaaaaccataaaaactaaagtgatcccttcttacggggaaaaaatatattaatatatacatagaaagaagtctcgtcactgatgaacaacaatatggagtagatgaagtcccagagaactgttgttgtgttagttacatattttttataaagtctgaattttttaaagagagtgtgtattgcctttataattagcaaaataatacacgtagaataattaaaaaagaactccttccacaatcacaatcttccacaagcaacaggaggcttatattaaaagtttcaggtcttagaacacatcggggtgtttcattgaacatgttctgtgggccgggcatcatggctcatgcctgtaatcccagcactttgggaggccaaggcaggtggatcacttgagatcaggagtttgagaccagtctggccaacatggcaaaaccctgtctctactaaaaatacaaaaattagccagatgtgttggcacactcctgggaccccagctgcttgggagcctgaggcaggagaattgcttgaacccaggaggcggaggttgcagtgagccaagatcatgccagtgcactccagcctatgcgacagagcgagactctgcctcaaaaacagaacatgtgctgtggctaagcctctggggactgatgaaatctgggtacacagaaggggctggcacatgctgtggtgtgctctgcagtgcttcaagatgtttgcccccacctcctctcccagttctccccacctctctgagagtcagtctagaggctacttccatgcgcccttggggttagcagttttattggtcagcccagagtctgagtttggtggacagtgcttggcagccataacaaatgcttagatggtgaaaaggtatatgctttggggtcagaatgccagattgggggcttcagacacatttcagagcatcgggtctcttatctgcaaaataggtatggaaaataatgccattttctgaaaaccagagacttagtaattatgtgtgtaaagtgacccgaagaatgtctctcatgtaggtaagcgcagaaaatattagctccatataactagggttcctttattcctgagatgactgttttctaaagataagtatttaacagatgcttttttttttaaatgtgagctgccccctcataaaggcaaaaccgaccatacctgggtttccacttagtcctgcttgtctcatttcccttcaggcagtagagaagccaggctgtatagatcctgacacctgtgagggaaagctcacgtcatcttcaacctgctgacaccaaaaatatgccaggaacattggagctcattcttagattcaaagccgtttctttttctggccatatgtgaggtctgtgggagttaacagtaggcttgtgtgccagttgagcagatttgcatttttgagtttctagatgcctgtttattttatatagttatcgttttgattagtccttgcttagtccctttttggttccagagttatgcagggtaaaatatgcttttactttggccttctgggttaattacaaaatcctagttgcaagtgacaggaattcaactcaaattagcttaaggagagtttttaaaggtacaggggtatgggaagtatttcgtggaatgcagtggaggctcagaagtaccttgaaccaggcactggaagcccatgaggattcttgactcctctctgctcttagcacttttgcttggccaactgactttttccatttctcagtacagttgaaacacagccatctacagagagacagccttctctctctctcagagccagaattactagggagggattctgattggtccaacttggatcaagtggatactcttggaccaatcagcagtggccagggagtgggattatgctgtaccaccatggtgactcctatggtaaccatagtaacaatgggggagaaggggcagtttctagaaggagaaggaggcactggagcagatacaaataattcctgcctacaaaattcttccctatctgtcctcctatcataaaaggtaatcatcctgattccattttttcctgtctgactccatgtgggcaaaactcctaactcctcttctttcatctttggttagaagcagtccatttagttattgattttttttcaacctggacaatctcttctgggagcaagaacagcctgtttggcaagctattcagcaagacataaaacataatagtcctcgggatgaatcaaaataatagcaggtcctagaaaattgtgttcttaagccatttctagactgttgggaagtattggggttcagtcaggggttttaaacagaaggtggtccaagaatcagtctcagtattgttttgtggttagtcgtattgatgactgttcattgaaatttttatttttaattttaatcaaatgtagcctttattacacacacaaaaatgtcatggtagtgatcttgctacctccaaaagagccttatgtatttgaaagcatgagaggagatggtgatgtcgagaactgagggaacatacctatttagaaaatcctccttttctgaagccgaaacttccctttctttcctccgtgttaggtttatttctctttctgcctgtgtctgaatctgggaatgggaattgaagcctcttgcgtggaggttggtaaaagtcctgttattggattttcttctctgtcatcaacttcttcctcttcacagtgagtgtggcccactgaatagactggacgagattggattgtggctcgaataccacccccctttaaatgcccaaatcatactgcccgttaaatcaattgaaagacacagctagaagcaaggggaaaaagatgggatccattaacacacttcacagagagtgcaggcaggatggaaggaccacactacctgagtcctgggcttcgcaatgtccaaatgtcctatctctctgtacagtgtcagctttcatgactgacgatgcatctacaaggactggagttgaacttcaagcaagagactcacagacaaaggcgccctgggccagtggcacacactagctttatcaaagagactcagggacaagtacgcctggtctgtactgcggtttgccaattagctggatgaacagctggctaatttctgttttatctcttgggcagaagacacatgaggctagaataggttatcttcaacggggagccgagctaaggcctcatgtatgttacgtgctcatgtgttcttagtgcctctgtatatttagtgccttgtaagtctcatgcatatttagtgtaaccagatgcctcatgaatattaggtatcttttgctccttccatcccttcttgtctgtgttaggtgcacacatttgacttactaaccacttaattataagtaacatcacttaaaatatattctattatcgaagatgaataagtcttacaaacttattcttcctccgtaattgaaattagtagtctctaaaaactaataatcattaatcttgattgcatggggcccattttaaaatgggctgccctatataagtgtgaagattaaaattcttttcttccttgatttttgggcctcctgcatttgtcagtctccactcaggctctctctgccatccaaccctggaaatctcaatgaacacaactccaggaccagcttttttgtgcatgactgttactgccaactcccacgtggtgctggaaataaaaccagcggtattagatgctgtagcagcagcaaggaccaccagcacctgaccccttggttaatacacattcagggaagaggaga

SEQ ID NO: 1880934 - DNA, 4001 bp, Homo sapiens; identical to SEQ ID NO: 315308

SEQ ID NO: 1880935 - DNA, 4001 bp, Homo sapiens; identical to SEQ ID NO: 315310

SEQ ID NO: 1880936 - DNA, 4001 bp, Homo sapiens; identical to SEQ ID NO: 315327

SEQ ID NO: 1880937 - DNA, 4001 bp, Homo sapiens
acccgctcctcactcctgagaagggtcctgccaactctgtattgtcctgttggatttgcagtcagaagtctgaggctggcaggcactgggcaggcaatgagttctttccctgtaagttgggcacaaaaagatcggcatgggagcagcctcctttgagacagctgctctgagagaatgcaataagcagggagcagccagcaattcctcctagcagagggcgactcgtgggaggagttcagtttgccaagtattgtcatttgttgagagaaggtgtgtgctcaaggaggagttttaacctggaggatcattaactcttttagtcagctgaggagctgcggtggctcggcgagttggagttcatcctggaagcgtctgcacgacaaggtcagggaggaggtgtggaataactttttcatgggacactttgagaagggccagcacgctctgctcaatgaaggagaagagaatgagatggtaagattctagccacattcccttcttcccatcccacttctcagcctgcgagacacacacacacacacacacacacacacacacacgcacgcatcacacacacacagacttttctaaaatttcactctggtattacacgagaaaaggtcatgtttgagaaatctctctatcctgtaaatataacctctgacagcagaaatttgctagaatgaaaatattgtattcatcttgtcaagaatgttttctttttaaagaaaacagagagggagagaagcaccatgcactttatgattcttgtttgagcctcattggtatagccagttctgttcaaaacacctaacaattttaggaaatccctaatgtgaggagcagtgtattccctgataggaagaagcagaagttcagcagtgaagcagaagtgcagctgggtctttgaccttctcttctcaaatgtcttgttcaccgagtctgttggacagggaagacatgcaatattaacaattatcagcctacacacatttctgttttcttctagaattttacttttgtggcttcctcattatagagattggttacagaaaactttcggtagttcagtatctctttgattttagatgtgcttctatcttgagaactataggaaaatcaaagatgactttcatgctcaggatgaatttaaaactgtatttctcaattacaatataatcaagagagagttagaaatatgtacttctgtttaataagatctttctgctaattgtgtaagcatagtcttttatgccagtaatgatgtaattaaaatgttaaaatgtgacgctctcattccataatagcatttaatcttcctggaattaatatgtaaataacaaacctgaaagatatttacttaaaatgttttcttggttaattgctttagccctgactattacattctttgttcctaaactggtctttcaagtctaatctgcttacctgttcctatagcaacaacattttttggactttcaagagtagatcccttctgctatcaaagctgaaaaaattataaagaagtaaaatgtacattaattcaggtgcctttcttaaccatatcctttacttcattcagatttgactgccaaatgaattgccttcagcccctccacaaatgtcaccagaaatggcttgctagcccacattggatatcatctttgtttctttaaagagttttctttaggaagtgaatatctcattactctcgatattaagttgaaaagtttatcttcatcttgaatactcttcaccagaaggcaggggctccttcctctgaaacattttttttctctctcatttagaaatacactcactcttttccagtaaacccctttctgctctcagacaatttgtctttcaagtctcaataagaatcatttattttccagaagacattcatggttgtagggaaactgttacctcttccctagcatacatattccaccaaagcaatttagttaacagttcatcttcataatggcaccatcagatgcatggagaactccacgtagttttgtatgcagctgaaagcccagttaggagaggccctttaatatggaaagggacactgtgttttctggtaggcagccatttggccagtagtctcagcagaggtgcagcaattagtatgcactcctgagctctccatcctcttctgcctacagaaacctggccacctgcctgttgctgtgtctgacactgtgttcctttttaactcactcctccatcccttgcccagagcagtaaactttaaaaattatcaagctatatatatagtctacatattttgtagtgatttttagtatacacagcattttcttggccactagctaatttagttttcctcacaaccctatgaggtagatgctgtgattctaactttaaagatgaggaaattgatgcacacaggctttccctaaggttgcatcaaccagtaagtccaggagctgaggcaccgcacaggttagtttaagttgacagctcttttgtctctggacctgaacatagcccactgataccttttccagttcttccggagaacattccactcttaacagaacacattcccttccttcataaaacaaagctaaggagaacatcaacatccagtcttcttagattccccagcatctgttctgttatagataatttgagtttcttttttcttctagataattcgagtagcttaaataagtctgtcttctctgacttccaagtccagaaatgtgtcacaccaaagtgtttagtttcatgctttataatatactttacttgaacctttgcaaacgtaatttctcttgtggtagaaattacttcaaatttcaagagaaaacaacatgctagggtttagacctcatgtcaaataaagaagaatattctgaggcctaaagatgcctgggattatcttccattttggagttaaaaaaccaaaaacaggctgggcatggtggctcgtgcctgtaatcccagcactttgggaggccgaggcgggcggatcaccaagtcaagagattgagaccatcctggccaacatggtgaaaccccatctctactaaaaacacaaaaattagctaggcagggtggcgtgcacctgtagtcccagctacttgggaggctgaggcaggagtatggcgtgaacctgggaggcagaggttgcagtgagccaagatcgcgccatggcactccagcctggcaacagagcaagactctgtctcaaaaataagtaaatagataaaaataaataaataaacaagtaacaaaccaaaagcaaacaggaactaaagagcaaccctaggtgacctgaaaataatatctttaactgcgaaatgagacaggacccaaaggtagaaagaagcttttggagggagaaggaaggaaaggtgagaaagtggccttcagcgaaggttcacctaaatgactgcctcagaaaggcttcgaggaggaaactctgggagagcactgggacgggacgggaggcctggctctcaccggccttgggccagccgcttgcctgctctagcctcagtttttatacctgtaaaataggactggtccttcttacccccaccagactcacagagttctcatgaagatcagtggagataatccatataaacatgttttgagaagtaaacagttctggcgaggtgtgagctgctatcatctaaataaaggtaggaaaagccaagggcttagcaattaaccaattgagtaaatactatcccacaaaaatgaggtcatctcttgccattcagttataccaaaaggaatatgtactttttttttttctttttgttacacggagtcttgctctgttgccaggctggagtgcagtggcgtgatctcggctcactgcaacctctgcctcctgggttcaagtgtttctcctgcttcagcctcccgagtacctgggactacagctgcatgccaccatgcctggctaattttttgtatttttagaagagatggtgtttcaccgtgttggccaggatggt

SEQ ID NO: 1880938 - DNA, 4001 bp, Homo sapiens
aaggaaatgtgattacaaataccttttgaagaggattagtgataatctgtaccttttgtaagcaaaatgaatgagagtactattagaaacctgtggattgaagctttcattcatcaaagaaaatctgcagctctgtgcgcttccgctcaacccaattccttaggtcctctgaataaagcagtgacctgggagttcttgcacccgctcctcactcctgagaagggtcctgccaactctgtattgtcctgttggatttgcagtcagaagtctgaggctggcaggcactgggcaggcaatgagttctttccctgtaagttgggcacaaaaagatcggcatgggagcagcctcctttgagacagctgctctgagagaatgcaataagcagggagcagccagcaattcctcctagcagagggcgactcgtgggaggagttcagtttgccaagtattgtcatttgttgagagaaggtgtgtgctcaaggaggagttttaacctggaggatcattaactcttttagtcagctgaggagctgcggtggctcggcgagttggagttcatcctggaagcgtctgcacgacaaggtcagggaggaggtgtggaataactttttcatgggacactttgagaagggccagcacgctctgctcaatgaaggagaagagaatgagatggtaagattctagccacattcccttcttcccatcccacttctcagcctgcgagacacacacacacacacacacacacacacacacacgcacgcatcacacacacacagacttttctaaaatttcactctggtattacacgagaaaaggtcatgtttgagaaatctctctatcctgtaaatataacctctgacagcagaaatttgctagaatgaaaatattgtattcatcttgtcaagaatgttttctttttaaagaaaacagagagggagagaagcaccatgcactttatgattcttgtttgagcctcattggtatagccagttctgttcaaaacacctaacaattttaggaaatccctaatgtgaggagcagtgtattccctgataggaagaagcagaagttcagcagtgaagcagaagtgcagctgggtctttgaccttctcttctcaaatgtcttgttcaccgagtctgttggacagggaagacatgcaatattaacaattatcagcctacacacatttctgttttcttctagaattttacttttgtggcttcctcattatagagattggttacagaaaactttcggtagttcagtatctctttgattttagatgtgcttctatcttgagaactataggaaaatcaaagatgactttcatgctcaggatgaatttaaaactgtatttctcaattacaatataatcaagagagagttagaaatatgtacttctgtttaataagatctttctgctaattgtgtaagcatagtcttttatgccagtaatgatgtaattaaaatgttaaaatgtgacgctctcattccataatagcatttaatcttcctggaattaatatgtaaataacaaacctgaaagatatttacttaaaatgttttcttggttaattgctttagccctgactattacattctttgttcctaaactggtctttcaagtctaatctgcttacctgttcctatagcaacaacattttttggactttcaagagtagatcccttctgctatcaaagctgaaaaaattataaagaagtaaaatgtacattaattcaggtgcctttcttaaccatatcctttacttcattcagatttgactgccaaatgaattgccttcagcccctccacaaatgtcaccagaaatggcttgctagcccacattggatatcatctttgtttctttaaagagttttctttaggaagtgaatatctcattactctcgatattaagttgaaaagtttatcttcatcttgaatactcttcaccagaaggcaggggctccttcctctgaaacattttttttctctctcatttagaaatacactcactcttttccagtaaacccctttctgctctcagacaatttgtctttcaagtctcaataagaatcatttattttccagaagacattcatggttgtagggaaactgttacctcttccctagcatacatattccaccaaagcaatttagttaacagttcatcttcataatggcaccatcagatgcatggagaactccacgtagttttgtatgcagctgaaagcccagttaggagaggccctttaatatggaaagggacactgtgttttctggtaggcagccatttggccagtagtctcagcagaggtgcagcaattagtatgcactcctgagctctccatcctcttctgcctacagaaacctggccacctgcctgttgctgtgtctgacactgtgttcctttttaactcactcctccatcccttgcccagagcagtaaactttaaaaattatcaagctatatatatagtctacatattttgtagtgatttttagtatacacagcattttcttggccactagctaatttagttttcctcacaaccctatgaggtagatgctgtgattctaactttaaagatgaggaaattgatgcacacaggctttccctaaggttgcatcaaccagtaagtccaggagctgaggcaccgcacaggttagtttaagttgacagctcttttgtctctggacctgaacatagcccactgataccttttccagttcttccggagaacattccactcttaacagaacacattcccttccttcataaaacaaagctaaggagaacatcaacatccagtcttcttagattccccagcatctgttctgttatagataatttgagtttcttttttcttctagataattcgagtagcttaaataagtctgtcttctctgacttccaagtccagaaatgtgtcacaccaaagtgtttagtttcatgctttataatatactttacttgaacctttgcaaacgtaatttctcttgtggtagaaattacttcaaatttcaagagaaaacaacatgctagggtttagacctcatgtcaaataaagaagaatattctgaggcctaaagatgcctgggattatcttccattttggagttaaaaaaccaaaaacaggctgggcatggtggctcgtgcctgtaatcccagcactttgggaggccgaggcgggcggatcaccaagtcaagagattgagaccatcctggccaacatggtgaaaccccatctctactaaaaacacaaaaattagctaggcagggtggcgtgcacctgtagtcccagctacttgggaggctgaggcaggagtatggcgtgaacctgggaggcagaggttgcagtgagccaagatcgcgccatggcactccagcctggcaacagagcaagactctgtctcaaaaataagtaaatagataaaaataaataaataaacaagtaacaaaccaaaagcaaacaggaactaaagagcaaccctaggtgacctgaaaataatatctttaactgcgaaatgagacaggacccaaaggtagaaagaagcttttggagggagaaggaaggaaaggtgagaaagtggccttcagcgaaggttcacctaaatgactgcctcagaaaggcttcgaggaggaaactctgggagagcactgggacgggacgggaggcctggctctcaccggccttgggccagccgcttgcctgctctagcctcagtttttatacctgtaaaataggactggtccttcttacccccaccagactcacagagttctcatgaagatcagtggagataatccatataaacatgttttgagaagtaaacagttctggcgaggtgtgagctgctatcatctaaataaaggtaggaaaagccaagggcttagcaattaaccaattgagtaaatactatcccacaaaaatgaggtcatctcttgccattcagttataccaaaaggaatatgtactttttttttttctttttgt

SEQ ID NO: 1880939 - DNA, 4001 bp, Homo sapiens
cctttatctggccccagcagggaaagtcaagagaaagtcctttattacccccttcaaaaataaagatgaccaagttaccttatagtgaaatggtacttcttgagaccagatctacctactggtttctgggaatgtaacagtttggggctgcagagtctaggaagtgaaaaggaacatagggtagtgaatctttagatgatggctggtgagttgttggtgaaatcaggagacacccttttattgttagattttgttacccaagcattcatagggaagtcttacaaactgcctattaacttccagaatgcctgaggctgggtaagtaaccagtgactaaatgactatttcattcacatgatcattacatgatattgctgaagaaagtaattttacctttttcaaatgcctgagaaattttgccaactaaaatgcctaactttgaaaagccatattccccttaaaaaatgaattcaggaagacacacactgcctcagaatgagctgtcttctcaacatcccaatcttcctcctcatgcctttgtcattggcaatgtgcataaggctgtctgcattctctttctgaattcagggaatactagaagatgataagattcttgatgtgatatagagactaaatatgtgctttaagcctgaaagaaggagccatttttcaacaattgtgggtagtcatgacatgaacatatatagcatgattattttcatctacacagcccagtatcggattgaaccataggggtgtgcctacatttgacttttttttgtttttgagacagagtctcgctttgttgcccaggctggagtgcagcggtgcaatatcggctcaccgcagcctccgcttccaaggttcaagcaatccccctgcctcagcctcccaagtagctgagattacaggagcacaccaccatgcccagctgattttttctatctttagtagagatggggtttcactgtgttggctaggctggtctcgaactcctgacctcaagatccgcctgcctcagcctcccaaaatgctgggattacaggtgtgagccaccgtgcctggccacatttaattaactgtttttgacctataaaagtggttgtttcttatgcattaactaataataacgaaacgctaacaaaactttattttttctccttattgatttcataactctgtttttagaaaaatgcagctaagtctttaagaatattgtcatttatcaatacttataatgtataacttataatagaaggcaggcagtgtcttacatctgaaactccttttctttggcagccgtattaatttttactcttctatttgtattgtgcttgcacaccaaactgatatagatggaaaacatatcttattttcaccctgacatgcatcaaaaatatgaatatatgtctctagttatatctgttaaactgtttttgaaatttctcatcctggtatttgagctgtaaatgctcagcaacagtcagtgactaaaatgcagctggattgggttatgatctctgcattaggttgtgtgggaagtgctctgctcatgactgcatactcttaagcttggccttggtgcgtatcatcaagcaggacttcttttaaagtgtgcaatcactgttttgccgatgtccttggttatatcactaccatttcaatgtgattgattgaaacaacttaaataacgcaactgccttttccctctgggaatatgtctctccaaaccatttttcttcagcctgattccaggtgtgttcaggggacacacacatacacacaaatcacatgtgacttagttatgatggaaaatattcaagtgagctgttcatttttcttacctattaatccttcttctcctgtctcccgcagttattatgtgggcatgtgtggagatggagctaacgactgtggggtgagtagaaatggcttttgctcagacaagccactcactaatatccctctggaggacctcaggctctcctggggtttgtctcttcatccttccaccagcaaccatttgattattttgctgtttatatccacctctacctgagtgtgggttggaagcggaggggagtaaagggagatgagacacttccgatgctttctggaaactcctagaataataaacacaaaggaaggctacttagactcccatatttcaggttccaaagatggaactttacaagtctatctgctttaaatctttcctgttatcagtaatgaaatgatttctcaaggaggtgatttcttcccccctcccaaggtcacacaactgataaagactcaatgaaacgaagtttgaaactgatgattaaagttttgaattatatgtaaattatatttattcctgccaaactttcattctctggttagtttttaagtttgcttcacccagaactctttcactcagtaaaatcctagaccaaactatttagttattttatgctatagaaaaagctaaataaaatgattatcagcaaattatttttcatatgcagtagaagggcagtgaatgttttatattctgagttttaaagacatgaaggaaacaaatagtctaccttcaagattatgtacttaaggaaatatttcagtagctgatttatgggacaagaagtgaggaagatttctttgtatttccaaagcttattagagatttaagatcttggtatttgttttatttctctcttaaatattatttccaaatttctgtgaaaactgtgtttatagctagaaatttttatagctagagatgttttttgctttatgtttcatgagaaaaagctaatttttagtctgttctttcaaatctagaatacgtatcctctcacattaattatgtggcgtttagaataaaacaaaaaaatcaaatgcaaaaagggacatagtctctgcctcctaaagagttcattgtctgatgaagaaagaatcatgaataaaactaaccctaacataaagtagatggtcctaaagtacataatagagatacgaactagagatcaaagaggaagaagaaaatgtcctattatttattaaacctgaatctagtatgtactcatggcgccaggtactctgtagttctgtggaactacagatatataaaagttcattttatgcccacacaattcttataggatcggcctaggaattctttcacctttgttcatgaagattcccaccaggtacaagaactgaaacggtgaaggtccccaaccaacgtccatccaaattctgtcatctttttaattgagtttttgaatgagggcttccatctccttttcacatctataatccccacaggcagggcccttgtatgcacatgcccacatgcacacacgcatgcatgtacacacaccacttttctacctctgggtcattgtttagttagtgactttgtggatcaggggagagagggcactccaggtggagggacagcattaaacagagacccaaagatgaaacagtacagtgttatacctttatgatgtgaagaacagcctcttggtgttttaagaggtaaagcctaacctgaaaagtcatgggtgagacatgggcttatcattccaggctttgaaagcggctcatgcaggcatttcattatcagagcaggaagcatctgtggcatccccttttacctctaaaacaaccaacatccagtgtgtgcctcatctcatcaggtaagtcattttttcctcttccagccctacaatcaatgggcccattgtctggctctgcagacagaattcaactacaagctaaagtgataaatgctgcaacagaggaatgggtgaagtgctattggagaaccaatgaagggggccattagtgttactcaagagtgctggtaaaagccacagaaaagtgacttttgctgagccttaaaggataggtgggtatcatgtaaacagttgaaagcttgacttgatgttttaaaactaattgtatttcttactttttctctcctctatttggtatgttggatgcttcctgta

SEQ ID NO: 1880940 - DNA, 4001 bp, Homo sapiens
aaagcactttctaaggcaaagcccaatgttgtgttttttaaatgttttcctttttctggacttttctggcttggctgttcagatgtgggggtgggggcttggtggtgcaaagatacccgacccccaccatggcaccaggctggagccaaggccagatgggaaagcgggcctttctgtgtccttaacagagctggcggcagctttggtatttcaaatgtccttctgaaatctgaatccaaaatggaacaatttttcgagtaaataataccattgatgtcagtgttgctgcaggaggttcagcaggccccagaaactcagaggtgaggacgtggtattctggctacacaaggtctctggctgcacgaggccacctgccttgcaggggaatgaacggtctgtgggtacttaaggcattggcctagctaagagacacattttctttttcctgattatacttgatagtgccccagggacattcaaaaatgccataccttgggaccctatgctgtcatgggcttcgggggcctgggtcaagagtgagaaggtgaggggtggtggagccagggggaggagtcttgcagctgcaggggagataagaacgggtcagggccttctctgagtgatgggctgcccctggctcccgctgaactactgaatgggatggcttcagattcccatattggtttcctactccgccaggatttgacgcagatactccccggtttgagttacagaatccggatcatggcttcctgacccttggcttcttgggcggtttgtggaggagggggaggtgttgagttttcaagaggggccgggcccagagtgtattcagaaggcttggaggagagtggccaggatgcagccagggctacccctctgtggtgggagtggtgcccccacactcagggacccttcagcagggaccccctcccattgccacccaaggatgggaggcacactctgggacacctctccaaggagaaagtctgagtttagtgcgcgtattgtatgtttaacacctccctgacgcttgctaaattctctcttaaacaaggagagcagacctccactggtaggatgcagtatccacccaggatttaatagcatcagcagtctgccttctttttctaaagttttttaaaattgttactttctatttatgacagctgttaccatttttttcccatttatggtagcaataaagtttcactctaaaataagtttattttggttgaaaaaaagtgagctcatttgaataaagattttcagtactttttagtacaggtgttctgatctccaggtgtggagggagggaaagaaacaactggagtttgggaaactctcatctagtccaacctccccacagcagagatgggtacactgagtcccagaagagagaggcattgcccaagcacacacacctcgttataaaagactgagacagggtaaagggctcagggttggggactccggcctttttccactttgccatctcttctttgtgaggccaggatgtgaatgtctctcttggtgtgatcctcacaagcagggggaaatgtgggctcatagatctgctgctgccagggtcctgggggatctgcaggggctggaactgagtgagccttttcatctctaccccacagagccagtcacagaattgatgcttagtgagaacctggtgaaaggatagatggatgaatggatggctagaaagaaaagtggatatatggagatacagatggagagagaaggggatggatggatggatggatggatggatggatggatggatggatgggtggatggatggatggactggtggatgaattggtagttagagaggctgataaatgaatagatggagaaaaggatgagtgaataaatggatgaatggagatgtcaatgaataaataatttggctgatgacttaggattctccctgtcccattacctacccaaggttattttcattcctttagagagctagcagaaagttctctatgagaaaaagaattaatggtgatatttcagttaccttgatagactggtagtgagacacacacacacacacacacacacacacacacacacacacacacacacacacttttcatttaccaatgagacactgaggcaaacataaatgacactgcccaggagtccagggcctgggcttctcattttgcttttgaaactcactccccagactcggatgagttgtctcccttctctgggcctccatttccccatgtgtaaaacaagagtgggtgagtcaactaattctcaccctcccagcatcctgtggctcctttaaggcctgccagatgccaaagcttccccatgccccacagtgtggatggcaggttctgaatctgtcagattgactgggcttctctaagaggcgggtgctttcctgcaaggagatgtgccagagccagccagacaagcaagtggtccccgggggcagcatcagcatgggctccatctcgctctgcctttgggaccagcttatggaaaggagagaatattggaaagactggtgacatgaggtcaaggcctcagtaccctaagggatgcctcccttcatatataaaactgtaatatggaggcctggacaaacaaagatgggaggacagggcaggggcaggagggagaggctcctgggttagccagtcctgggttcagatcctgctcctgccacttcttagctatgtgaccctgggccagttctcccagcctctctgagcctcatcatcctccaaaatgtgagaaaaatgacctctccccctcgctggatccttgtgcaaggtcgggtgtaatagatgctagcttactgtccttccagtcggtgaaccgcaagggaagagcctggatcttcttcattacgaatttctccacttactaaatgtttattgagcacctaccatgtgccaggccctctcccctgctctgggaatgtggtggtgagctaaggtagacccagtgtctgacctcgtggccttcacagtctgatggccgtttatcaaatggtcacttatataagtaggaaatgtcacctgagataggttctgtaaaaaaggtggggtggaggaggggctacatcatggggcccactttgtgtgatgatcctgggccagggtcatcagggaggcgactcaagctgagacctgaagctatgcaggtggggagcaggtacaggtgttgggggcaagggagaggctgggcaatgcaaaggcctattgcgggatgggcgtggcacattccgggaccagcagggaagccagtgtggctggagcagggggcggggacctgcatggcctcacaggaagctagagacatggcagaggcccgacaacccagggcctcagggcccatggccagggctttggactttctcctgagaaaaatggggagtcattaacagatgtacagtggaagggtgagaagtctggccgctgtgggtagagagtggatgcaggactcccagagggaggctgagagcagtgaggtggccatgccaccatccaggcaagaggcaatggtggccagactgggtggtggacacagagtgaacagcagccaggagcagccctcctccaagctctggcgaatgattaacgtgcagggaagagatgcctgtggagtcctctaggacatcctctgcctcctttcgcagctctctcctaatgccctaaagctcaacaacagccctacacccggaggcaggcctcaacgcaggacatgtagtagggcgtccatgcaatagtgaaagtgatggcattcacaattccgacccatggacttcactgtttacaatctcctttcacagcctttaccatagttgctcctcatagcaactgccacggtgggagaccccaaaaccaacctctttcctgcatccctttggaagcagaaaggcagtcaccacggtagggactgtggttatacagttgatgctggttatttctggtagttctgctctataaagtcactgtggg

SEQ ID NO: 1880941 - DNA, 4001 bp, Homo sapiens
aacagtaaattcattcataaagaatagagggacagtgatgcattactgggcaagtactggactaaaggtgatgtggttggtgatgacttaaaatgggccattagtgacccaaggaggggcagatcttgagaagatgttggggtagggggagtgatagggagactgatagagagtaagtggaagcagatactaggttagggcacgtaaaaagttatgacgatgagaaggtgagccgggggactagtttatattagacctgttgcgtgaggctctttgagcgcgcaagaacagagacacagtcaggttaacgatggggattgtgaacaggccacacaggagaccatctcaacagctaccccattatctctggtagctcgatagcccagcatcagctctagtagttgtcatctgtgtaactccattccttactgtttgtttttagggcattactgactgctgtgtcttgcatgtagaccctgcaggaaggctctcgtaggccaattattctctttgggtggcttgaagaagttacttaccttgcctgctgttgagcagagcaccaaggtgccattagacacgtgagcctggtctaagcagccatggccagggtaggggatggttacatggaacaagtcatggcgactttcgcacaggaagggcctatgactgctttactcagaaggggatagctcaatttgcaagcatcttgagattttacagcctgaccagtatacgtggaatttagaaacaaacaaacaaaaaaacctgagctgttttcctcctgtggatggctttgggtttcatctgtttggattgcttccagacactgagcaaatactgtgctcgattggaaacgtctgttgtggtggcaaaatgggagagttgttgcagtgccacacatacctgttacagctgggttagggagggagactggtttctacttctttttagtgctttgcttacagggagccagggtggttccagagtttagggaaggggtgggaagagtgccttgtccaggagcttgattctgtggaatgctgttgatatttaagagattttcccctcctcctggaatttggtgaaggaaaagaggatagaccaaagttgaagttactctgtctagccctgccctttgctcttaccagagttcaccaggatattccctcttacagatggatcatagagcaagttgattacccagccacaaggaaatgcttatattatatatccaccacttgcttttgcagccagtaaccttagtgacatgatgctctggccattatcatgactaaatgagcctttaaagtaatcataataaaagctgacatttgtagtactcactgtgagctgggcagtgttctttctatgcatattagctcgtgtaaacctcaacactttttgaagtagctactgttattgtctgtgtcctatgttcattgtaggaggccagagcaagctcattttcaaaccagatctcactttggaagaggtacaggcagaaaatcccaaagtgtccagaggccggtatcgccctcaggaatgtaaagctttacagagggtcgccatcctcgttccccaccggaacagagagaaacacctgatgtacctgctggaacatctgcatcccttcctgcagaggcagcagctggattatggcatctacgtcatccaccaggtgagcgtgggggcagaccagggcctgccctcgaccctcctcttctctgccagacttggccatgtgactgtttgtctatgttgggtaaaaggaacatcagactatcatcaaaaacgagttctcttacctcatttatccttgaaaggagtagaggaaattcttgtctcagagtgtggagttatgggttcaagttctgggaaattttactgcccttaaaggaacctctggaggaagcctgttttgtgagcccttccatgttagccaatgactgccctcagatttccccggaggcttcctggccccttctgtttctttctgtgcgtgccatgcactatatgatgagattctggaattgtctgtcattatcaaccatagcaactcaatggggatctagacagaggatttgaaagaacattctgtattagtagctgtggtgctctatggctgccaccacatttctgccctgaactttgccactatttattatgtgaaacatattatgtttgattttcactttctggattcatctatttgacttccagaagcatgatttggtaggagcacagcataactatcggctgcttttgaagagcttacctctgaggtcagtggagtggatgattaaagatacctctatttggcattaaagtttattgaaagaaaactaagacatcagtttaaacatcagtgtctaaacttttcacagttatccttggccatccaaggaggccaagaagagggataattccccctcaaattcttataaattctaagaatgtcagcaaaatcatcactactgttagaacaggtaatatttcttttagataaaactttggacaactcagaggaccagctctgcagtatagacttggtgataaactgaggctcttgaaaatcagtgtgcttatatagcacacctatgtctgtattttagtacttggaacaaaatgttactattatattgttttatagctatttttgtttttaaggttgttggtcatagttatgatttatttgattctgagttcttgctcaggacagtaacctacaaggtatagtactatttttatgaatagaaaaacatgtttgctttgggccaggcccggtggctcagcactttgggaggccaaggtgggtggatcacttgaggataggagtttgagactagcctggccagcatagtgaaaccctgtctctactaaaaatacaaaatactctgttaaaatactaaaaaaaaaaaaaaaattagttgggtgtggtggcacatgcctgtagtcccagctacccaggaggctgaggcaggagaatcacttgaacccaggaggtggaggctgcagtgaggtaagatcacaccactgcactccagcctgggcaacagagcgagattccatctcaaattaaaaaaaaagaaaaagagaaagagaaaaatatgtctgcttcgtgttattcttatcaggaaaacattgtggtaacttctgagaaatacttgcacttttatgataaaccacttaactggaattcattctgaaggaatttgaatgaagcagccatgaaaaaattatttaatttttttattacagcttcaatcatattacaggtcaaactgtgttcttttattgcccagtgacgaatctacctccataaggccactgtgaggattagcctccaccagtagcattataacaggattctcttacagggatttctgagaaactttaaagtagcttagaaatattagcaataactttctctttctataggttgagatttcttgatcctttctggcaagctattaactaagtctcttagaagcttagtgtaaattcataacagagggtaagattgggattacctagggttgaactgtgaagcagtaatactaattgacatgactagtatataagaaaggttttgtagttttatacagaatacgtaaaggtatttgtaaaattttaagagaaaatttttttttgttaactgtggtaagaatatttaacatgagagctatactcaatacattttaagtgtacattattattgattatttgagttatttgtattttaaagctgcttttaaaaaatttttaattgtgaaacacacgatgtaaaatttaccatcttaactttttttaactttttaaaatttttgctatcttaactattattgagtgtgcagtttagtaatgttaagaatatttacatgcaatgtatctatgcataattatgcaatatattggttgcataaatatatgcagtgtatttatgaaatcaatctccagaacttaatcttgcaaaactggaactctctatcattaaacaacaa

SEQ ID NO: 1880942 - DNA, 4001 bp, Homo sapiens
tttatctgtaaaacaatacaaaattatctacctcatagagtcattgaggtttccaatgatattttacatccttagatgaagacatacaaaataatataacctattccaaaactggaaggaagcactctttggtttttgtgctttcataataattgctatttctcatttgtaagtttgtggcaacagatggacaagaaaaaattagaactcatagaaaatattttgatagatatcagttttatagatttatagtttcttttcctaaactgtactgttcaacaaaaattatacaaaccttttgactaggagatgcatttttaaaggcatatagactcttagtaatttatatcctctgtacagcttatattttctatatcacgaagaataggaaagaaaaacagacagagttatcatcattcattctccaaaaaagagcacatgcttatgggaaccttgctctaaaacctaagcagccacatgaaaatgatttagcttcctgaagattgcgcaagagtcaacagcacagctagacaatattgttttaattcttcatgttgcagaattatctaaagaaaagaaagctgattttttaaatgatagctgaagatattttgaagacagttgaatctgggttggcaaggcaaaaagtcaaacagcacatcaaaacaagagaaggaaactgtgactaaaataaaagtgatgatatgttcctctaatttaaacattcaagtctgtgtaaatgaattaaaaaattttctttgaaaagttctcaccagttgtgagatagaccaaataatttaacacaagcaatctctagaggttgaattaaggtcctgttttaaaaacattattagtaagcagatggcgactataaaaatgatcacaaagtaatgattatacacactgccgagtcaagctgcccgaccggtcctgcccattctttaactatttcatgtatgtcaagttcaccaccccctgcacacctattgtcctggcatttcacagtttcttctttcaacaagggtagaagcggtttctgtgacacagctgtcaaagaagaacacgtgaagagggaagaaagtctaggtgagggctgggtatgttggctcacacctgtattcccggcactttgggaggctgaggcaggagaactgcttttgcccaggagttcaagaccagcctgggcaacatagtgggaccctatctctacaaaaaattaaaaaaattagcctggcgtggtggtgcacacctgtagtcccagctactcaggactctgaggtagtaggatagcttgagcttgggaggtatatgctgcagtaagcagagatctcgccacagcactccaggctgagtgacagagcaagaccttgtttcaaaaaaaaaaaaggaaaagaaaaagaaagaaagaaagaaaatgtctaggtgggaacacaagctaaggacccagtcttcaaattccaggacctcttggatcatccacatacacaacctgactctcattcacagaagcacttttcatgaaaacattatattacaatgatttaaacacccttctccaaattagttaacttgctttacttcagattagctagtttaaagagaacataattgattagtgaaaaaaaccaacttgactaatgagtgagctctgggaataggtttctgggtacccaagaagcattaactcatacaaataagtccaaacaatgactccagctgggaaaagaacagagtcagaacaagcagttgcctagggcaatacattaccaaggcagcggactctgcaagtggtttctgtagaacaaatgcaggctttgaatttaaatattacccactttgcttggggtaggtgaatctgtagatgaattactcaccccagaagttaagcagccactctcctgacctcactagatggatgacagatggatgttttaaaagtgactattcagagttcagggtgcaaatgaaggcattcactatatggctgcatacacagcactggctataagccaagcttgctttccaccccttctctctagcccagcgtaggctgctgactataagccaaacgccaatcaccaggtagcaatgacttgtctttgcactggctgtgaggaggcttagtcttttttaatcctctactgcttgcaagtgaattgggctattgggtatgtatgtatatgtatacacacacacacacacatattcaaatatgcatatacatatatctatctagcaaaccatcatattttcttttttacttattttttgagacagggtctcactctgtctcccaggctgcagtgcagtgggtgactatagctcactgcagccgtggcctcgtgggctcaagccatcctcccatttcagtctcttgagtagctgggactacatgcacacgctaccctgcccagctaattttaattttttgtttgttctagagacaaggtctcactatgttgtccaggctggtctcaaactcctggcctcaagtaattctcccgcttcagcctcccaaatagctgggattacaggcgtgatccactgtacccagcctatattttcttagccatattttttttctttcctcaaactcatttcagtttattttattcttaagcagagcctatatttgtataagctgcttcaattccctctatggaaagccacaaacagacaaatacataaagtgtagaaagaatgctaatatgatagaccgtgagatctcagagtcctttttagtgaagcagaggtgtcacttgtttaaactgttaaccctggagactgtaagtgtgaatcaatccctcaagtattcaagttgcagggctctcaaattcagggtaaaagagaatttataaaagctctaaagaacaggacaatttattgaatggctgtaatatgaatgcatgttcacaaggaataattccatttcctttgttaaaattcccttttgttctttgagaattcttttttcactagccagaaagcaaaatagcactggaaactgtttttgaaatggacatcattgggctagattgttcgcagcaatctctcttgacattgtgtataatgttttattacatctggagcatcactaaaaaagagggaatagagtcccacattcacatatagcttcgtaaggcagctattgaatagatctagcaaatcttgtggctgttttgaatgtaattatgaatctctgtcctggaggttgtcacttcattcttaggaaggggtagttctacctgtcactaggagactgggcggcctaaggaaactcgtcagtagcttggggctcccttgtctttaaactgaggggcctgaagttagatcacagggctgtagaattcgcctactgctttcacaatcattagttcttttgatcttcacagcaaccctgaagggaggcagggcatttgttatttaatacacaaggaaatggaggctcagagataaaacaatgtgtttaaagatcttagagcaattaaaatagaacacctgagacagaatccagttcttggagatctgttttactgctgttttagcactgtggttcagttggaatttcctacctcacttaatacgtagaagaagaaagtgagaaaaacagtgccagtgttggggtggacagcaggtggaatacgctattggtctgactccttatggattgacttttgatcttgtaaagaatgtacagagtctaaatttagcaacagccagctaatgaacagctggagtcaggtcacaagtttggggtgagcatgggttgaaccagccctgccttgcttttggtggggcgcttagcaacagtgctaccccaggtggttccatgctgtagcatatgctcaaccttttagtaaaggccacagtcttatttaaaaacaaaacatccaaaatttctattatgagcctcccaaatccccgttaaataaaaatgcagtattttcctcactcttcttcctatgctgacatttagaaataccattttcctatttcatttt

SEQ ID NO: 1880943 - DNA, 4001 bp, Homo sapiens
cgatacaattttcccagggctgcctttcctttattgctcaatttaacctcttcctagaggttctgcaagttcaagggcaggatccgtgtcggattcatcaactagtgcagcgcctagtgcagagcagggggctcaagaaatacgtgtcgaccgcatgattgctaagatttccctgtaacaggcggtttttttttcttgtctctctcatccctcctgccctgggtgcagaccgcgaacagcgccgccgaacttcccaacaggcagggagagggccgatccgggctggcacgccacgtccccggggtctcagtccctgggtcaacgcagagaggctcgcggtccgcggtgctacgacctgagcccggccacgtgaagcgtcacgccctgcgctgctgcagggcaggcgccgccgccgcggttgtgtaacgctgcagccggaggggaggcgaccggggcgcctctgctccggagggggcagaggagggagggagcgccgggcacagcgcccggtatctttctgcgcttgactggccgggaggaagggggtgacactggggcacccagggggctgcgcaaccgggtgcccgcccgcccgcaggttgtgcccaggagcggagctcctgggagcgaggggccctcggctcacaccctccacggtcaggtgcgcgcggcgtgctcggcggcagcctcagctgcccctgcgcttggccgtcggcccgcttcccatggggtgacatccgccccgcccctcggtccctccccaaggcgggcaattcctggacgcgagggtgagcagtgggggcagggaagccaggacggaaagaaaccccagcctctggggaaggctggggggccgggcgactccctccgcagcgcgccggttcctccaagcgggccgggcgggggaggaggaagagggctgggctggagctagcaaggggatattcctctcccggcttgagtcagacgcgggcggatccgtcctcccccgttccctcccaggagacgggaacttacttcatttccctggggcaggttcgcccacgttaccaacttctccccctcccccagcacccccgtcccttccagcttccgcgccccccacccaactgggcaggacccaggtcgtgctgccaccccctcttcggggaaaggcggccgcagccgcagacacctgggggccggggctgggggtgggggctccctagcagccgccggagcgttgtccaacacgtgagactcatgtgatgaagccgggggagggcgggcaggtcgctccttccctccccggcagtggccagacgtgcctggagtcacagggtagaacacgtagctccaacccacccactcgctcccatttaacccagcccgcagcctctccattactcctcggcttgcccccccacccccccactccgccctaaccgcccccccctcacccgctccctcccgcctccccgcccgccccacttctcattcacttggctcgcacggcgcagacagaccgcgcagggagcacacaccgccagtctgtgcgctgagtcggagccagaggccgcggggacaccgggccatgcacgcccccaactgaagctgcatctcaaagccgaagattccagcagcccaggggatttcaaagagctcagactcagaggaacatctgcggagagacccccgaagccctctccagggcagtcctcatccagacgctccgctagtgcagacaggagcgcgcagtggccccggctcgccgcgccatggagcggatccccagcgcgcaaccaccccccgcctgcctgcccaaagcaccgggactggagcacggagacctaccagggtaagttggcactccttggcccttcaagcctcaactgcagccccatgttatgcgccactctcaacttggagcagctccgggcgcaccgggaggttcttgcccggcagaacgcctgcagccgtgcgcaagcagtcacgacccttcctggtctctcttcctgcaggatgtaccctgcccacatgtaccaagtgtacaagtcaagacggggaataaagcggagcgaggacagcaaggtaagcaagtgcacccctagggaccctgcgctcagcccctcgcgcgcgctgagtttccaagaaaagttttctcgctttgaggttggcgaggggatgcagggtgtgggctcggtgcctcttctgagtgacttggaaaagaaagggcagacgatggttctgggtgctactctgctactctgctcctctgccggactgttgctgcggggctgggaggataggcttctcatctccttccccaagcgcccaccgcctccccgtgcgtcttgcaggagacctacaaattgccgcaccggctcatcgagaaaaagagacgtgaccggattaacgagtgcatcgcccagctgaaggatctcctacccgaacatctcaaacttacagtaagtgagaagctggcccctttccaacccagtcctttgcccagagggcgggcgggtcactcgccgcctgcaggttccgcggggaactgcagaccagactggcggatcagagctggcgggtggctctgcggtggggtcctcctccacagtcctggcgttttctggctgactcatgcaaatgaggcgagaaccacttggacctctccaagttggctccaacaccaactggccttccttttcaggagtttaacttctggtgattttcaggattccctagtttttctcacttaaaggaacacgccaagaaacacacacattttatttaccccttcccctctaccactccccccaccttttttgttgttgttgtcaaataaggggacttgctttggtgtgtgatttttacggcctgtcctttcttgacagtagccctcggctacttcgcagcctttggttggggaaatggaaaaaaaaaaaatagtatttcgggaggaacaaaaaagcctggatgagctggaagttctgaaagggtgtaaggaaagaagtagggaaagcctcttggctgccagacgtaatagaggtccctctctgagttgacaccactgcaggaaaatgttatctctggattcccctgagttaaggtcggcagaggctgctggagaaatttatctgtcaaaggattttcctgaggtagttgcagcttccaaaatgcctccaaagacaggtggcacccgtttttttaaattatttaattatatatatatattatatatatatacacacacacacacacacacacacacacacacatatatgagtgtatctgtctatctttttaaaagcatgacctacagacttaaaacagccaaccaggaaacactattccacttttttttttcttttctcatttctcattgctaataaatgtcccaaaggtgggacttctctgacctcaccgctgactaaggctcttttccttccagactttgggtcacttggaaaaagcagtggttcttgaacttaccttgaagcatgtgaaagcactaacaaacctaattgatcagcagcagcagaaaatcattgccctgcagagtggtttacaagctggtgagtgctgattctggctatgctctctttaagagtttgagtgcaaatagagagcccgtgggctcaacatctgatgtaataaacattactgcaacaaattgcttatgcacgttcattgggggagatgcagttttatctttcctaaaaggtcagacttttcatttgaaatgcattgtgccacctggcatgaatacgtattagtgaaatgataagatattcctgtggcattttagcttgagagtctctgggttctgggagatttccctactcccttttaaaatgccaaggcacctataatttgcattgtgggtgttttacagttggtcttcttagccctctttcattggagaagaaatcatgggtatgccccagcgttttcctgtttctttgcttccttgtcacttggtgtgtggtgtgatcctggcaggatacagcaggagtttttcc

SEQ ID NO: 1880944 - DNA, 4001 bp, Homo sapiens
ctccagtatctagcacacaaaataaatgtttgcagagaggctgaaagcatgaagacatgactgaaattccaccattagacattgttccttaggttctttcacttattcaggcaacccacctttattgagcaccctactatatgccagttgggaaaaataagatttaaaacaaaaattcttctaagatacaaataaaatgcccacaggagagttcacctctaagatactaccagttacattagtgggaatttgtttggtcagctgcattccagagggatagctggttcagaggagggcttggagaggaagaaccctggcagaagaaagagaggattctgcatgcggggacatggaagaggaagacaagcccgaatgtggctctgggcaaaggtgagaatctgggggctcggggagtaaacaggaggtgccaagaggctgggcaggggcacacgaagggagggaccacacagggaagatccacctcaccattacctaacatcacctccaggacaagccctgcattacatattttctacacatcagcccaatcaatcctcatagccacaccaagaggtaagcagtgttatgtcatctcacagaggggcagctgtggccggaggaactgagtgacctgtcagagaacacaggtgacttggattcaaacacaggcctgttgacactcagccctttcccagcccggggctgcttccagggcagcctccatccagactctgtgtggggaccttcatgtcagtaattacaggctacagcacagcttccgacgctggttttaggaaagtgtgcttggctttcaccacagagagcaggagggagccaccacctcccgggctaatctcaccagtcaaggcctcgggccttgcttcacaatcaaaagaccttgagaataaaggggcaagggtgaagaaagtaaatagtacacacactcttcaccaattgctcttcccagcttgggatggtggtcagtgctggtcactagccatatcaaaaccaaagggccggaggtgggggaagaccccaacgtgaagggcagagcctagaggccccattggtcagagagggaaggttgctgggaggaactgtgcatagcaaaaaaaaaaaaaaaaaaaaaaaaaactctttccctccactctctccacagaactcttgcccctctcaaccccatcggtcacacataagcagctgtggtggcaggggcagcagcaggacaaggtagctctccattgtcctgcctgtctccagacaagagtgtttgttgagaatgggcagaaaggccaggccccagctcccagaggggctatcaggatgtggggacagcagaggggatgctcagagaagctggagctcaaagaaatcaacccaaggactgagcagcatggccagatcccatgttttgggatccctgctagggaagccaaggccacacaaggaagagattttgttccagccacagagtgaggaggggagctctggagcagggccctcaggcctggatacctccacacagtcctgcaaatcgtgtttctcgttgtctgatggtatcccaagcccactccctccaaatccactgggtagaaaagggataaagaaggtatgcaaaggatatggggggcttgagtagccccaaggatgtgtctctccctcactcccaagatttgtgatttgatctcttcctcccatattccatggatgtggtcatggaccggaagctgagttcctagtcccacccaccctttctcagtcactgacagagaacaaatgggagtccagaggaggggtggagagaacccaggtgcttgcagtatgcagacctgcatttaaattcaggctccatacctgctggcgctctgcccttaagtcaccttggctgtttcctcttctgtaaaacaggggacagtaaaagcaactgcttcaaaggactgcgaaaggacccaacaggccacgtgccacgagcacacagcaacgtgttcctcttcttcctttctgtgaagaaactccccttcccacccacccacccatgcagtcccttagctttcagcaaacacctctacagattcttccatcagtcacaacttggcttcagcatataatatcaagatccaataacaataacaaaaagaatccaacacaagcacatctttgatgagcccctctgtgggtcaagtcatacaaggggtgtgaggatgctaataatctggttggggagaccacagcatcagcgggcatatagcagacccttcagaaaactgaccaatggctcacatagccagttgacagtcactcttatcctcattctcctgttttcacaataggctgtcacacccagagaacgtggggcagagagactttaacggacttgcttgaggtcaccacagcaggctggtgccagagatcagggcagagtgggtttattaacagacttatccctggcttggagatcaaaatggcttgaattctcatcaaaaaggctgtgtgaccttgagcaggatacttaacctctctgaacatcagtttcttctgcaaaatgaggtgacacctttgtcccagaatagaagtgaggtcaagtgtggtgtgaggcacttggaggggcttagcgcctgcccaccctaaccccatctaaagtagccagaggatggtgacgcaattaaaaaggcatgaagtgccagacagcaaggttcagttctagaatatccttagaagagcagcaagaaaatagaaaaccacacaggagcttgttttcaaagacaaagaaaaatatgattaagcagtcctgagaatggtgttataaaagaatgaaaatattttccttactagggcatttgtaggttaacagctgatagggaggtgggagcggccaccacaaggccaccaggcacttccagcaccacagtgtgaggatccttgtggaggatccagagctaggaccaagcagccccaaaggccagctgtgtaagggagctgtgttgttttagggcctctgttttccagcctgtgaaatgggactgccccatgtccccacgtctgtccagccatggctcctttctattgataaactggactacagccactgtaattgccatctcaaggtcaggtggagggagatggtatagctgatataggctcagaaaggttaaggattgctcctgaagtcacacagctgagagaggtatggcgagactgcatcaaagccagagtggtcccactctgccacatggtgtccccatctggggggacttcgcattcattccgccccatgagcagtactgagatgagccagacatcctctggcccataagcaagctctcccagcaactccaatcccacctctcacttgggggccagcatacctagtcctgtcagctctacctctctccctgcacctgacataacatgtgggaatttccttttggtcctcacccttgctccctctgctcaggcaaccatgactggtttcctgctcctctcaaattcctttccttcctcgcaccttctctttcccactgctgctggcctgacccaactccccacatctggttcctgggtcacagcaagcaccctcctgaccttgcacactctttctgcccctccatgattcccccaccgaaatcagcttctgcagagcaccactaagctatggccccttccacccacataccacccctccccttggaatcctcctgcacatccccacacccgccaactatctgatacagttcatagcttttcacatgtgcttacagcctgtcagtgtaccaacattctccccagatgcacacagtagttgctcaatatgcacgttgatgatatctacttttgcacactggtctgatttacatcactgggatacccttttgcttgcaggttctacccagagctctgagggtctttcacccagcaggggccagtcccacagcgtgtgcccccacagctcactctgatccatcctgggtcctgccactcctgggtcttccaaccaggctctc

SEQ ID NO: 1880945 - DNA, 4001 bp, Homo sapiens
aaaaataaacatcctttcccctgtttcaagtagcccaacccacactgactggggtctgtgaagctataacagcctgggttgggacaaggtcaggccactggcctgcccatagtgtttgtgagcatattcttccccaggaggaaatatatggcacaagaccgccacatcccagaccatcaccagggagacaactaataacagagttgtcataagtataccaggcacttgtcctggtgttttacctacatcaggctgggtgcattgactcatgcctgtaatcccagcactttgggaggccgaggtgggaggatcaccagaggtcaggagttcaagaccaacctggccaacatggtgaaatcccatctctactaaaaatacaaaaactagccaggtgtggtggtgggcacctgtaatcccagctactagggaggctgaggcaggagaatcatttgaatccgggaggtggaggttgcagtgagccgagatcacaccactgtactccagcctgggtgacagagcgagagtctgtctccaaaaaataaaaataaaaaaaataaaatgaataaaaaataaaatatctacatcagccactctacccttacaatcccccatattcgaggagctactaagattctaactttgcagaataggaaatggaggctcagtgagcctaagtcagttgccaagggtcctatcggggctgaggtgcagactcttttggagcctaaatgtgcacatgtagtcaccactcacgaagctgtatcaaacatcctgcagcacaggaggaaacacagcaaggaccatcatctgcaggaagagaggctctcttcatcctaggtcatcccagaggggccaggcagtttagcgtgaaaacgggaggtatgaagtcaggagaaaatatcaggaagtgggggctctgcatttcctctttctcttacttgctccatcccagaggtcgggaggagcagctcggagtgcacaggggaaggcccagggagggtcctggcccctcctcacaagaactgacacagccaccggtctgtccagcaggctggctatcagcattcactgggatccctggattattctaggttcagttagaactgctaacaccctatgtgatatatttcgcaacattaggagaattgaatgggtttgtaaaatgggttcaagttactcacgcctttctacacagtcatgatttatgacgtcagagatgaactggaatataggctcctaggaaatattctcccacaggaaagtacaggcttgtgtgagaagccaccacggcagacaatcctgagtagcgggcagaaaccggctgtaaatgtgagggagcggggaagtaatttggaaagctctcagggtaatgcagaggcaacctgcggccccgcatcgagacagctccaggcctgagaaccatcaagtcctcttttccatccccaaggtcactctcccagggctgactgaggtggcctcccagctggcttcacacagccctgtcacaccttccatctgtgcccggggcgcttcctgagactcccagttcctcagtgtgaatcccagatggttcccatcgccatctggataaaggctccactccccagctggccttaaagaccctcacaatccggcccgaccacccagcaccctccctctccttccctctacgaccttgcgtctctgaatacacttgttcctctgccttcccaactcctatgcatacttttgaggccattctcgggtagcccctctcctctccgaggcctgtccttatgacgcctgcccgctgtggcactccggttacccggaggagagttgctactctcgagttcaccgaggcggaaagcccctctgactccaaagcagggctcagcgcgacgtcccagaggccgcttctagtggcaggtgcccctcctcacagggccctcgcagccccgccggcccccgcccggctccttctcagcatgatacaaccgcgtcggccctggacagcgcatgcgcgggcgccggcggctgtttcccagcgaccccgaggctggcgggagcgcgcacaggggaaggggggcgtgtgcagggaagggggcgcgagacgcgcatgcgcagcggcaggcggcggcgcgagccgagctgggagatggcggcggcagcggcggcgccgagagtgtgagcaccgcccgggagccgccggcccgggcgcagcgcgaccccgaccccgcccgcccgcctgcccgccatgggcaacgaggtcagcctggagggcggcgctggcgacgggccgctgccgcccggcggcgccggccccggcccgggccccggccccggccccggcgcaggaaagccgccttcagcaccggccggtggcggacagctccccgcggcgggagcagcgcggtcgaccgcggtaccaccggtccctggccccggccccggccccggtcccggccctggcccgggcaggtaagcgcgtgtctcggcgcccggggggcggtgagctgcagcctgaggccgggacccgggcccaggatcccgcgatctagtgtggacagcgaggttcgacgtccggccgcactctgaaccctgccggattggcgtgaactgggtggtcgcgggaagcggcccttcctttccagctgccccgccttggcgtggcaggatgacgagcgcagggtcagtcggggcctgcagaccgtgactccgtcacgaaccccaaattcgcttctccccaacgctcgggcctgactgctcaggaggggcttatgtaaccttaacctggtccctccgcacaggagagcaatgggatggaaaacgtcctccctgtctgctggtgtctgcatgtgtccattgtgctgggccgagaaaacagcacaatgggagtggctgtcagggaagataagtgtcactgcgaggaacagagagatgaaaatagttgaaccatgaacttggtcttgggctttccttgggcatttagtggctgtaatcacctttgggggaaaggaaaattgcccactggacaccaagaggtgcttatttaggcccaacaatactaataggatcatgtgctttcaccaaggtttagggaaacattttggggtgaagcaaaaatgctattgagtcatccagcaccagatatgttctcgttaccttatgatttagatcaaaccagtggaaaagctgaaacccacacagaatgctttaaacagaacatatctgattaaatactgtgaaaccagtttgttttaaatgtatgccaacccaggtcctgcaaaaacagtcaagtggcaatgaaggctgtaagggaatgccaatatataataagtcagtagactgaaaactcaggaaaactactaagagatgacacgataaaatggaaggcattatctttgcaccaaataggcttggggagtagcaaaacccccagggggtgggagggaggtgcttccagctccatgtgggtctgctgatatatgttgccctggcttttctgtgtggaagcacataaactgaggacgcataattttttattctttggctgcccgactgtgcctcttgtgtgtttatttcctcagaagtcatttcttagacaactaacagtaatgaaaggctgttagtagcttgaaacctgcggcagacaggtcagcctgtgagcatcctttttagaggtgggatttgtccattttatactagctataatagtaatgcagttggatagcacacagctcttagcactgcaaacactgtccattttgctgcatgttgagttgctgtttgggttttagcttgagggaggctcacccaggctttagtgttctccttccaagggaaagcttctgtagctgaatggaaaaacaccttgttattgagagttccctgtatggggaatttgtcatttctcttctgataaccaaacaggctgctctgcttgtagtttatcagatgttgcagagccaatcatatgaaattctggaaagacctgggcagctcagagggaccggaaggag

SEQ ID NO: 1880946 - DNA, 4001 bp, Homo sapiens; identical to SEQ ID NO: 315375

SEQ ID NO: 1880947 - DNA, 4001 bp, Homo sapiens; identical to SEQ ID NO: 315383

SEQ ID NO: 1880948 - DNA, 4001 bp, Homo sapiens
aacaatgttcttcatatattacctaaaatatctcatgtaccatcagtagcatatgtactactctccaggaaaacactgttctaaacagaacccaaatcattcagcctttttctgtaattatatatgggaagtggttcagtgacagcctagacactggagttgaatggtattggtttaactcaggacaattcctaactctgtgaccttgggcatgtcatgtaacctctataagctttggtcttctcatttgaaaatgggcataatcttttcagaattatgaaaataaaaggaaataattcatgtgtttggaaccttaaaaagcattccataaatgatactttttattaccatgtggatcagaacagtggggaaaagccattaacttatggggaaaatccattaacttaaaaggcaagcagggagcccacactagagggcaaaataagggagaagctagcagcctcccttctgggaccaagggcagggttctgcaaaatgtacatatatgacttctagggggtgctattcaatttcatccttagacttgtgtatagttattataatgattttctggcagatggcagtaaaatgtcctgaggagggagcaccatttcctaattcacccagagataacttatgggtaggattaatctcccgtagacccctctgagactcctttaataataatttaatttttaagtgattctactactataaacatgtacacacatacacatactgtgacacagaacaatgcaaatacagtttcaggagattcaggaattttgaagaccacccatgttaaaagcccagttctaagtggtctcagaatctctagaaggtgtttcccattcccatcctccccactctcatccccaatctatctagaacataattaacaaaggtgatttagctccagagcctaggaacacactgctgcaatttctgatatgagcagaaccctccccttcttaagtttttaaatatttttgtgttggtactgaatttatttggttgtattgcttcccccggagtgcctacttttcattgaaagtggaaatctctgcagtattttattttgtccatggaagttcacaagcttggtctttgatgcttccaggactcattaaaacacctcacttctacatgtctgaactatagcccatggacctggtaagagagaagcccaaagaaattggaaaataaatcaccacactgactttccaaattaaaatatattatattttggatgtttcatacctgtctatatggttttgtcattggcaaaaaaatagcaagtctaaggcagttttaacgttacattaaacaatgtgtccatagtgaaatgtgattagtacatatttcagcagcccaaattgctgggataggagaaagaaagcactgatcgtggacctatttcgaagaatgcactaatgacttttcaaaataatagtattttcacgggatgtgagatgtccaaaattctgatgctgaaatatcaacataggatcagaacttattttagtctcctatgccacattgaaacttaatttcgagtggaaaggaaaggttttccctgttacaattaagatgtttctgatcataaaatgaagcttacattgtcacactagatttcttgatccaacgcagtaccctccccgccaatccatccagagtcctcattcctaaatgcaatgcttaaaaggacatgccactatgccaaacccaaagactctcatttgacagaaaaggaaatgaatctctgttacctttctatccccttccttttgaatgagccatttttcttcttgagttgctggaatcttcggcactgtccaacttttctgtaggcaatcttaaagggttctggtagatacagctgaggttgggccattgctctcaacttcacctgtagtagccgttttggattgttttagttcttgaacttacagacttcaatacaaaatcatccagtgactgaatgtactgtcaaggtgtgggctattcggaataaaatatgtaggaaatttttagagtctttcccttattcccttccaggtgttagagacattatttgtgggactggccctgtttacaacttcacagaggtcaccagtgatgtatttgacagagctgtgtgaaattccatggacctttgtggaacacttcacagattcttgaacaaggcaaatacagaaatgatgatctgattgcctcaatgctggcatttggatagaaaaaaaaaatcaaacaacaacaacaacaacaaaaaacacccacacactaattgaccaccacattcagaagtgcgtatttgaactctgaagtggtagggacctataggaataccaacgatacgctgattaacacaagttgagcttctgttagatctctcagttacagctggtgaatgttctctgtgtcctgtgggacacatatgacaaggccagttgttgtttggacatctcaaaatgtaccccaagggtggttttcattacatcttggaattttgcagtggtctctcaaagtacattgctaaattgaggacctgatccacccctcccttccaacattgccccatttatttcgtggtgaagagcgaattctgcctgtgatggaacttctcaccacaaggtggcagcagacactaggatttattcctgttaccctctcgcggtttgagttgttcagtcaaataactagatgcttaacaagaaaaactcctctagaaaggttctgggagttacaagaattactctgctttctgtgtttgcattaatcaataatctggagcatacttctcaagctttcaagtgcacacaaacttcctggaggtctttttaagatgcagatttcgatacagtacatctgggctgggatccaagaatttgcactcctaacaaacccgcaggtgacgctgatgatgccagactgcacttggagtagtgagggtcttgtatgtttcagtactggggaaaagagctttaaaatggtctagaatgaagtgtataatgttaaggggctaagagagtggatttgggaattatgcatgagttctcatttctagcttagctatgtgaccttggccaattcattttaacccacccatgcttgttttctcatccctaaagtgggacaactcatagtgcccaagccatagttttatggcaaaattcaagtgaaatagaaattccgcttcagcagggaatgagacccaggaatccatattctaggagagtgggtgcagatgttcctctgtcccttatttgagaaacgctgaagtagagcatatctaatatgccttggccaaatggacatatgctcctccctggtctgtttttcctcatctgttggcatcctcagagcacaataaataataggtgcttgaataaatgaatacatgaatattttctttagcaacagggcaatatttttcatgcaattattggcactcctgccttaattctgttgtatttcatcaattatctagatgaatgagatgaattttatgctaggaaagacagctgttttttatttgtgcatgggtgtctatgtacatgtctctgtgtgtgcatgtctgcatgtatgtgtgtatgtaataggctgaaacacttgctgctgtggcatctgtgacaaaacttgtaggttcccaaaggagtcctgaagcagatgacagaactagaaggagtgggaagggggtggggaaagagttagagtatagagagacatcaattttgagctgtgtctggatttacattctagatctaccccttccaagcttatgggtccttgggcgggtaacgaaaacctctttggaccttcattttctcgttcgtaaaacaggagtaataactgctacctcccaagcttctttgagtcattcagttatttaacaaatatttgaatgcctagtggttcccaggcaccaccctagacaccaccctagacaccagggatactgcagtgaacaacatacacaaaatctctgaactcatataact

SEQ ID NO: 1880949 - DNA, 4001 bp, Homo sapiens
tcggagtgtagggggctaggggagggatagatagcattaggagaaatacctaatgtagatgacgggttgatgggtgcagcaaaccaccatgacacatgtgtacctatgtaacaaacctacacattctgcccatgtatcccaaaacttaaagtataatttttaaaaattcattttttactctaaaataattttcgtcaagattccaaaataaacatcagctttgctttgcttaaataaatcctgagtgatgcatgtaatattttcaattcaagatttgataaatggatattaaatatacacccaaaggaaaatctccttctgagcagggcctgattgcaaataggaagaaaaagatgtagtccggtcccattcagtttagcatttttacctgacgacttcacacacattgcagtctgaagccagaaagcctacgcagagtaaaatgaagagtctttagcaaaatcctttgtgtttaacacaaactttgattcctcagcatctgtacagttcagagtaatatgtactgtttaaaaggtgtttagatataacaaattagtcatttaaaagtgtaattaaatgtaaccacattcctcatagcaaattggcttttgtaggcatctcttgctaaataaatcaagcctactgagaaatccattggcctttgacagacaaatttttcaaagtttctaacttagaaccaaattcaattaaaacaatactttacaacttctgtggaaaccaggctacaatcaatcaattttggagagtttctgttaggagtagccctcgtgagatttattcaaaaactgggctctcggcagcctttggaagggcactaggagttagttataatgaattttaagtgaattttatcttggtgagggattttgattgacaatagcataaagccatgttgtgtgtgtgtgtgtgtgttttctttttttaaggaacaggaacagctatcaatggacactgcttcatgggatgcccaaacaaatataaactctagatcagtcaacctgggctcaaattccagctctgccatttatggacatgatcatctttgaaatggaaataataaaagaaccttcctaatattggcattatgcaaatcgaatgagtacatgaaatgcatgtgcctggtgcttagcagagtaagctcacactgactgtcaactgctgtttccccaaggttattctcctcaaagggccacttgagtgatcagaacagaatttctaggacattttccctttttatgacgactgagacctgaaagagtaagcagagattctgtagtgtttgttttgatgtgagtttaaccatcagcatacagactgactccctcagatccttccaaataaactccttcattatctcattatttcaatatttcatttcactgtctctcctcaaatgtagattcaagaaaagtaggtttattgtgcagctaccctgtgagcagatgccccaaagctgtcattccttcaggttaataattaacataacctgaacgggggcatggtggcacaggtctgtattcccagctaattgggaggctaaggcaggaggattttagcccaggaattcaaggccagtgtgggtaacacaatgagaccccatctcttaaaaaaaaaaaaaagaattcccatacctaatatcaagcacataagtctctttagcttacaaaaaagaaaagaaaagctcattgcatgcatccatcaacatggcatgttgcagagcataatattcggagaataacgaggcaaaatacacttaataaaactgcaggcatatggtgaggttctcagacaagttatttatggtcttgattaaccttgcaacattatcgccattttcataggttttacataacaacataaaaatattatctttaccttttaacatggcaggattatcttatctccggttcttttatttagccttcatttcgctccctcaccccaaaatctctagcagcttgatcatggaaaagcaaagctgcttgtgctccgtggtagttaattatatatgaatactgttttcctggcactagcacatagcaacagcgccaccaaaaggccgaggtcctgagtttctgggatctgttccatttctttgctccacagcatatcagcgtttttgcatgatattcctggttgctgtgtattcaaaatataatatattggcatttcagactccttataattaataggttttaatttgttctgatctacagattcattaacttctcagctctctttgggtagaatgagttttcttttaatcctcctgaactaaaaaggtatgcagttgattgtgctaagctgcagataaatcatatgagcagatgttcttatacaactatagaaatgatatacgaaaactgatattagagtcagtgtaatagtgacaatagagacagtatctgtactgtcaggaggaaatattgaaatgtgcaagttgttctgtgtttagtgactatgaaagtcaccccaggaaataaacttttcttattctcagagtactgtctattacattttatgattgtcccaaatttagtaacgtggcaaaactgattttttaaattgtaaatacatagtgacatgtcatgagaatgaaaacaatgaaattaatttatggtaaggagatagtcatatatatttcaaataaatgtatttcttcagggtcacttttttttcctgccacaaacagaactgattttgtcattttgttattcaaaaacttaaatagtcaccactctagatgcactctcgagctggaataaacactacagactagtggttgagagggtaagctgtggactcagactgcctgggttcacattctagctccactctttcctggcaggcacgatcctgggttaatacccagtgtcaatttcctcttctgttgaatgtagttgttcatcctatttatttcatagaattgctctgaggatcaaataagatcatatctaccaagaattagcataagtactcaataaatgtcaatcgccgctattatgatgatggtcgtagttcattgtagatactggttgtcatccctttgcatctacttacgatattctctaggtatgactgaatgccaaaatcaaaacaaattctatattatttcattggtgctttcacaggatgctacctacctagaaataggtttactgctacatatgtttataagcatattgtaggggaggaaaaatatctttttctcacccaccctggattcatcgccaaggcctctgttgcaacaaaagacagattagcaaaagaaaaacatacaaatttatttcatgtaagttttccatgatacaggagtctttataaggaaatgaagaactgaacaaacagtgaaacttgaatatttttactccaggtttgatgaagagaggaaagtggtggagaaatatgattgggcaaaggagatatgagctaatggaaataaacgaagaaaatcagcaaggcttttgttcagattcttctctgtgtccctgtgtcttcagagataaggatgttcctttcttcaggggatagggacggcatctctcaaatgagtatcttatgacctgctccagggggtgttcagaaaatcctagctatgttttatgaccagctgcaggggagaacaggagaaggtgagagtgaccttcctgctactgtaaatgccatgtcctgaactccatcaatatccatttgtaggtgaggatgtctagcctcagacagctagttgttcacctttctatgtgttcgtgtcagcagtttttatttgaaaagtttccattggttacttttttgttttctaacacttaaaaatcactatgagcaaagatggaaagggatcagtctgtatagtcttttttttttttattatactttaagttttagggtacatgtgcacattgtgcaggttagttacatatgtatacatgtgccatgctggtgcactacacccactaacacgtcatctagcattaggtatatct

SEQ ID NO: 1880950 - DNA, 4001 bp, Homo sapiens
gaagattatgctctagctctatccctgtttagaataattttgcccagaaaaactgggctcgaaattacaattttatagatcagtaaagatttaaccaatgaatcagagctaaagttgccaacttgtaaaataatttcaaagccctcatacagctcttcatggttatatttagacaggcagtgtaaatatgaccactgacacaagtaaacactgcaatttgaaaccacagattaccaaaaaatgtggtccctcgatggtggtcaatggtttcgatgtgaagaggctggatgttccccagtgcactggtggtcataactcaactcgccaattccttcagctgggaggactcgcagcactgcactcatggcctggcagcgtaggcagagcatccacacctcagaggactctggggcctgggaccaagccccagaacaatttgcagaattggtgactgtagaccgatatgattactctcttaacgtgtacactgtaattatcttcatttttgttgtggtgttttttcttttcacaggaccagtcaataaaagcaatgtggtgacagcaagtacatccatccagctcctggatgaacggaaatctcctgtggtggcaggtaaataattgattgaatccatgaagacaaagtaagcatggcgcccattcatccggccagtgggctacttctgtgaggcacgcttatcctccaaaaaggttttcaaaggagaaaacaattttaaattacttccttctcagcttggtgtcatctccttcaaaccaagactctgacagctggtggtggttgatgtgaaaacagaaaactttcccagcgtttctatccttaaactctgagccagtaagaaattgtcagtacttgccgaggagaatttcttgatggtaggtagcatgttcattcaaagtaaactccagatctccagcttctgtgtcattaggatgacagtgggcatacaaggaaattgcaggtttgttttaggcaaacacaaactgaaatgtgcccttctccagagagactgagattttcatccccctaatccccctggggaattagagttagctgtatctgcaggtgctgtgtttgggaccaggggaaagccaaaatattatatgactgagagtcttgaattgtcaaagaagtcccgtttctggctttttccatttctctcactttttaggagtgtcagcagctgtctgtggatggctaggggctttcattggtggcatttggcctaaagggctggcaactaccaaaaagccctctttgaagacagatgctgacataaaaacaaggcccgagggtgtgtctggcacatggtttattctgatcactttggagccattggttgatgggtgggtgatatgctccaagcaccatcctggtattggctgggtttactaaagagagcgatttttgttttccagcagtctccctcaataagttgtactttagggtgacttaacatccacttctgtgtcttcacacactgaatatttgtgggaaggagtataaatggagcagatggaggagacctgtttgaagtggttgttctttggcgaggaaatactgcttttttccccccactttatttcttacttggcctgtgtataattgtattagtagggttgaaagatctgggggtagttgccctggttattcctgagttactgggtgtgacaaggatgacagccttatgtatctgacctgtggctcatcttgaactaagcagacctattcttaatcagccaggagatatgggctctgaggattcacagttgctgtcttcaaattttgtcacttaatgtctcatgttccttgaggaaagtgggagacgggatcatttaactcaacaagatttacttatgcttaaaggaggtcaggcttgcttacctccaggctggtccagcgagctaattctgaaggcatgttgtctcccgggagctgaggccacatgcagcagctgtcagtgacatggtctggccagaatatctggttgtctgtttgaaatttctttttaaaaccctttctttgggtttctagtttagtcatcatgaaggatgagccctaaggtcactgtgcctgtcccagccacctctgtccaagtttacaaactatgctcacatgtttccaaatgccttacatttcataaatgcctgtttggctgagtataggtgaaacgtggtctgagcctgaacactgtgtatccagtctagagaagaacgtgcactttccaaatgctatgccagtctattgtcgagttgcatcgctggccatagaccacaggcaggtcacgagacacagtttggtccaccctgagtgggtggagaaggcaccctcctatttactgcttctctgtgtatgccaaatggcccccattttcagaagataattacagagcaaggccaagaagcaaggtcatttaaagaaccgtatttagtccttaccttttagaattggtgactgttaccctttttcaaactttggtagacgtaagataaaacagaattgcttggttttgatgttgaagactgctgtggatgcagccccacgaaggcagtgacctcaagaagacctctctgtctccaaaaatagagcggcctcttcagcaccccctccccaagttttcctgactctgactcaaccatcatatcactgtgtgattaggtttggtaactttcctctgtgtattttcctcaaattaagtagacactgtttaccactctaaaattaaaaaggccattttaattggggaagaagccttgttttggcagatgaagatgaatatgtgagcaggcttttctcccatcagtgtgccccaacagcagatgggagacagccgactggcaggaatgttaggtctcaatgaaatccttgtgttaaagtggaactcttctgaaagaagaggtgtacaactatgcaaataattatcaaggactccttggaaaggccagcttcgctcccaggcctgacctggtcatctcatgttcattggctatatatgtctggggtagaaagaggtttttttgtttcattttcttgttttttgttttattctcttctttctcttttgtgtgttttcttttttaaacaaaaacatttagatactcatctgtcaatgacacctttgaagaaaggccagtcagactgggcaagattccatttgtacgccagccttggtgcataaatgggccccatccatcttcccggcctatgacattgcttacagtccttctcttgagaagcctgccaactctccagctgccaccagtgtgctgcattttcttaattgctttcccactgcacaggaagaagtggtgggactctccctttggcctaccaagtctcatcctagccctggaaccttctgttgtgtcaggtccctcatccattgcattgttgtcactggaaatgcagatcttggactgtaaggtccacgcagtttgtcattcactctataacttgctaaatgtgtggtcttgggtctctaaagttctatctaaaataggcttgggattattacctcccttgccttcctgtgtgtcaattcagggataaaatgagaaaacaaacaagaaaattcttggataagagagaagaataaaaatgctagagtttagcataacccgtttttatctaaaagttggtggcatattcattcattcaataaataaatatttcctgagcctctgcttttgccaggcactctagctataaataaataataaccagtgtcttaatccattttgttttgttataacagaataccacagaatgagtaatttttttttatttaactttattttaagttcaggggtacacgtgcacgtttgttacataggtaaactgtgttatgggggcttgttgtacagattattttattgcacaggtattaagcctggtacccattagttatttttcctgatcctctccctcctcccaccctccaccctccattaggtcctagtgtgtgttgttcccctctctgtgt

SEQ ID NO: 1880951 - DNA, 4001 bp, Homo sapiens
caaggagattagttttgtaattgtatcatgacagtataattgttgaccttttatatcatcacatgcttttatagaaattcagcataatttttaaaacaactttatcattctgatatgactcatttattatatatttttcaagtacattatcaatcactttacttggagcattctgcgataccaatgagttaatcatggcatatgtgcaattactggcatctgttactctttaatttttgtgtaaagctgcccactgtattatttaatgaacaaatgcacttatccttaatcattactttgcactcaacttccattaaaacaatgacaaatcagacattcacatttcaatcattaaaataacagtaatgaattattttcctggtagtagggtttttatagttgtttttcttaaaatgaatttttatcactttttttatggttagcatagatgcaaatgacagagattgttttaataggcagaagttaagagaaagtgtgaaatacttcctctttctctcacttgcaagatgaaaagattccccctaccgttagcaaatgatagtggggaaatgaaggataagggttggagaagaataaacatttttctttgaatttaaccatggggaatttctggaagatttacaaccatattggttcattgattactcagatggcagacagatattctcagtgtgtgctcccttttcctaatgaaaaagactattagcccacctcaaaatgtatattaaaagttttatttttgttaaacggagagctctgtttaacctatttgcagaatcgggcctctacttgaaaacagcaatcacttttgaagaaatatcactgcaattacaaatcaagtggaagttagaatagatataatgctgttacattctgattacaagataaatgtagttaggaactgttgagttctttgtgatccagaaattatgtagaaaattctaattttactaagttacccaaattgaccccaaaatggatggtcacatatgcaggctagaaactgaatcaaggatgctgaaaagcaccattaatactgcctttttcaatgaccttaaagagagggtattaagaaaatcacactaggtttcattaagatgaataaaattgaacatttaagtaaaggaataatcatttttgaaaaacataatatgaaaatatatgaccataaaatcttgatagctctctagcagtgcttgtagaaattgcagtctcttttcaaatgttatagtaggtggcaactcagtagaaaattataatagctgtcaaaattcgtatacattttataaaatatgcattttgttactttttcaggtgcttgtagtaatgtatatacactgtgttgcatagcgcggtgtgtagatccatagagacagtatgttttctttagtatcaaataacttgacaaggaaattataaaattctttagaaattcaagtgattctcagtaaattaagcaatgggggattattctatttatggaaagcttaatcattttctatctcttttattattttagaaattccatttcttttattgtgtaggaatcagaccagaggctactagagagacaactgattagaaaagttcatgagaaaggtttcaaaaggaaaatcttcctgaggcttattttcatataagtctttagaaagaacagttaatgctgctgtgctgtatttttcccaaatgtattgtttttaactcataaaaatttttctctcatatatcgtactcaaagtgaatgattcaggtcaacaagatatttctgttccacgatgtcattcatggatccaggttctttctatcttgttgccctcccattgcccgggctctgttttcatttgcttgtctgaagttggttatggacaattccatgttttagtttatgaaaagaataagaggcagaatagagaagtacacattggttacctcaatgcccagttccagaagtggtgcatattacttctaggccacagtagctgcaagtgaagttgggaaacacagcttaggtgggcaggtaccacttaccatttattacaatgcaagaagaggaaaattgaggttagtaaacaattattagaccctgacgtgctatccaagcttcttgtaggtttggcagagattttaaagggcaatttagaaactgtttgaactttcatatttgccataatcccaaacacgggtaaagcagttgtaatatataatatcagtcgcttctttgtacttatatatggctcataggaaaggtaagcatctgtgttctaaacaaaaatagatttttaaaataggaattttaaaacaggaataatctttgaactgtagattaagaaagaacaccatatgggagaaaagagaaaaaagacttctaggcagttcatagattatacagttataattttcaatgacacatatattacgtatgaccaggtaaggcctcccaaatctaccacagttagcacatcagagttcaaaagtctactcagctagaaactttatacctatgtctatatatcgttaaatgtggctatgcctctcctgttttcatttacttatatcttgtataattcctcactctctcattctttgtttctccctgacttctatcatcattgatgttgttctttcagctatctaacttttttctcttaatattccattttaatcccctaattttcatcctacaaaccatattgttttctccttcagtgcattgcaagttctgtgagggagataataatgaccatgtaaccagcttttgcaatactgtacctgacaaatgatagattcccagtaaatcctactaaatgagaaatgagagaaaaatagaaaatctgaaatatgaagttcctttcctacattatctcttgaagtgtaaatctcactttgtaagttcttattttatctgggctaagttgggcccagaaattattttatttgaccataagtatactttagtgtctagcatcaccctatataaaaataataaaactatatctctacttcttgtaacactgatttataaatggtaagtaattcaagattatgtgtgtgaataatttaaagacatacttttagaagcagaacaaagcagaaagatgagtaattatatcctaatttcaggtttctttaatagtagccattcaagataatgtctgtgaaggactggctttctctgccaaacataaggatccaccaactgatctgctttttttttgcttttattatttttaattgacacataataattttacctatttatgtactagagtgagatattttgatacctatatatgatgtgtaatgatcaaatgagggtaattagcatacctatcacctcaaacatttatcatttctttgtgttgttttccaaatgtagttaactatggaaaaaaatcactatacatttattctgggcactttaaaataaagattgtatatatttaagttgtacaacatgatttgatataagtatgcattgtgtaatgattaccacaatcaaattaattaacacatccatttccacccatgctgtaccttggatccccagaccttgttcatcttctagctgaaagtttctattctttgactgacatttccccatttctttgcccctttcccagtcccgggtaaccactattctctctgctcctctgagttcaaacgtgaaatttcacatataagtgagattacatggcatttgcctttctgcgcttgacttacttcacttagcgtaatgttctccaggttcactcatgttgtcccaaatggcaaaatttcccttttttaaaaggctgaacagtatgtgtatatataccacattttcttttctttatccatttatccattggtggactcttaggttaattttacctcttgactattgtgaataattctgcaatgaacatggaagtgcagatatctcttccacatactacttcagtgtcctttggatatacccaaaagtaagattgctgacccat

SEQ ID NO: 1880952 - DNA, 4001 bp, Homo sapiens
gctcaggtgaactagccattgtttgaaaggctgaggtttgagcttctctgggacaggcaatttaggggctgtctgatatgttccacaggcagccaacaaaagcagaagccactctagccagctttcacaccctattacttcccttttcactttcacacaggacccccagactgccatgcagtaaggaaaataggggtcagactgtccagcctgttttttcagttggaaagtgggaagtgccccccatctctgacaggtctagctatttaacattcttttacttcacacactgaaggacacagttttcacccatctaaaactacggccctcattggtctgtctctgtagccctttcacacagattatcccattagatctcacaataacccaatgagaatgaatgtgtacggactgtcattccccactggagacatgaagaaacccagctcagagagatgaagcaatgtgtcccaagtccaggtaaaaaagcaaactagggtttgcacacaggtagtgaacttcagaattcttcttcctctccattacgttggaaagatgaacaaagtagaaatggaacttttcatttgctgttaaacgacagcaaagaaaaatgcttccgaatatggcaattaataggctagtaggcccatccccaaagaaagaactaaggccctcttcttttttcccaattttttttttttttgagaccagtctcactctgtaacctaggctggagtgcagtggcgcgatctcggctcactgcaacctttgcctcccagttcaagaaatcctcctgcctcagcctcccgagtaactgggattacaggtgcctgccaccacacctggctaatttttgtattttcagtagaaatggggtttcaccatgttgatcaggctgatctcgaactcctgacccatctgcccgcctgggcctcccaaagtgcgggattacaggcaccagccattgtgcccggccctcgttcccaatttctaaggcccacccttagttagaaataaatcttttcttttttttttttttttttttttgagacggagtctcgctctgtcgcccaggctggagtgcagtggcaggatctcggctcactgcaagctccgcctcctgggttgacgccattctcctgcctcagcttcccaagtagctgggaccacaggcacccgccaccacgcccggctaatttttttgtatttttagtagagacagagtttcaccgtgttagccaggatggtctcgatctcctaacctcgtgatccgcccacctcggcctcccaaagtactgggcgcgtgagccaccgcgcccggctaaatcttttattttcgattttttttttttttttttttttgagacggagtctcgctctgttgcccaggctggagtacagtggcgagatctcggctcactacaacctctgcctcccaggctcaagcggttctcctgccatagcctcccgagaagctgggattacaggcgcgcaccaccacgcccggctaatttttgtatttttagtagaggcggggtttcaccatgttacccagcctggtctcgaactactaacctcaagtgatccgcctgcctcggcctcccaaagcactgggattacaggcgtgagccaccgtgcccggcctctttttgatttttgcacgaaacgactccggctgtatacccactgctgtcacttgctgccctgtccaaggagtgctgccggactggggagtctgtctgactcagaatcgaaggcgggggttaaagaccagctaggccatagaggaacggaacaaatcacgcctaacccaacaagcatctgaacctacaggcagccctagatacctacacgagcaacacccgggaagcaggagtcagatggactgcgggtcgctgaccactgccttgcccacccccgcgcatgcgcgacgaccgcaccagcgccagaggagtcccacgccaagcagccccagacatcgtgggagggcgccgtcttctcgcgcatgcgttagcgcccgcgcatgcgcgccctcggcagctgtctttccttattagccctttgctctcctcaagcgcgacccggaccccgaacgctggacgcctcaactgcgaccctcactccacacttctcaccttgcgcccggttttctcccgtagggccttcagccgttcctttcgccgcaacgcctcttcctctagccggcccacaccagccgtagttgcctccatcttgcccgcgtacgcccctccttttctcccgtcttgcatcgcgcaggcctaaggagagtggataaatgtctcgcggccaatccaaggacgagaatgagagactgggaggtcctgaaagccaatcaatgcggggttattatgggcgagccctccccgccttgccccgccccgccccgccccgcccttattcttccggacaacttgcctagtgggtggggagccagcaaaaaaaaaaaagaaaaaaaaaaaagctaaggctcgatttatccaacgctgatcagtgaaagagcagcaagtggaattcagacctgagagaaggagaaaagagtgcgtcgatcgctccggttttgcccaagtactaaccacactaatcactccatgctggcctcttggaatgccctgactcatccttgtccacttgacctgacaaggctcgaatgccttcaagaaaccttccctgggccgggcgcggtggctcacgcctgtaatcccagcactttgggaggccgaggagggcggaccacgaggtcaggagatggagaccatcctggccaacatggtgaaactccatctctactaaaaatacaaaaattaactgggcgtggtggcgcgtgcctgtaatcccagctactcgggaggctgaggcaggagaatcgcttgaaccagagaggcggaggttgcagtgagccgagatcgtgccactgcactccagcctggcagcagagcaagactccgtctcaaaaaaaaaaaaaaaaaaaaaaaagccttccctgatcctccacttcgatcccaccctaatacaaggtatgacttacacctctgcagctgtcagtggctccccggactcacctgacaagcgcccctaagcccctctgtgaccactctcagctcagacaaagcctgcacagtgagggggacctgactgtatggctgtttccctctggactcaaagatgatcccctctcattcccatcccctcctggagcagcaaagtcctcagggtcaagttacctttcccggggaagagcaaaccccaacctgggtccagtgggcctcaagtactgcccccaatccccagcttagaaagacttggggtggcctcgactgcaagtcgccacaagattcatggctacccagcagaagctgccagagtcttctttcctgcatgaactagagtgtcctgataaccgcgagaccacttaggctgaagtcaagatattctttcagtatgtgggggtccccaaagccacaccccctctcacttgggaataggagaccatgccgccccctctccacctccactgccaggggacaactagcctcttaggctgttccctccctgagtcttcccttcccaagctggctacaggtggacatccactcttccccttccaactcccttcagaggcccatgggccacagactgcagatctagccctcccttcactaaccctcttgtcctcactaacctgggtctgtctaagccttcttccctgtagtggatgggttgctctgccaaggcctggcatgcagtttggaggtgctcaggaaacctcagctcagagctatgatggatgaagcaggacaaaaggccagaggtgaaccaagaagctgggagaacaaaacaggacagggtctctgttgtcttggccaaccaaggtctaggagtctccagactggtcaactcctggaacgagtagcacccctctgggcccagaaaacttctccccagccccaacaaagagcctgatccctgcccaacaccagggg

SEQ ID NO: 1880953 - DNA, 4001 bp, Homo sapiens
gtagcctctattcccacaggccagggtagcctggggccccaggactggctgtgacatagtgctgtgaggctgaaggggagcctgggggcacaaggaagtctgggaacagagcacatacggcagtgaatggggactcaccctgctccccatcctggctcactggggagggaagtctgaaggggaagattccagcatcttcacctcaccactgtcctttctccaggcacacaggagaagactgttcctacctccgaggtcaccagctgaatgggggccaagcattacccaccagacttaagtcggcacacgtttcgagttttctcaaaatgggtggggctgggggacaagccaggttgttaggggcttacaccggttgtccactctggtggcctgacctcctgctgggggtcctctaatgttcctgtccagtccagccccagcaggtatccagaagaggaaggggttgagggaggggtgggggcctggcaggcttagcctccacccaaggctgcctgccctcactgagtccctgccagcctctctggctgcaggtgtctggaaggtccaggtgttccagctgaggaaggcagctggcctcaagtcacacctggtgttcaaccacatgtgggtggggccgcctggagaagcggacccactcagagacgtcagtctctgacctgccccgcatgcagggccgtgcacctccctctggaacctgaatgtagaacagcttcctggcccagtcaccgtcctcacaccatgtagctttctttctgaagagaggcattattagatgtcattatcatgcaagtagtgccttcaccaaacaggcctcgcttttcactcctgaaaagaagcctctttcatatcctctgaaagccccgaaatcaagccaagatcccctcctgccttctctaggcctctgagccaaagccctgaggatggaacccacatctgttcctacagtatcttcggaataaaggagtgggtgaggggtccagtggccgcgaggtcagccctgcctatacccagttcctggaggacccaggcctgaccaagtccccggcctcagcaggcgatcatgttggcaggcttggatcttctcggtaagaaaacaatgggagggaggggttggaaagtgaacattaattattcggaagaaaggttgtttcttgctacctctgatgggaagccacaggtgcaattttaagatgactatgctgttgttcttccaatacgtgggcctctcctatgacattagctctgcgtctgcagaaatgagccggttaggcccagattttatcacttcaagagcatgctggttgcagctctctgtaagagcctttctgagctggcctcaaaagttttctgcccctggggccttcaaacagacccgtgttgggttgttcaaggctctggtgtctcctgttctgtctcattttgagcaaacaagagttctggaaagaagggcagcaaatccacaggactgctgcaagggtttcctggacccctgctggccactgctccacctcacatgcagaggtgaggcccagtagggcctggtctgccttcccaggctgatgggccccttccgcctttacacagctctgtgaccagcctgggccacacactggtggaatctgctctcacgaggccttccctgcccagtccccacaggacctcacctaggtatggacccccgacccccggactctcacagttttttcccattcttgattgctcaaccagtattgccatcccattaaaaggaggggaaactgaggccaggcaaagtccagggactcttccaaggttacataaagacagggaggatcagggaagtcctgtccaagatgatagagtaagcagcttcagaactagaatcttggcctctgactcccaggctagggttcctacctgctacgtgagaattaacctgaggaaccttcctgggcctggcttctagcaccttccctcatcttctcttgctcattgagaatcagcctctaaggggagaatttcacatgatatgggttcccactgatatcccctcagaccttgggccccctctttgttgacagaatcaagccagagggtgtaaatgggccctttgttcctactgccagcccatagacaaaggacagcgttgtcctgcctctaagccctgtcccgagccctgcccactgtccactggagccatgctcctgctgtcaacactccccaccctgacccctcaggcaggtcagctcaggttccaggcaaagcctccaagtggccccagtccctcatctctgtggctccaggcaaactggtccttctctgggctgctatccccgaaaagtgggggacagcatgctgctgacacttggcagcatagggtctgtgggccaaagctgccccacccatcaggctggggtcataaaggcacttggggagagtgggctgacactgagccacaaggcatgtgccacgctccttagggtgggaggtcttgtcacagcacagggagattggggaggctctgcctctctgaggttttagtcacagtaaagagagcaggaagatggacaagatgaccccttcgagccccttccaggcctgtgtggctgtgacctctgtgccacacagaaatacaggagctgctctgtgccttggctgcccagactgctggttgtcaggcttgtttcttccacaacacacaaatacttactaaactcgaccatgtgtgggccctaccctcatggagcttacagtcccctcccacaggtgacaggacaggaattcacagggcagagtgatcccagagagtatgtctattcgggctggcatggtttgaacccattcccttcaggtgactctggtggggtgcctgggaggagggcagagtgaagaatcggccctttgctcctgctcctcctcttcccacattctagaactggggaaatgaatggggctttccaaactgcagtgcacacacagagcccctgctgatcagccaggtcaagtgtgggttctgattcagcaggtctggggtaaagcctgggattctgcatttctaacaagctgctaggagatgccagagccaccgattcagagaccacttgtagtagcaaggccttagagcatatttaggagtcacagaggggtctgcagttctcggagcccatctaaaccacccctctcaatgtttagtgggggaactggggccaagagagaggaagagacctgcccaagaccaccgagaagtcagccctcaggatcacatgccccagcccagttttcagtacactgcccagctctgcagccttccctatgccctgtactgctagaaaagtaagctcagggtctcactgggaaaagtgggggcacagcggagagcagcttggaactcacatgtgggctctggggggttgaagttggggggcagagtttaccttctgtcctggctccagccagcaggtaagagggaagcagtgatgggttggcttagggctggagaaaattgaacaagtcacaaagccaaatgcacaggctccaggaaagtgggctgggcttggggaccaagccagaagatgcaggagggctgggagagactggcagggacacagagactgggcacacctgacactgggtagggcagccaggccccaaaggccacacagatacccagggcaccccaggtccccaagagccacctgccacagcaccagactaattccaggcccccacagggcttggatggacagaggtaccagtgtaactctagttctggtaggttcagctttggagcctagggacttcagcaggaccaggaatggtgggcaaagaagccagcaggggaggacctagagggactgggtttgcttcctttgctctggctgacattcgccctgaatgtccttctagtccctccaaccatcacaggggtaagtgttatttctaggcctcggatgacctctgccctctgccctccaccctggtcccaggttctcggactcccc

SEQ ID NO: 1880954 - DNA, 4001 bp, Homo sapiens
tgggctggacagctcacaggccactacgattcaccacacagccagccagccaccattgctccaccaatcatgcatctgattttaaaaattagcttttaatcagcaaatggtatttctagttagacctgttaggctaagactaaaagttccaaatcaggtcacgttttctaggtggttttctttctaaccttgtaagctaccaagagcaaaaacaaaggccagaacacacaaactgacagataacttgcctttattatgaagtacacctttggacttgtggggtttttttcccaaagcttgtgcatcattgtctgggataactgcataaaatggaaggacgattcctggtgagaggcagtgtgttctaggtaagagcaaagctggaatccgctgtctcactgtgtccctgctctgtccacaccggcaactcatgcaaaggcagggtgatcatgcaggtgaaatgggtggattggtgtcaagtgcgtggaacagtacctggcacatagaaaacactctgtaaggttcatggggagattcacgactgttcataaactgatctgttgatgacaatgaatgggcaggagcctgggtacctttgttctctttgggtcacttatgttctagcttcctaaaagtctcattagagcaccttgtatttagataaaccattacaaaaacacttacttttctacttgagtcaccagtttatgaagtgcttcttgtggtttgctaaaacctaaatcggagggacaggtttttgttctgctttgatggtttgtagggagataaggctgcagaggtaggctggggccgggtcattgaggactttgaatgtcagtgtaaggagcctctctcctaagggtaaagggacaacttgtctttcagcacatttgacaatagcagctgtaacgaacacacacgtgcacacatgcacacacacacactacatgtgcacacatgtgcacatgcacacatgcacaaatcacatatgtggcttaacacaatacaacattcttcctcccttgtgcaaagcccactgtggatattgcaagttgggacactattctaccagcgaagattcagggatccctgctccttccatcttgggagctcctcctcactcccacccccagctccaatggagttcctgttgtggatgtggtcttcccacccactacaccggccttaggcagagcctggcacagctgggatcctcactgggactacattgctgggctgcagactgctccagagtccccccagaagcccctaaatgtccctgaaaagatgagtcactgactgtgctttcagctccaagcagcctttatcaatctctcaatccccatagatactgggaaaatctaggaacatgttcagaactcaaagaggggtcttctgctgctgctttttgtggggagacaggatccctgagctgggggaccagacatcctggtgcccctggcttcaagcagctggtggatctgcgcgctcaaaacttgccctggtctgtatggcctcatcctctcgcttgtcccactatgatggatctcgctcgctccgtagagcagtggctttgcaaccctagccagcactggggtcgcgcgtggacttgtcaggacacacattgctgggctccaccccgagtttctgattctggggcgaggattgaaaacttgcttttctaacgagttcccagcattttcgatgctgctagtcctgagaccatactttgaaaaccgcccctctagaaagtgcgatccctccccaggaaagaagcagggctatttttgctccaaaagtatccatcctgcacgccctcttcagtgcttggcacgtggcgaataaaccaatcaggatgaaaggagccaacccaagtgcggagtgttgaacctcagaggaagaaacccgcgttcaccaggcccaggcctgggccaggcgctgtcctggcggcgtcagggaggacatcgtgcccagagctcggacccagcagcccggccccgcgccctccctgtcccgcggcccgcaggcccagccctcaagcgcccagcctccgcggcctttgtggcgtcacagccagcctgaagaatggttgccttggagacgtaaacccaagagccctgctcctggagctgagaactgcagcgcggaggcttcggagcgagccggggcagtcggggtcggtgggtgcgctcgcggtccggggagagggggcgcgcggggtccgtgagggcgcgtgggggcggcggcaggggtgcgaaaccagggcccgaggggcgcgcgtggccgggagcggacttgcaaggcgccttccaaggctgcccgctcgcatgccacttgcttgaaacacacccatctaccatccaccccatctgtcctaccatccctgtgcacctcgctgtgtggctcggggccttgcagagcgcgggtgttaggaggcgaccctgcgaaccccaggctcacccaatagggggctgcagcaggaatgcggcaggaatggcacaagcttagagtgggggccctttccagaggcagcccctcctgactgtgactttggacacctcgctgaatctctgcttcctcccctgcaaaaatgaaaattcattcaatggatgaagttaagaagtgccaagggtatgtcaggagcttggatgagcagaaaagacccccctgttctcatggagctcacattttagggggaaatagacaacgaatggatttttaaagtgataatcagatagtgggaattgcagagaagaaaataaaggccacatgggggtggggaggaagaaaccactttggatgggatggtgagaggtctctctaaagaggtgacatttgagctcggaattgaagagaaggaagcccagcacccccagctgggtatgggagaatattttttggccgaggaggccgaaaatgcaaaggcttgaggccaagattgatgtgttctaagcacagaaaaagtaggcagctagagccaagtccaggaggtgagagtggaccctcgggtgggagaggcagggagccggcaggtgtccccacaaggtgagccctcagcaaatgtcggtggctgtcagccacccagggggaaggaagctctgggcttggggaccaccaggctcaagcactgtgtcactcctcaggtgaggatctcctttagaagaggagaagccttgcatcaacctcttgggcctcagccaagatgtctgagataccgtccactatagtctccaagaacatgaccaatgacagtaagtaccgggccagggtgggcactctcagaggtcaggggcagcttcggagcctgtccagctccctcacaggttaaggtagctctaaaccaaacactaggcaggagtcatagatctgcctacttcccttgaaacaaggcatatggattgcctgcagctgctgtaacaaagcaccaccacaaactggggggctggagtcacagacatttgttttctcaagctctgggggctggatgtctgagatcaagttgtccaaaaggctaggtccctccaagggctctgagcgagaacccattccgggcctctctcctggtttccagagctttgcaggcaatccttggtgctctttggcttgtagaagcatcactcccatctcagccttcctgcccatgtggaattctgcctgtgtgtgtctgtgtccaaatttccccattttacagggaccccatcacattggattggaggcctaccccgctccagaatggcctcagcttagtgaattacagctgcaaagaccttatttccaaacaagatcacattctgagacagtaggggttgggacttcaacatacgaattgggatgacacagttcaacccacaacagaccatgaggaaggtgtcaccgtgaaggtgagcttctctcagcacccctctgaccacaaatgccaggctgggctccaaggaggtggtcagctggcgctaggccctggatgaaacatgcctgccctagtggaattgcatgcatttgcc

SEQ ID NO: 1880955 - DNA, 4001 bp, Homo sapiens; identical to SEQ ID NO: 315428

SEQ ID NO: 1880956 - DNA, 4001 bp, Homo sapiens
aggaaaggctgagaagtgttagtggcagtatctgccacacccttaccctggtcttctgatcgctccatctgccgcccagcagcctcaaatccaggtctctgggtcctgggtggacctctagttgggagctgataagagaaggaggataggctgggcacggtgcctcatgccggtaatcccagcactttgggaggctgaggcgggcagatcactagaggtcaggagtttgataccagcctggccaacatggtgaagccccatcacatggtgaagccccatcacaccacttcactccagcctgggtgacagagtgaaactccatctcaaaaaaaaaaaaaaaaaaaaaaaatgaggttaaaccacataggggtcttattaggaggcaagggcaagatttggaggtggagagaagaactaccaccactatcactaacatctggtttttgtttttttttttttaccgggagtgcattaggagctgccaatggggctggggcatagaggtgagtgcagattgagggagaggggctccacagaacagccacaaagggaggatgacagtgggatgacacacagcaggcagcaacatggagagtgatccgcaatcaatctcactactcagaagtgaggagctttgctctccaaaaggagtgttagctgggaccagcgccagccctattggtgagagggcagggcttgatttccctcagccatagtccctttatgtctctgcacatttgcccacacagtctccaagacctaggatgcccacccccaatccctatccctccctgcccttcctttgcagatgcggatctccccttggtcattcaaggcactgctcaggcatcttatgcaagaaggcgtcccaggttgcgaaggtgactcagacgcctcctttgggactccaacacccttccccggcagagcccctgcctgtctgcctccgtggtgtcaggttttgtgccctctactcactagattgtggacacagaaagcgctggtgctgtcaaaaccacttctgggttgccgggcgcggtggctcacacctataatcccagcactttgggaggccaagatgggcggattgcttgagcccaggagttcaagactaatctggcctacatggtgagaccctgtctctataaaaaatgcaaaaattagccaagtgtgatgacatgtacccgtagtcccagctactcgggaggctgaggtgagagaatcgcctggggagttcgaggctacggtgagctgtgatcaccactgcactccgaaagagtgagaccttgtctctaaatagataaataaaactactttgggggactcgctcctccagcccctgcaccgattggctcccattcaaaggagttcagccctaagtgcctctgcagatcttccacccccactcacaaacccgtaggaaccccggccgtgtatcaggcccagagctctgatcctggggaggtcctcagattcgtagacaggagagggaacaactggacacctgttgcctgaccttggtagccacaaggggcgctcgggaggtggaacccgcagaagccccgcctcccggaagcggagcagtcaaggggcgaaaggatgcgccgactgattggttgatggtgatgtcatagggaccgttcggggcgggccagaggccttggccaggagttcctcgcctgttagaaccaggatccaccccatcgcgggagccgcaccctgtggagcgttctggggtcccggccctgacctcttcctgggcttcgggatgcccgcgtcctctgcacccggcgctgcagctcgttatcgattccgcctttggaggccggtccgtatagtgtacctcccggactctctcacggttagccggcaacccgcggagccccctcccccatgcgatgagtccgccgtgaggggcggggcctcccattgtgccaatagaaacaatgactgaccgattggagtgctccgcgttcacccctcgcctccgctcctctcgtgacgtctgttgcgccaggtccacccattggcctggcgagaccggcgcgtgccaggagttacgcagggagagctggaatgcaccgagggtggggggaggactgagtttctgtgtcagtcccttcaaggggttaaggcatgcggtcgtgacggacgaggggcggggacccgaagaagcggggcccgcagccatggggcaacgccgggctccacgtggcatcccagagcactcgggactcgcagcctgggagggggtgcagcctccagtgaaggggccccgagcccgggagactgctggggaccagcaaggcagggaagaatttggcctctgctcccgcctcgggagggtcatctctggtccctgctccgcaggggcgatccaaacaagcaggtggtcgcgacatgtttcataaaactagctgatgggatagttaaagctattgttcggggtgctggcaccccagacccctctccagccatcgtcccctctaccccaggatttcacacagtaccccctcccagagctatgagaacgctcatgggcaccaaaatttcagaccaaaatccgggacacggttcagaactagtggtcaggaagggggaacaagagatctggaaggacagaaaaaggctgggagacggagctgggacagcgccctagaaggagggaggtgggtgaaggcggcgaccgaaagtggggagggcggacccaacgacggcgaaccttcgcgctctgttcagcaccaggagcaacgctcacgtcctcaataaagatggcggcaacatcttcggtcctcagagctgccatgcgcgatgggttgtaccaccgtgtttcgggcgccggggcagaggtggagcgaaccatcggggcggccgggagccatgttggagcggcgggaggcggcagcagcgtcggggatgctgtggtgggggcggaaaaagccagggccgcacgccggaggggctccggccgcggagtagatggtgcccagagggcggcgggggtgcggagagacaggcggaggggcgggggcccggggcggcggcaggggcccgggagggggcccgagcggcggggccagcccaaggcccggaccggggcggggggcggtggaggccgtgcagggaggcgggggatgatggcgaggcggccgccgtggcggggcctcgggggacggtcgacccccatactcctgctccttctcctctctttgttccccctcagccaggaggagctggggggcggtgggcaccagggctgggacccaggcttagctgccactacggggccaagggcgcatatcggtggcggagccttagctctttgtccggagtcttccggggtccgggaggatggggggcctggcctgggggtcagggagcctatcttcgtggggctccgagggagaaggcaaagcgcccggaatagtcgagggccccctgagcagccgaatgaggagctggggattgaacacggcgtccagccattgggcagccgcgaacgagagacaggacagggaccagggtctgtgttatactggcgcccagaggtctcctcttgcgggcggacaggacctttgcaaagaggtagtctgtcaccaggggctctgtcctcaggggtcccgggctcggggaacagctcgcccctcccttcagactttttgattcggcaccacggtcccaagccggtgtcctcccagcggaacgctgggacaggctcccgcaaaagagtgggcaccgcgcgctgctgtggggaattatgggcaacagggagcaagggtcagggcgagagagccacgacatccggagcagaaaggacagccccccggcggaactgtcttccaggggcctcgggatctggccccgagctggattcagcaccacgcacggcgaggacagctcctgcatcaggttcagcaccccgcgagtctcggacagctcccgagccggcgcccaagcgcatgcgctcccggggtctcttccgctgccgcttcctcccgcag

SEQ ID NO: 1880957 - DNA, 4001 bp, Homo sapiens
ccagcacacaaatatttaaggaaccaagttgtctagtcatctacctgactgaatattctcaattcaaaagcatggtatataggaggaagtaaaaagccttggatgctggcgaaactatatgtctaaatccatgagatgatcttaaatcatcccagcttcaaattctcaatactgtaagaattaagctaagataaagatcaatagaatccttgttaaaaacctggtatgagatatattttttaaagggttggtagaatttgtatagatatagggaagaaataagccattttaaatgatagagcaactgaaggaaatgtttagcattagaaataaatatcaaatttttagagggcaaattggaattaaccatttatgttggcaaaaagtggagaatttcagtggagaagtatgacttggtcctagtgtacaaggagtttaataggtaggcagaactactctacatgggaagagtagacttgcaaatgaaagaagtaataaacaaatttggccataaaatgccaggttgattagaagggaaatctggagtcaaggaaatgagctagaacagaagctgttgctgtcatctaaaaagagatgatcaagggcctagacttctcagaacaaatggaaaagggaagctagatatgagtcacatttcataaaggaatgctttgtaggtttttgtcatcactgctggctttcatcactggacagaagaaaataagtctaaagactctaccataaatggctgaggcttaagaacagaatcagtaaagtcggtagggttgttaaaaaataggtagacccaagagataaaggactgaataaaatcatcagtttctctagataagggggaaatggaaatgtagacctctagagcatgcaggtaaaaattagaatagagtttcccaaagtgcatttttatggaacatcagtctgtacagaagctccataaaaataagactttttaagtcaaattcctttgtatctaaaaattcctcttggtgattcccagcaaatacttctctattaaaagttcccaggggtcctagagaaaataaagttgtttgactttgtttatcctagcaacagccttctgaggctgtgcagtcagaataggaggttttgagccaccttgcttggattagaatgctgactgggtagttttgggcaagttacttaactgttttgtgcttcaatgttctcctctgtaaaatggggataataatagtcagggctatcattggcccatatggttcctttgcgggggtcagaaaaagctgtttgttctaggagaatgaggtaaccaacatgcacaagtgtacatggtatccctgataaatgtacctagttcatatggttttttgcattaaataacttaacatatataaagtactgaaccagtgcttggtacagagtcagtactcaataaatattactttatttgtgacacttgttaaatatcttaacaactaatgtttggtggcatgcacttgggaaaatgccagattaaacaggctaatttgagaaaagttttagatgattatccttgtttgaaattggatactattatgctataatctacttaattcagtactggccttacaagttatctaacatctaaaatttgatagtattacatttaaaaagtagactctcatctaattccactcctgtcttttgtcctaagagatgtaccaagaagtctattgtatacatacatgaacaattaccaacaacatacagcctaatcaaaaagatgtaaaactgatcatattgctggaaggaaatacatcaaaatgttattggtagttgtgtctggggtagtaggtcttcatttctgtatttttttatttttccatttaaaaattttataatcaataaagataaccttaaaaaataattttcacctactatttgaggcataaatatgtacacttacctgttttaatgcacatttcttttttccacatacctgccaggtgctctcagggtcagaatggggcaacatgctgctttgggaaggtggtctgatcaaagtggagctctgtcgagggacaagcaagtcatgtcacaatggtcccattaaccagataatgctgtatgagggtgaagttatcactgttgggtcagatggatatgttagggtaagttttctcgatacttggatggtagcacccacgtttaagacttgtagctcacccaaagggttttatttctcataaaggttattttgtgaaggagatcagtagtcatttactcccaaggccaactcactttaaataatgcttctcttgtggtaaatatttgcattcttgtcaaaattaatttactgcattttaccactgaaactttttgagagggcctcttgttattctgattctgttgaaataatagcttcagaagatgaaaactcatgttagcacaagatgaacagtagacccacatatccttccaaaaggctccatatgaatgggccattttgtaggaacaaaggtgctgaacatttgttagttattttttactgaggttaccacttagaaatacacccagaggtgaactgatggagtttgcctatggatgctacattcttcttgctccttatgctagggacctcacttgctttctcttggggacactctcttgcccaaagcctgggctaagctggaacattgctccagcatctaagtccccttgattgctattgtcacacttcttccacccactctgtgtagcactttctgttaatgagtattgtgctgtggctggtcaacctgtagccttgtgatttgccttgtagtcctcttggtagatattttcagtggggcctttcataagaaagtggcagtgttctattgacattctttaagaaatgttatcaaaagtaagattcttttttttttcttttttaagagtctggtcactctgttgccaccgattgagcttactgtgtttaatattgtttaacccatatctcccacagtgggtcctcttaccactggctttttgagccccagtgtatgttttttacatttacaatattaaatttaatcttgttagatttcacacatttctctgagaatcttttgtgtcctttattttgtcatatgatatatttgctatctttccaagatatacgttaccccaaaatgtctaaataccaagtgggagaaaacctcaggagaaaagaagttaaatatttcacagaggatcccttcatggacaccagtatttcctaagcttgcttctcttttcagagtctgtccttgtcttttcagtccttcacacagtaaatctttacctcttaccccatagaaaaaacctagcccaactcccaggggttagtctgatcctagtttgatccttaaccctaaccctgaccctcagatatttccctcttcccccaaccaggctaatctatgggacagtcttcccagagttcctttctcaaagtctcagttattcagtctaggatcacatggcagggtatgttgccagaactgtccagaatgagctttggcccctcacaggggaggtcctgctgagcctccctgccaccgtgaggtaaaactgtgctccttcactcttcctatagtattctagactcctctcccaatgaacaacaatctacacttcactgtctcactgtcagatagtaacatttactgtctcacttactgagacatgtttggtggtatgcacttggggaaatgccagattttcccaatgagatagtaaagtgtgaaatattaatattcaggaagagaaacattttctaatggagactttatctacatctatattctttgcttctaatgagatagtgcttgagtcattaagcaagaaggtatatttcccccttccaggggcctgctggtatgtagaaaacagggttcattataatgtcttgctgaacaactgaaccatatactcctatggccactttatgtaaaaagagacctaatagaaaccttgaaataaaatttgttttggataaatta

SEQ ID NO: 1880958 - DNA, 4001 bp, Homo sapiens
caccaagaaatgcctatattttaataatcaaatgattttaaaaatttatttaaaaccaattcatgtaatgagatgaattaacttaaatgcaataagtatagtatgtgcaaaatcaactcctcttagacctacagctaggcccacgaagtgtacagtgtacttatcagcagataggttggaggacctatataaccatgaggaatcaataaatatctatagccgtttctttgaagaaaaggatccgtaagtctacatgcaacagataacaatctgggaaacatatattcatcatcatagtcttgtgctgcagtgaagtgggtacaaacataccctgaaagagattttaatgagttgccatagccagtactcacacccatccagtaataactatttgtctccattgatttgctcacaatattcaggagcttgcaaggaatgattatacactacgttctgccattactaaaggtaaatccactgcagcacttaaggccataaaatggaaagccagggtatacataggctctgtaaccacgttaaattatgaaagccaaatggtggtccctcacaaagagactgaaattaagacaaacccaactgcaacatctgcaggtgaaagagaaaacacaaagatttacaaaagaaaaactctgggataaactttttattttcttgtcaccaaaagtttccccaaagagcttcctaagcttctctctccatcaatatactgaaaagccaacttcatcggcagttgatcagtttctctcttccaatctgctgcaaggcagagcttcgtaggagttggactgtgcagtacaaatattcatattttaattaagattattctccaaaattagaaaacgcagaatttttacttcaatgaaaatgcagagaaatgaaaatgcaccatatgtaattaaactgaggattaactaacagtaatggcatcaacgacaataacttttgagtgcttattatgcatcaaatatgcatatggtgttaaatttaaaaatctatggtgttaaattacttgtatcatctcattccagtcttgcaacaacccagtatagagggtatcgataatctccgtattattgagaaagggaaactgaggcacgtagttaaatgcctagtccagagtgacgcatcacagtgatggtggagctggaattcgaagccacgtgggcgtcccgggagcctccgcctagagcgagcccggggggcccaccagttaccatcgccacgcgcacgcgcaaatctccccgcgcacggcgcgttcccgcgggagcgcgccctcgcgcacgcgcctggcagggcagccgctcgccggccctggggctgctccgcggctcccacgagcgggactggacgccggcgcccttcgaggaggggctgaacctggggcgccctctctgccgggccacccagccctgccgacgcacacctgccctccgccgccggcctcccaccccttccccgcccgccttcccgcccagcagcccaaacgcccaccctgcgctccaccctgctggccgtctggggcgggggtacctgggcccgcgcggctgctgctcctccggcccgtggtttttcgcaggagttccccggccctgcccctggctgagacactgtggctcgcagcgagcccggagagtgggaacggaggggctggctttccccagcctcccggctccaatccctgctccccaaattaatcactttctccgtgctgcctccccacgcacactcacactccaaaaaaaaaaaaaaagcgagagaaagagagaggcacaaagaggaagaagggaccatccgcgaccggcatctccagccccccgggctccgctaccaggagccatggcaaccacggcccccggcgcgccctctcgcccctcggcggtctggggaggtggagctctagcccctctctgggttttcgtgctccccaaccccacaaccccacggtccatggattccccgctccaggctggcggcattttcggaaccccccccgggctgggatctagaatcctctcctgagaggaggagccacacaggggcagtggactgggggggtctgagccccacacaccaggcggtgtccaggggagcgaggggcgcggtgggagacagaggccgggactgacccccagaccagctagacctcggagccccacccgagagagggcggagatctacgggggggtctggaatcctcctcagagagcagcgagggatggggtggcggaggctggaagcgggagggccaacctaccggcggccggcgggcgtgagtgggacccggcggattcgggcgcccggtgtgctccgtcgactgaccccgagctgtccgaatccggcctcggccaccgggggcggggcgtgaaaagggggcgtctcctcccgggtgcaggctgaggggcccggaccacccccactgcggacgagggaccctgaccgcgccccgcttcctttccataacgagtggacccctcccggagcaccttcagcccttcctccacgggagacccccccagcgccggcacgagagatgccagcggacccccacccctgacacacctgcgccgcctccgaaacgcgatctgtccggcgcctcccctcgggcgccttctcccccgagccggccgggagccgggacgggggcgcgcagggtccggtaagctctgggcggatccagggagggtctcgccggccgctgcccgctggtccgcacccggggctgtccgcggaggtcccgcccgtcccctcccgccgctggctctctggccgcgggaaggctggagccgttctggctggcaccggggtctacgccctcctgccggaggctggctctcgcctctgctcccttcctgggttctgcgccgccacccctcacccacgccgcttatcttccctccctttgcacgctcccgcgggacagggagagttacaggcttcagactttatctcgttgtggaaagcaagagaccaagccaaaaactttggtcgtgcttttcaacatctccggtcaaaagaggtaggatccctgctcgtttatctgcaaaagcgacatttaaaagaaacgccccccaccccctccccgatggtttcactcggttcatgttgcacacacaggtcgccaatctgcttttctcccattgctgcgtcttagaggggtgtggtgccatgtacgtattaaaaattgtcttcttgctttccttcatttaagggcgtggtggggcttgctattgaatttacaaaatatgctacgaccatccgctgtcaaattgtgcatgcttaaatttacagatcttctactatctcacaatttttgccctaatacagagtctataatgttaccacatcgtttcgtaacgtttttcctacttatcctttattaattcactattggagaggaaagccttctgtactcatattcagtgcaaaaagccagttctgatgccttatgaatccacaaacacataaaaatattttaggattccaaaattcatatggaaaaattataatttttagcactacatttgatttatatgccactttattttttttccattatggtggtattttccaaaatttttacaggataccacttttgaaaatcctgttgaatgcaagtcctctttgttggtaagagaattattgacttctaatttttactccactaaggctgtgagattgaccttacagcctcgttttgttttcatctagctcattgaacaatgaggatatttagctcccctcagagctaccctcagagttggatgagctatcctcagagttggatgccaccaccgggagcagcaaaagcgaaggcaactcatgattctgcctcagaagcaatcgaataaaatattttgaaaatgaatgaatggacttttaaattttaatcatcgctaaccttggggcctcgattctgtcaatttgtgtgtgggcacagttcttaccaactgccttggcaaattgtgaatgcaagtgagggc

SEQ ID NO: 1880959 - DNA, 4001 bp, Homo sapiens
taatgtttttaatttttcagctccagataggaatccacaaaacataagggttcaagcctctcaacccaaggaaatgattataaagtgggaggtgtgtatttcttaatacgttatgtatttctttgtgcttttctcttcctcttaggtctgcatgctaactacaatgatagcacaacatttttttaagaacaaagataagatttggaaatgaaattaacttgtgagtcatcatcacaaattttaaagatcattgtgattaaaatgatgttatgaaatcgagtttaacactggtcaacaatttagggaagattatacagattgatttagttgtaatacattaccgaagtttcaaattattaataatttaattaacaatattctagattctcttccattcaaaaaatactgaaaatctttaattaatttagtataatctactagatattatgcatatcaaactgatgaacccccataaagtattcactactcattaaacaccagtagacattttgtattctcctttctagtaattctgaggatggtcttgtgaagaaagcatcatgaacgccttattctagatctggagatggcatccaggattatgaatgtcttgcccatcaccacacaaccagaaatccgcaaagctaggatttatgtatgaggatctttggactccaaacctcactttttcctcctttacatatctcggttaaatgttattaaatagacttcaccatttgaattttgcataaaaatgcccatctacccagataattttaattattctagggtcatttccaaattttttctgtaacagtggggcattttattttctctctactacttggatgtatttaatgaccagtatattggcctacctaaaaggaaattatcattcaaccattctgatgagtaataggcctccaacattgaatttataaaattttgtgtaaacatagaacatttttaatgtatgctgaaatatactaatttatttccacaattcattccaggtataatttttgggagaattttagaatgcacaaagtttagtttgctttttatcctcatatgttggtctttgtactcattacacaatcacatggcccatacctgcaaaatatttagtcaatattttttagatcaaaattagatctttatttccacttcagtgaaattaagttttacaagtttaagatgtggaaaactttttttaaaatggtaatacatagaaatgaaatatattcaataatattatttctttccttgaatgtgtggttatagttactactacattgtcttgataattacttaatttatagtctaaaatgatgttagtcttttagggtgtatctgtattatcctcccttaagttccatagaaattttcataaagtagataatatagttggttagatatcagtaatactgtgtatttgccagtcagttcctcagagaagcacatcatgttccagtaacattagctcattaatcctcactactcctttgggagggctgtggtccatgatggtgtcagtcttatatgtcataaagagaaactgggaatctcagagtttaatgacctcacccagatgccatgggctgagtcatatggaaaaaaggccagaaatcttcagtctttttgactgctcctctcactcataagtcattttttattaccccaaagatacacaagattgattattaatgctctcttcttgtaagaatgggactgtactaagaaagcatctatggccaggtgctgtggctcatgcctgtaatcccagcactttgggaggccaaggcgggcagatcacaagatcaggagtttgagaccagcctggacaatatggtgaaactgcatctctactaaaaatataaaaattagccaggtgtggtggcacatacctgtaatccctgctacttgggaggctgaggcagaaaaatatcttgaacccgggaggtggaggttacagtgagttgagatcatgccactacgctccagcctgggtgacagagcgagactctgtctcaaaaaaaaaaaaaaaaaagcatttaaaattggtctttgaggagcaaacgacatgtcatttagtaattaattgactagaggaaggaagtagtcacaggatttggatctaggctgacagttacattcccaatatgtcccatggtgtctcctattatcttgatgtgtcagagatctaatcactactgacacagccagtgaagtttaagaacattcattcactgagtatggttctgtatggatcatcctgcggaaaggagttagactccaggtttttcccagtttcacaatcagatagtattgtgaatgaattaccagaccccctccagagatgtactagaaataattcctatctacatgataatggtcagagggacataatttgaaaaaaaaaaaaaaaaagctgatctttcccaaaagaattaacaatgaagatgagcagtaggaacagactggacatccctaatttttgtttatttgtttatgttttacatttaacattaaacatgattcaatttaaagtaacattacaatttaacttaatggtagaactaggctttttagttagcattaccttcagacattcacttctcatatattaagtcggtcatgactcactcatatattttgagtgttcgaacatcataatgttctacttgcaaaacaggacaaaagagtctactgcaaccttatcagttaaatacctgtatcaggataatttttgcttgagagtttccattgttcttaagcatatgtatgtgaatttttaactttgctcagcaaaataacacatttcaaacttaaaggacaccaaaagcaaaaccaaaagcccaaaaccccactaatgttgggaagcaggaacatctttaattacctggttatataatcgcatccaagatagttaactcctaatggatctaggttttattatttataatacaagtataataagaagacctactggctttaaaatgaaaataagtggaattaaatgaaatattgtataacataatgactatagtagataacaatgtattgtattcttgaaaattgttgagagactaggttttaagtgttctcatcataaaaaataagtatatgaagtaacatatattttgagtagctcaatttagccactccacaatgtatacatatttcaaaacatgttgtacataataagtagatacaatttttgtttctcaagaataaataaaaatgttcaacaattttttaaaaaatggaatcaaggcaggacggcagtctttctgttttctagattaatagttataaccttgcttgggtcatagatctctttgaaactatgttggacgtgcaagctctttttctagaaaattacacacaaaaagtcatactaacaatatcattggtttctcagatcctctaaaggatacacatgtaccccatctagagattcctacaccccacgttaagaacctcttttctaaagactccttcctcgtgggctccttcacgagaggcagagggaagggaaggctggtggcctcttcctgcttactctgccctggctccttttgttctttcttgaagagattatttgggaaatgtctgaggctcagtaggcattgccttcaagtcaaatacaaagcattcaggctgtttatttgggttcccaggtactaaaaaggccgctaatatagctaaaatatttttgtttaaagtgttatggtttattatttatttatttaaaatttgtcagagaactttattaaatttaactcctttctttggagcaaaatgtgtaaaatgaataatattatttgcacacacttattgtcagcagagactgaagaaaactatcattccagattgcagtacggcactacaagcccatggcctaattcactgggacaatgctaaagcccctggtgaatttatatccatttcacactctaaaatatcttggagcaaaactttccaatgaatccaagtat

SEQ ID NO: 1880960 - DNA, 4001 bp, Homo sapiens
ggcttcccagactggctctgtggctccatagggatggcagaagcatcactgaccttattccccagcttcagcctgggcaacagagcaagacaatgtttcaaaaaaaaaaaaaaaaaaattctgacaggtattaaaccaaagctgaaaaatacatgaataaaatatattagactaggtttggggatagaatgtgtgtaaaaaatggttctcgaacttgaagaatatactactgactttttggaaaggagaagacatagattcttaagaatatggaactctggtttgagaggtaccgagtttaaagttttattctaagacaatgtcatttaggcctggtacagtggctcacacttataatcccagcactttgggaggctgagatgggaggatcccttgagcccaggaatttgagaccaactgggcaacatagtgagaccctgtctctgccaaaaataaatagatgtctttcagttacaaattacaaagctttatctttataacagtacaaggacttatttttagatattcacaaaaataaaaatacaaaattaaaaatttcttgcggaatttgcaaacttcagataacacagatattgagtgtttagaaaatacaggataatttaagattgcttatttagggtcttaaaatacctcagggtcatgatattcaactccatttctacaaaactattcagcagcgtaaatataggagagctagatgaatttcttttgattacactgcctggaaaagtcttgaattatcgtagactgaacaagtgttttttcgtttgtttttctggagacagggtcttgctttgtcacccaggctggaccaaaaaggtcgaggctgcagtgattgaggctgcaatcgcagtggtgcgatcatggctcacttcagcctcgaactcccgggctcaagtgatcctcacacctcagcctcccgagtagctgggactacaggcacacaccactgcacctggctaatgtttaaatttttttgtagagacagtggtctcattgtgttgcccaggctggtcttgaactccagggctcaagcgatcctcccacctcagcctcccaaagtattgagattacaggtgagagccaccacgcctggctgtgaacaagttttttgatggcctaccatgtgccttgcactctgctgcatgctatggggtatagagtaaggcaaggtcatgaccctgcgctcagagtttctgttcaagtgataaaatatgcaaacggaaaaataatagatacttaatctagtgcaacaagagcgaaactccgtctcaaaaattaaattaagttaaattaaataaataaataaatactgcaatgaagtatgtgaggaagttgcctccaccctaggaagggaaatgataattacaattccttacatgtctaacagcagtgttacagattgcaaagcgctttggtgcttagcatctcagctaaccattggaacagtaatttggtagaatgcagattatcacactcacttgactggatgttacaaatactaaaagctataaagcaccaggcactcttcccaacgaaagggtgggatgggatagttcataggtaaacccaccgagggttggcgactaacctaaaggattaacagcaccgtttttgttttttgtttttaacactcaatacgtcctagatcctgtgctaagggatttacagacatcatctaatttgattcccacctgtctatgagggaggtactgttattatccccatttcacagaggacaaaagtgaaacacagaggtaacgggtaaggtcaccttgccagtgggggcgagacgtgaacctaggcaaactgacacaacgcctgcactttcttgtccaaggtcacggcggtgtgaggtaggctggggaagggagggcgctgacctgtcagatacttgttcctgggtgagcttcttgtcgctctccagcaggatggacacgtagtggcggatcatgtctacgaagagtgataacgatgggtaggaccacccagaggcagatgttggagtcaagcaacagttctggccctgccatcttcactgaaagctggctcccagccggtgatgggcgagcttctcttcaccggggcgcagttgcttctctctgacgtcgcctctgggccttctctcgcccctatgcccggctagcacagaactctgctgcagcggtgagcccagcttattgccttcagctgggctgcccggccttccacttccggcgcggaagttggcgtcacgtcatggcgcgcctcggtggcgtcagagcggcgtcgggcctggcgggaaagtcgaaaactacgggcggcgacggcttctcggtgagtaagtggagcaatggtcgtagtctctcgaggccccgctcccctgcggcctaatctctaagtccgggccgcggtcggcgttctcctctggggctccgcgccccgaaccttggcttcctcatctgccctgagatgggataatccccacaggtacctttctgcgtcattaaaatgcggaaacgagaaaggcttttaccctcacccgcttcccgatgaactaatccaggcagtcggcctcatctcacttctgttgggcttttctggaagccagatggtatcgcacgtgttaaaggcgggtgcctggaagccggacgtgctgacaagacttagtttttccatctgcaagatggctgataatggttatccgtattaaccgaagcggcgataaataaaaagtttagcacagggcccggtacctcgtaaatgttaaccattattagaagtcattataatcatcaagagtaagtataggtggtgaagagcgcaggtgctgaagccagactccgagttagaatcccagttctgcccgtgatgatgagaataatggtacccacctcaaaaagttttgtgggaaataaatgaattattaaatataaagcacttgaaacagttcttgttagcttttagcatttcccctgcactgcgagcttttttcactctgaatattctcagaaattttccttatgccggtaactatgctgggcattagggacattgagtaagtgagactgggttcctgctctcaaagagccccagtctagtgtgaggtaagggcccctaggtataccctgtggagcagggaagctgcagtagcaaactcccttagggataggaggaacacttttcaaggaagatgacattcgattgaatgtttagatctgagtaggaatttccaggcaaataagagcacttcagatgaaaagaacacctttgtgcaaaggcactgagaccacgaaggttctgatttacaagattaaaaggtcatgtgattcaggcacttcccccacctctgctgtctgatttctaactccacatctccttgtttcagtatgagtatctatttgcctggactcctcttctcctaccccttctactggctaactgctgtttcagccctcaagtccctgcctaaaaatcacttcttcaggccgggcgcggttggctcacgcctgtaatcccagcactttgggagtccgaggcgggcggattatgaggttatgagatcaagactatcctgggtaacacggtgaaaccccgtctctactaaaaatacaaaaaattagccgggcgtggtggcgggcgcctgtagtcccagctacttgggaagctgaggcaggagaatggtgtgaacccgggaggtggagcttgcagtgagccgaggctgcaccactgcactccagcctgggtgacagagtgagactccgtctcaaaaaaaaaaaaaaaaaaaatcacttctttaggccgggcggctcacacctgtaatcccagcactttgggaggccgaggtgggtggatcacttgaggtcaggagtttgagaccagcctagccgacatggtgaaaccctgtctctactaaaaaaaaaaaaaaaaaaattcaaggagattgtccctaagaaatggtccttgcttctctttaccacccttactagcaactagactaa

SEQ ID NO: 1880961 - DNA, 4001 bp, Homo sapiens; identical to SEQ ID NO: 315490

SEQ ID NO: 1880962 - DNA, 4001 bp, Homo sapiens
gcccctcttctccccgaaggtacattggcattctagaatgagttctatacttagttgtctgtccttaacgagactggctgttgcgactcctaggagaggcgagctgtgagagaagtttaccagtactccgagtctatacctcaaagttcccttcgaagtgtgcataatgtagagactcatttatgctgaaaatggtgtgaaataagtcttcatttattaatttcctctaagctgtcatgcttaaaggtggatcaaaagaatagaagctagcatacacatgtgcttttggccaactgaaaaagttctatttactgatgtctgtgttcttcaaacactcaatatgtgtaactaataatgggctagtctgcccctgttactcctagacgaacccaacccaaactgaaatgtttgccatcttttcaaggtcaggggctttgcttggaatagaacatcaacctcagaagtagaagacctggatttgaatcccagctccactactctcttcagcaagttgcttaaactctctgagcctcaattcccttatatataagatacgaataattgctttttcttcttctttcttctttcttattcttcttccttcttcctttctcctcctcctcctccttcttctcctcctccctcctcttcttcttcctcttcttcattactttatatgctaattatgagaattacatatgataatttaggtagaatacttcacaagttgccagacataagttcttactaaacattaactttgtaggtcagagctcaggacaataacatggcatataataaacattcactagacacttcacacacacacacacacacacacacacacacacacacacacacacagtcctgtgtctgtagaaggaggaatctcattggaaatgcaaagttaaaaagctgttactgaattctgaactttagtttccaggtcttgaccgtttaaccagacctacctgctgcttaatctttgctcataactgtctctagtctcccaaacagattacctttgctgagacctgtgcatttttatgatgaatccatagagtcacctatctgaccaccatccctctttccatcaatatgcccttatctttacagatcctggtattccttggacccagaaacacattcccttgctattatcctaaagcagctaagcctgttaaaggaaagcatttagaaatctagatatctgctcctgcattttcatatttctgtatgccaagaaaaatttgaatcaaattctctattgatacattaggtataaaccatggatctgggagaaattaagttggaaggacaaggacccatggttgatccagagcacttaatattcgtgtaggaccaaattctgtttaatatttttatcctgctgtaattaaaaatttttgacatcaactatcaatacaggtacatatgttctccctacctctgctaaagctccttcccccaccaccaaaaacaataacaaacaaaaaacaaaaataaaaacatcgataagtgaacttctcaagttgctgaaaatgtaccatcagattcaagcctgtttctgaaagtttcaactcacccaatcagacaaaaggctgaggaagggaaacatttatcaagttacactgaggactccatctgttatcttcgacctttgttaccaagtgacacagaggagatacttgaaggcagtttgaaagacttgttttacagattcttagtccaaagatttccaattagggagaagaagcagcagaaaaggagaaaagccaagtatgagtgatgatgaggccttcatctactgacatttaacctggcgagaaccgtcgatggtgaagttgccttttcagctgggagctgtccgttcagcttccgtaataaatgcagtcaaagaggcagtcccttcccattgctcacaaaggtcttgtttttgaacctcgccctcacagaagccgtttctcatcatgccaagccaacagaagaaaatcattttttgcatggccggagtgttcagttttgcatgtgccctcggagttgtgacagccttggggacaccgttgtggatcaaagccactgtcctctgcaaaacgggagctctgctcgtcaatgcctcagggcaggagctggacaagtttatgggtgaaatgcagtacgggcttttccacggagagggtgtgaggcagtgtgggttgggagcaaggccctttcggttctcatgtaagtagcaattgcatttgagttatttaatgctttaggcagactcttcccagtgttgcgaggaattatatttgagaattttgccgtgtttactgcaggactttttaaatcggtgtgaaccatatgaaaaacctatgactctgagcaatttcttcttcctagtttttattattttatacttgctttttattataatatagagttaattcattgttacataattaaggtttttggaaatattggcaattaagatgcttaagtattaatatttatgtaaaaaattatggagtctttttaaaaaagtaaacttggggaaataggaaagctgtaaagaatgatctttatgctttttgttctttataaaaagaaccaaggtcatgggctccgtatttaaccaggttgccacctttctcatgattttgtttcctgctccccactccctcccattattcctgctaagacctttcctgctgctaaatattcagttttcatttttaactaatttggaatcatttggctatagaaatttaaaatgatctgctgtgctaactgggaaagaaatggatgcctatttagtatagaacattttaaactgattgacctgcaaatcatgtagagaatatgagagagattttcttgttgtgatttttgtgaaatggaagtgtaatccacagtatttataacctgtttatcttaagaagagaatttttaaaaattaccatgtgaataggcaactcattaaatgaaaattaataggaagtcatttgttatatctcttacaacacacattcagaagttattattatttcagaagggctggtttggaacaaccttatgaagacacagtcagtaaattactgcataaatcactcttcaggaaaggaggttaccaactgaagcatttaaaatgaattattattttgcccaggttttttttttctttctagtataggtagaaggctaaattaattgaatttattattaacatatgcagtgcctaattaaatttcagtgctggtctatttatatttctgcaacattccttatatcttcttagcagtcattggacaccaaccttcagctcacataggttactaagtgatatgaattttcatagggctccagaaaatttccaagaattggttgttagctttttaattgatgaagtggataccagttcttttcactgaatggcttttattcattaaggtaatggggctgttagagttgcttagttttcctggggaaggggaaggaagaaaacaaagcagaatgtcatgtgatatgcaactgtattaaaaaaccgaaaaggaaaaaagttgagagagatgatttaaccgtgagtcaccggcagccaaagcgtgagtaaagcttctcacagatgaatttagacaaaagcggagaaggtactggtgaattttctggagcctttacattttctacagtgaaatggagataaactttactcatgccataggacatgtttcaaaacaataataagatgttttctgaacacttactacatactaagcactttatatgctttgtctcatttaatccttacacagccacattcttctggggtttagcgaatgatttttgtggttgtgtcctatgcttgtcctgtctaaggatgaagttgttctaattgggtgcccctccttttgctttctgtgaggacttgcagaactggtggggtttaaacagtaccctcacttatctcacagaatttcattagctcccagatacccctgacattctccccctagcctagtgaa

SEQ ID NO: 1880963 - DNA, 4001 bp, Homo sapiens
agtgtgctgctagggtaaaatcatgatggattggaaagagtacaaaaacagaatgtaaaatgtaataatttttaatattaattacatgttgaaatgataaatggctatattggactaaagtacagtattaaattcacctgtttctttttacttttctaatatggctactggaaaatgtaaaattacatgtgtgtcttgaatatgtgagggaccgggatggacagagaatgctacaggctggtgcagtcacactggtccagatggggtgatgaggaacatcgggggttgagcctcttcctggactgggcagagggagggaagagggctcatgccgagaaccatgtaagtattataactgagggccatgagttaaggaaggaatgtcaggagtaacacctactccttttagcacttatgaggtaagccagtgttctaagcgttttacatgtattaactcaatcatcacaacccctcaaggtagttactagtgttatcatttctgtttgaggcacagacaggaaatgtaactaactctcctgagatcacgcagtcaggacgtgatcaaatcagaatttgaacctgaggggtcgggttccacagcctcaacatggaactgtgctatgtatagccttcctccaaggttggaatgggcatccccatggtttggggtgaggtagacccaccggtgtgctgacaggagcaggggtaggagaaggcacctgccctctacccctatatcacaaacccacccctcgcttctgtgccacagggtgctgcctttgcttgttctgtctgccttgaatgctgtgacattcatcctcgtcctttccttcaccatcactttctgatctccaaaactaggtaaaattcctctattatgggcttgtatgacaccttgtacctctactcataggatgtcttatagacataatgttacatttatttacgtgagtgtttaattttctgtctgtcacctaagggaaagagctatgtctatttttactttctatattcagcacctaacataatgtgtgacctcataccaataaatacctatttaataaataatcgattcttcctgcaagatagattttctacccatcttatagatgaagaaactacactcagcaagtttaagaaacttgccccaagttccaatcccaagtaagtggatagagctgaaatttcccctgagccaactcacttcaaagccactacctttcagtggaaatccaaataggtgctgctatccccagaatgtgcatggaagccacagactggtgaggagacctgtgcaacatgcattggcccctccctagctagagtcttatggggactcactcatatctgatgacttgtaccctccttccttctccccatggggccctcatcttctaaccaaaaccctctgtgtctgccagggacttctcaactctttttcttggacagacggcactgctgagtttgctagaattccaaggatttggcacagacatggccttatccccaggaacgccctcccagtttccaagctggaccctcatattctccttttctacaggaatcatttccagggtcgctagctcttaatgcaatcatttgttcattcattcagtcagtcagttgatctgccaatacatactaattgttgaatggctatcatatcccttatacttaccttgagaagctcagaggcttttgcaggaggtgttagaacccataggatgggacctcacccccatcctaaaatgactctctttgaagacaattcctatttggaggcaagcgatctgcttagtctttgtgcagtttattgtgttcagagagggaacacatgaggagaaatattccctttcctaattgccaaatttaagacaggtgcttcctggcctgctcaaatattaaactcactctgtacatgggcacttacaaccgacaacaggcaggctgtgcctctgcagctctgaatctgtgcccagggccctgacagacagcagctggttcaggaaattcatgaggaaaatatccctagatgaattctgtggcatgtcctgcaagcaaaaacctgggaggaggaagaaagcctggcgggcctaagagagggttttgcttttttgccccccttttttttttgagtgggggctcacaggtaagaggagtcctcatgctcaaaataagaagcaggaagaaatatgtcagcagagggagggaagctttgaaatgggggtaggaagaatggtggggcaagagggagactggcatttgctggaaagtgggaaggggctggctacagtctgttttgttcactgtcacatccccaatgcttgggaagtacctggaacatatgtgtgaatgaattgagtgaatttcacagcatgtgtcatctaggattttttggtccctgagatagccataggtacatagcaggaggacaaatgtggtccaaaaatttggtaaacggtctactctgttccccaccttagcatattatagtctctgagacagaggttctcaaacttaaccacaccaaaaccacctggagggcttattgaaacacaaatggccaagccctgctcctggagtttctgattccatgggtctgaggtgaggctggagagtgaatttatagcaagttcccagctgatactgatgctgtggttcagagaccacactttgagaaccactgttctgaggcatcctgctgaaagaagcctgatggactgttaaatgaggcttttccaaagcattttttactctgggcccctttgttcatggtatatctggcaagacaatcagcacctcagtggggaaaggaagtctgaaagggtctgaggtgaacatttccctgagtaatagtgaatgggggggcctcatctcctcctggcatgtcccattcctccaggctcctgcaggagacagcacagggaatgcacaacccccacttcgttgagactggatttcctgccctaacctctggttctcacatcaacaccgtcagctctacctctgtggggctttgtggaatttgcaaatcagccccaggctgggtaaggggagaagctttgaattagataagagactaattgaagtggactttttaatatagatgctcctcaacttataatggggttgttttccaataagcccatcgtaagttgaaaataccataaattaaaaatgtatttaatacacttaagctactgaacatcaaagcttagcctagtctaccttccatgtgctcagaacacttacattagcctacaattgggcaaatcatctaacacaaagcttccattttataataaagtgttaagtatctcatgtagtttattgaaaactatattgaaagtcaaaaacaatggttatattagtactcaaagtacagtctctactgaatacgtattgtttttgctccattgtaaagttgaacaattataagtcagggatcatctgtacatgaaaacagtgacttgagacactaacagatctgccaaggtgtcatctaggtgtggaaagggagatctgattgacactgcttaagggcagtggtgagaaagaaagaaaaaaacccctgctgattatgtatgcaaaagtcgcagcacggtgctagagtgctaggcacatcatcagtgcataataaaggtgtgcttactctccccggggatgagattaaatcctgggtgcaaagcaagtcttgatttccatgctcgaagcacaaattacaaggatggtttttcaggattgttttggggatttgcccaaatgttgctcaaccaaatttcaaacgagggtggtctctttgacacaggctacttttcagatttcctgctcccctgcactccagcaccctgagtcagcagtcactttttgacaggaggcccagcaggtgctttctgagctgtcatgattaccttccagtgaaaacacactacgcttcttgctgccagtttggaagtgcaggcaacctcctgggaagatcttgaatagatttgcaaatgaga

SEQ ID NO: 1880964 - DNA, 4001 bp, Homo sapiens; identical to SEQ ID NO: 315500

SEQ ID NO: 1880965 - DNA, 4001 bp, Homo sapiens
gggaagactgtgtcattactttcgttatgtgctgaaaagcgttaaaaggcctggcttctaactttgtacctggaagaagtctttgaccaattggcttcatcatcgggtaaatgaggtcctggattagttgagtctaactgaattgaagatgttttagaaagtgccccatgagcacctccacccaaacttgtctcatttgttggctttcatggttgcctcaggtagggtccactggctgtaagcaaagaaacgaccctgggtaacttgagcaaacaaaaagtaaggaattagaatgacacaggttacatcatatgagccaaggaaacactgaaggaccaactcttgaggagaataagaaccaggccactctgtgggtccagacaatgggaactttggaaagtctttttggggtgctattgtggggatgaatcagctttgtttccaattttgacgccattatgctcaatattcagattcctgggaaagtgatcagttccatttgagttccacagccagagtaccttgtactcacaggggagggatagttaaaggaaaactaagatgctgttttccaaaggtaagagaagaaatgctgggttggtataagtaacagattttctaggcttagccagccaaggggactttcttaggcccttagcccaagtaatacactcgagtggaatgactatattgctgcttgagatttttttctgaaggaggaccactaggaaaatttgctttgcttgtttaacctttcaaagtgcttactcttgccctcctttttgtgtgtgtagtccacttgtgatttaactgtatgaaaggaaattctattgtgccagatatttggattctctcagtgtacctactttctatggagcccacacatgctacatacaaagcagcacctttccatgggcacagaagacatggatgataagcttcatttctcaggtaagctctgaattcttccagcctgtgaggtagaaggtgcatagactttgatattaagaaagaatgattgtgttattcccaccatcaaaattgtggttgtttatatccaggaggcaatgttaaatcctgattaacctttacccagtctcttccaccaccttgcctcactacaaatatgcgcaaagaatgttgagttataaaaagtatacaaatagcacataattagcaacaaaaatgtcatgcagtttttaatctaatgtaatcaaccaacaggtgatttttgttcactacattggattatcgatgctactgttctcctccgttaacacttataatcaagaagtgactgttattttcctgttgttacaatttacaaaatgttctggctaaaaacgttatgtggccaaccatagtgctttgaaaggcaagcctttaaaatcaaggacttatattcaatctgtggacataccccagatttttccattacaaaatgccagacactgaggccttacaaaggcagcctaatacaaagactaaggacgtggatcctggagtttgactgcctggggtgcattgtaatgattggctacttattagggaggataaagtttgtaaagctctccaaacagtgatgattttaccgtctgttattgttctttttctccagggactttactagacccacagatgtaggatgtggatgcttcttatcaccaaaatgagtggaactcagctgacacatccattatcaccttttatttaaacatgatcacttcttaatataaattttaatgttcgataattttaatcatacaatcaactaattcaaacttaggcagtagggttcccattcagatgccaggttttgcacaaagcctccctcagcttccccatctgaaattgaccttgcatttctctgacctccaggggatggggtctgtacccactcatgtcagtcatcccttcgtaccttatatttaaatcatttttgttggtgtcttccgccttatagtagacacacggcacctcagcgttggcatctgggtgtggttcctcattgtgctcccaggcacaaggcctgtgtcacctccatctcagacctagagggaggagaatatctggccccgtttcctgtgatttcctcaggccccctgccagagtgtgattagtaaatgcaagtcaggctgcccattctgcaaagaggccccgtttccccttgtgctaaatgggccatgcggattaaatgttccagctctgcaactcacctgcaaactacaatactcaacagagatcacagtttaaacaaaattggcctctatcctttatcacaagcagttatgggccatggtagattagcagagctctagtgatatagatcacatagagagaaagctttttttaaaaaaggtcaaccatatgatcgatctgaaagtctggaaattggaaggctgagctacttaaatatagatgcaattacatgtgatatccccattctctgtaaactgggtttttgccacatatccttattgttaggaataacacgaactataccaggaaatatatatgtcctaggactttaacaaatagtaatatctttaatttgtttttctagttttcaaagtgcttttcacactaataaggggaggacataggtttttattccttttttatttatgaaatggaagcaaagaggttatataagaagcccaaagtaacatagacaattagaaagtcagggctgggcatggtggctcacacctgtaatcccagcactttgggagactgaggtggggggatcacaaggtcaagagttcgagaccagcctggccaacatggtgaaaccccattcctactaaaaatacaaaaattagctgggcatggtggcacgtgcttgtagtcccagttacccaggaggctgaggcaggaggattgcttgaacctgggaggcagaggttgtagtgagctgagattgccctactgcactctagcctgggcaagagagtgagactctgtctcaaacaaaagaaaaaaaaaaaaagaaggactagaatttagaacatagactcattagtgcatttcatacacctagaaataagtacttagagaaaggacaggatggagtaaggaactagactctgaagttcaactagagaacattctaggacaagtaggtaggccagaggaaatggtgaggtagaagggtgagatgtctgaggttcagatgctggaggtggagaagttctgagtgccggccaggcccagggcacagccatctggaggaatgggataggataggtgcctggagagggttttagttattcagcaagggactactggcagccctctctgtaccaggcactattctgggcatagaagaatgatgtggcattcagatgtgtgtgaggaagccaaggcaccagtaacagtattttgtcacaatacagagaaatgcaatgataataataatagtaaacagtgattatgcttataatatgtgccagactcagtgcaaatcaacctaccgatttagttaccatttattattcctattttatacacagaggattgaggttgacaggttcacatttgtccctgatcacacagttgatcagagagaccaggaattgaaatgctggtggcttgggtttagggccctactccaaaacattagatgtctctatctgtaaatagatgatacataaacaataaggtaggtagatagataaatagacagatagatacggttcccatatagcaacaagaaggaaaggcagtcatgagcttcagtctgctctaaagtggctcagcttctctgcttctctttccttgactgcaaatgttgttttttgcgtgttcgttgtccttgacttcaggtgtcttagagctgtttctttaaactccggctacccttcaagatcaggattacccaataaaataggagaggagctattaaacttagatttcagataaaaaaaaaattatgcttccttagtataagtatgccccatgtgatatttatttgaaattcaactttaactgagcctcttatt

SEQ ID NO: 1880966 - DNA, 4001 bp, Homo sapiens
tgatatctttttgtaaaatatttcataatttctccaaaatataccagctttctggttttgtttttagagctagagactttgtctgctctcctgactttttgatattctttctttcctttttttttctttcttttttttttaaagatggcatctcattctgtcgcccaggctggagtgcaatggcatgatctcagctcactgcaacctcacctcccaggttcaagagattctcctgcctcagcctccccaatagctgggattacaggtgcccgccatcatgcctggctaattttgtatttttagtagagatgggctggtctcgacgtcctgactgcaagtgatctgcccgcctcggcctcccaaactgctgggattagaggcgcaagccactgtgcctggctgatatgctttcatttttcactccctttttaatcttcccctccattaccagttaacaaactactacagctgcctctgcaaatgatagaagaacaaaaattaggaggagagggggctggaggaggagaagaaagaagcagagaaggagaaggacttcatagaaactacggctgctttcaggcatataatgtgagatcttgagagagaattaaggagtgaatttccacgtaactttcaaagattgtaaataggctgcctctattttttgcaattgccaggcaatgacagtgtactttacttctactctcctctgaaggagcaaaatgagtgctctatggccttaacctctatttctctcttaactggattcaaacgtatgtcatgctttgagccttcattacgtaagcgatttttctcaaggtcactgggagcaccacgttcactgcctctggatggttcactgtactgccgtgcagccttgctgaccatttcatgatttggggttcatgttcattttatagactggatttttttctgttttacgtttcccattttctttgttacttagaattaaccatgaccagatcaattaataaaatagttcaggttgtcttattctatttgtgcatttggtttgcagttaccttcacaaatattctggtggctaatgaagttaaaccaaagtttgtcaatctgattttacataagctgtgtgccaaaactgtgttaggttcaataatgctcattttcttgtttaattttcacaacaactaagaatattatcagattcatattctccttagataattaataattaatcacattattattctcctgagaaggaggtgatactattctcgatttagacataaagaatcttaggctcagagaatcaccagcagattgtaattttgagcctagatcatcaatgtctaaattcttgctcctcttattataccattctactaatttatcaatgataaatatttgttaaatgcatgttgtgtgctaggcattgcaccctgttctttatttacaaacatatgagttattattatctctgatttgtagatgaagaaattgagtttagagttaaatgattgcccaggattatgttgttacaagtgcagaatcagtaatcaaattgctgtgctgtgtcctccagggcctgagttcctacattgccatgagccattaaaggtaagatgctaattaaaggtatccatgactaattttaatggctaacacaagtttggtgaaattgatttaccataatattttggttactttttagggctactcagatacacatacttgaactgtaacagcaaatagtgagaggggaagtaaagattctgagcctcctttctgggtttacagcaatattttgaactaagaagatgaagtagaattagacatgagcaaagctccatccctttcttctgcaggtgagaaagaaatagagggtgtaggaggtaagcatacctacctagtaagccttcatgatttaggtatctggagcaggtgggactggagcaattgccatgaagttcacaattttagtgtggcctgtgatctgtttctttggctacagcttacatatcaggcctggggatttttctggattctgaaggttctagcttccagccttgaaattattctcctacttgtaggtcagtaaaacaagcgtttctttacttgaaagttttaagtcgacagttgccatgataaatcactcccactgatagtgttttagactttgttggttctaccttacgggattttcatagagtttctaaaagagaaagacaagcactagagtgaagaattgttcttattgtggaagaatcatcaaccttggctggacacacagatcaaggggttcagggatgggtggcaaaggatcattgagagggttacatgtgacccttgcctaactatagtagttaattcaactctgcctacacaatgacacggattaccgaggatatgacttgtattatactcatccctctgaccccacatcctaatgttaataatgattcttaaacctggaattgagaactcaaatataaaccagtgcccagcacatagcaagtcatcaattaagtttattgaattaaattaaatattggaattgtatctgtcaaagccatatcagctctaagcttcttaagagaaaaatctgcccagaatttctcaggagggatttctcaacatcgaagctgtcctgttcatattggatttattgtacttacataaacaggaatacacgagcagggaagatcagatcagttaccacaataagggttttgtaccatgatatacatcattttcgctcccctaggaaagcactgctgatgaaaacaattttggagggaggtggtctcaacagagtagatgttcaggtggaggttatctctggtgctctgggcttcttattcataattttctcttatgaaagagagtggttttcaacttcacaattcctttgctcatttggaaatatagtagcagaaagatgaagagagtttgtgacccacaactaaagtctgtgttctcttgtcacttcatcaaattagttctggtggcatttggttcccccccagaaataaatcactgttaaatgattctttataaagcagtccacacatttatcataccacagtgatctgaacccatttagggaattataagctacagttggtcatgttgcaggcctagcaactctggccttgtcacattgcatctctctccactccctgtgctaccactaatccttcaggactgagattcaaggctttgctagtaagaggcttggaaataatcatataaaacataatagtgtggcaaggtgagatcgagcttttaatttttttaagttcacagagagcaagaagacagataggaaaggaccggcagattgggaaaaatcaggaataagatgaaatatcctcagaactttagcttttatgattccacctcacattcagtttaattatgaaatttactggcagtgacaattggcttttggcataaattaatcatgccaagcattatacatgaaatgaaatttcaatcctatttgttgaacattttctaagagcttggcaatcttgcccagcactttacgtagggtttctccttatctaccttatgaaatatgttattattattcccacttttaatatgagaatatttggggattagaaggcttaagtaatttgacaaaggtcatatgggctagcataatagactagaaaacaaactcaggatgctgtaattactacactggaatcattcttagttttttttttttaaatgaagttggcattagttttgttttttaatctttaatacttttatctgagaattgataattaaccattttaagaaaatagttacataaatttagaaatcatttggaaaacaggtaaaattgctacattatttcaatttattttatttttaaaataaatgatattttttatctatatttgagggctatatgagaacctaagacttctattgatgttaattattgacttttatttactgtagttttagtgaataatttaattgacttctattaattcagtcat

SEQ ID NO: 1880967 - DNA, 4001 bp, Homo sapiens
aaatttcaaaactatgctctgctgtttctgacatttgtaggacaggccaaggaattcaacagtcaatagcaatagccatttaaccaaagggaaaaaaaaaaccaacaaggagcttcctgagcaggggtgtgtgcagaccagtgccctctcaatgtctgtctccaggtctcatccctctctatgtctgtctcagctctcggtgggggagggctcccaagctgcaggatgacgacatgttgactatgcagctctgagtgcttaacattggacaaattccactgtcacagagctggcctaaggtggaggtggtactggacattctggcaggcattccacaaaggcacatgtcgtgagtctccaccaccaagttctcagagttttttggataattgatgatcacagaatacaaggtcaatatataaatgtcaatgctatttgcatatactagcaacagttggaaattaaagttaaataagcgataccatttacaatagcatcaaaaatatcaactgcttagaaataaatctgtcaaaagatatgcaaggcccatgcatgtgaaaactacaaaactgctgagagaaattgaagaagtcctgaagaaatggagaaattgacgatgctcatggattggaagactcaattttgttgagactgcaaatattaatactttgaagcttcaatttgctttacccctgccttgtctcactgtctcctatttggctttgtatcgtcaatgtctagctctgtgccaggcacaaaatagtttggtgttcactgaatacatgaacaaggaataaggattcaattccttatacagaatataggaataaatataggaagagatctcaactacctgggagtgcaataaaaggcttccttcaagatgcactaggaattctataagctgtgatgggagcaggaaccgaagtcctgtgaggagtaaaactatatttatctgctgtagcttgggggtcagtttgtgcaaaacagtgactgaaacacatatggcctgaactcatgtactgaaggactttctcacattagatatatttaagtagtggagttgactcattcaacattttaaaatatttgttgaacacctgctctggaacaaggcttgcgctcaacgctgggatcaaagtggtaaagacaggaagcatccctgcttcagctataaaactgtagttgctacctttgagagccatctttgggccaggcacaaaatcaaattctgtgtgtctttataacagcctgatgagaccgttgttattaagaacttcactaaatgtgaagaaatacacttaaactaagaaattagagtcccattttaaatgcaggccaaatgactgaaaaaaaatttagagtataattaaaaaattaaaagtacacacttaaaatgtagtttgataagttttgacaaacgtatatatttttacaccaccattgagatataaaacattctcatcatccgaaaagattcctttgtatccccttcccaaccactgatctgctttctaacatcgtagtgttttctagtgtttcttatagatggaattatacattatgtactcaattcttacttctttgactcagcatgaatttggtggtgcccatcactaattcatttttattactgctgacttcagacctttaggggagagaagacataaatcaaataatcacctaattaagtatttaattacaacagcatcaagttaacctaagggtaagtacaagtggaaatacattaccttgtttgttaacaattcaatcaatacgaccttggtgtacagtggggggctatagggtcatgattcagcttgtggaaaacaaatgaaaataaatgttagcgaagagtgactctaaagaacctctgtcctcacggtaatttttttaatgtgtcagatgctggtgggaggcattcttccttagctctttactcccatcccttacacttaacagaggaaaggatctgtaaggcgcgtacccctctactgcccactgtcgacgaaaacagcctcgccctgcaccgccaccgccacgcataaggcggtgtgtgggcagctcggacgtggcacctgccctcagctgctcaatcccgggcgccgcgacggtcacgtgcacagcggcaggcctttttgccccgcccccgcggcccggctcctgcgtgggcccggccccgcccacagcccgcgcagtcccgcgagcctggcctcggcggccccagcttctaaggagctcgtgagggccaggctgcgcctgcgtcgggcggctggtgggcggggcgagggccgctggggccgcgaagtggggcggccgggtgggctacaagccgggtctgggctgaggggcgcggcttcgcggtggaccccagcccggcaacgggaaggcgagctctcctccaccgtccaaagtaaactttgccgctccttccgcggcgctcccgagtcctcgccgccgccgggccgccgcagtccgcgaagagccgtcctgcgtcagggcctccttccctgccccggcgcggggccactgcgccatggacgccacagcactggagcgggacgctgtgcagttcgcccgtctggcggttcagcgcgaccacgaaggccgctactccgaggcggtgttttattacaaggtagggccgggcccggcgcttcggtcggagttgctcagtcggagtgcggcccgggcctgcggccgaggggcgggatccgggtgcggaggctagcggccccggctttgcttttccctcgtccgcctcccggccctcctcttgttgggagcggcaagcccgagtgcagaggccgacgctgaggctgcggggaggctgggtcgcggcttgcagccgccgctcctccacctgtagtcctgactggcaaatgcccaccgttgagccgctttggggggcaggtgttagatatgggtagttagtagccaattcttgctgtcacttgactctgatttacagctagcgggaaatggcctgtgatatatatcaaaataatgcatgctcgttaaataaacttaaaaagaataaaaaccatctcctgtcatagcatttgacatacagtcatgcgtccttagcgatgtgatattttctgagaaatgtgttcttaggccattttgttgttgtgcgaacaccgtagaaagcgcttacacaagcctgaatggtacagcctgttccacacctaagctgtatggcatggcctgttgctcctaggttacaggcctgcgcagcgtgttgctgtactcagtggtgtgtgcagttacatgcagtggtaagtatttgtgcatctaaacatagaaaaggtacagtaaacatgcagcataaaagataaaaaaaaaatactacaccagtgtggggcacttacccacaaaaggagcttgcaggactggaagttgctctgagttggtgagtagtggtgagtgaatgtgaaggcctgggacattcactgctctactcttgtagactttataagcagtgtacccttaggctacgctaaatttttttaatctttcttcagtaataaactaaccttagcttacggtaacccttttactttataaacttctaaattttcttaactttttaactcttttgtaatagcttaaaacgaacttattgtgcagttacacaaacattttctttatatctttatttggtaagtttttttgtttctttttttttttttattctttagttaaaaactaaggcacacgttagcctaggcctacacctcgtcaggatcatcaatattactgtcttccacctccaatcttgtcccactgggaggtcttcaggagcaataacaggaatgaaactgtcgtctcctatgataacaatgtctcttgaaatatctcctgaaggacatgtcagagactgttttatagttaacttttttttataaaaggagtatactaacagtacatagtatagcatagtaaatacataaaccagtaacatagttgttgattatcaagtattatgtactctacat

SEQ ID NO: 1880968 - DNA, 4001 bp, Homo sapiens
cgcagaaggttaatcgatggtaccagaaaacatgaataaggaagctccatgagcccttgtgtgtcttgttcatcattttgtaaccactccctaggataatgtggggaacagagtgggtacctaataaatactttttgagtgagtgaatcagcaaatggatgctatggttctgaatctgaatgtaaatcattcccttcttgtgccaactcctttcctaacaacctcatcccagcattcctcttccatttgacacccaccttgaccagacccagcccaccataccctggattcaggaccaacacttctagaccatcatgtgatgaatatggtggcccaattcttatacagagtcagcgaggattgcaaacaatatgtcactgccttaaacctgaaatacatgtcttaaaaatagtcactcattagcatggaagtttggctattaatatcatctgacaaattctcttgtctaaaagtctgaagcctcacctcactcaggcaaagaaatgcgattgaaataagtattgcatttcccaaagaaactgctatccagtttaagaaggataaaggagattacctaccttctctcctgaaaatcctcttgctccctaaagttagaaagagatcataagaattgagcttgaatgagatttttaagcccttgtttcatttaggaaaccatatgttccctggtttgaagaaaatgcaattacaatattagatcaaaatgaagatgccttgtctggcaaatgtggtgggcattacaacaccctggttattgctaccctcctttgcatggaacctggagaaaattgcactttgcagttcctcacatagtaggaatgaaagggaacaacagtggcctacctcttattaaaatgatgatattttttcaaacaaaagtgagaatatatcggctagcaagcatgataggagttcaaggaacaacaggaaaaatgaattgaaagagtaatttgataggtatacagaacatggtcattgtggttaggaaaactgtctttaggattcttagattgtagaatttttttcttttagtttattaaggaagattctccaatcctggacagttgagggacatttaatgcaaccagccaaaaatgtacctgtatccctttagcctttaaaactttagtgttctcacatagacacagggaggggaacaacacacactggggcctctgtcggcggatggagttgggggaaggagagcatcaggaaaaatagctaatgcatgcaggccttaatagctaggtgatgggttgacaggtgcagcaaatcaccacggcacacgtctacctatgtaacaaacctgcacatcctgcacatgtaccccagaacttaaaattaaaataaaaacaaaaacaaaaaaaactttagtgttctcaatcctacttccaaccaccagcacctgtcactcttttctgagggttttttcagggaccagggcctgctctacccacatgcaagacagacccaaagtgctaggaactaatacctcctggaagctgctgttaactaattcttgatgggatttggtgtataaataccacagctccctcatcccttaactggggtacattgagatgcatgttcaactctgggtgccagagttcttcagtatgattaagctccatctacccacagtggtgatctgatttataatgtacccttttcaggcctcctttcctccttatctcacttctttacttccccactaatgcttactagaattatctcccagtaaaatacttgcaattgactctttttctcaggctttacttctggaaaacctttaatctgagggggagctaagactccatagctatgttgaagagttatgattttcctcaaactcaagagatgaagccaagaaagagaaagaatcccacagcttaaggtcacactcaccttaggtcccctcataccagggcatccttcctcacctcggagtccaggaagacctcaggggcctcgttctccctgtggaagaagaagacacatgaatgcactcaagcaactgtctctgtcaaagcaattgtttaaagtacaggtctttttcaaaatggagtctcttatgtcttccctttctatgtagacacagtaacagtctgatctctctttcttttccctacatatcccccttttcgttttgacaaaaccaccaccatcatcatggccccttctctctggtcggtcgctgtctctctggagctgctggatacacctgtagactaacaacagaaaagacagacatacaaggattaatacaaaatttgcaatagtggaatttccggtggttttaacccaagtgacgggggcaagaggacggtgtgggtgctgcggcacccaggcagtctcccacctcctttgtgtcttagttgctgtttctcatcgttttcagtctttctcctcacctgatgactcgcaccttttatctctttgtctcccttctcttatggtctctctctctctctctcttttacactatctctctccccaatctcactttctgtgtctgtctctgatctctgtctctttttctttctattcttctccctggctctccacatgtgccgttttcttggtggatggtaacttcatctgttcttctgatatcaccattttgttcaccctgcgagtcgatgatgcttgattgcgggttttctgtctctgcggaggcactttcatttgcatctctgatgggttgattgtagaacttcaaatgtctagtgggtatccaaacaggaagctgattttctcctggtgaaacacaagcaaaacctctcccccatgttatcaccttacctatttcccatgttttgtttttgttgtcttccaccaaatcagttttccctcatgtgggctgttctttttaccaggaaaatgttctgcagaagtagtggtctgatttctctgtatgtttagaaaatttaaagtatagagtgttagattaagttgcatctggggagtgttatactccttactgtgtttttcctttttttgtttaaccaattgagctttgagtgttctaagcaggacaggtaagatctgcatctggcacagccagccaggtctccttaccctctgcttccctttctgcctgtgactgaatgggtatgtcagggtctagtagaggatccaggaggaggaagcctcattaacttctattctgcagcaattgatggccaccgaacttgaacagtgggggcttatcacctcatgtactaagaccggagatagctgatgccaaggttggctaaattagtagcttgagatgttaggtttttcatttgaggtttctatgctgctattgtcttctgctcttggtcacagaggctgccacaatccgcatgtcaagtcctcatgtgacaatatccagagacaacaaggaagaggtacagtgtattcctccatgtttcttaaaaaaatgtttttgatagagaataattgtacacatttgtggggtccatgtgagattctggtacatgcatgcaatgtgtaatgatcaaatcagggtctttaggatattaatcacctcaaacattgatcatttctttgtgttgggaatatttcaaatcttattgctatttagaaatatacaataaatccatttatcaggatacaaaatctatgtacacaaatcaatagcagtgctatacaccaacacctaccaggctgagaatcaaatcaaacccttttatgatagctgtaaaaataaaatacttaggaatatacctaaccaaggagatgaaagacccctacaaggaaaactacaaaacactgttgaaagaaatcatagatgaaacaaaaaaatggaaacacattccatgctcatggatgggtagactcaatattgtgaaaatcaccatactgccaaaagcagtctacaaattcaatgcaattcctatcaatataccatcatcattctttatagaactggaaaaaaataatgccaaaattcaattggaactaaaaaagagtct

SEQ ID NO: 1880969 - DNA, 4001 bp, Homo sapiens; identical to SEQ ID NO: 315507

SEQ ID NO: 1880970 - DNA, 4001 bp, Homo sapiens; identical to SEQ ID NO: 315514

SEQ ID NO: 1880971 - DNA, 4001 bp, Homo sapiens; identical to SEQ ID NO: 315517

SEQ ID NO: 1880972 - DNA, 4001 bp, Homo sapiens; identical to SEQ ID NO: 315543

SEQ ID NO: 1880973 - DNA, 4001 bp, Homo sapiens
cagccagaactgggctctgctgtctgaggcccctctccaacacaaggctggctgaggccagggcagacgtgaaaagagggatagactgtgccaaacactgtcctgagtgctgggtgcttgggctggagtcatcccgggattggactgctgggtttgtaggacccagcatagagtggtcagtgtggccgccagaccccactcctgacttccccacccaacccccagccctgttaaggccgctggagctggagaatgacactgtgggcatcctcgtcagcacagctgtggagctcagcctaggcaggcgcacactgaggccagcaggtgaatgtttgggacagaggtggggaaacaggcaatggacagggtactgcctgggcaggtagcactgatggtcccttgctctcccccaaagtggtgggcgtcaagctggacctagaggcttgggctgagaagttcaaggtgctagccagcaaccgtacccaccaagaccagcctcagaaggtatttgggcaggggcgggggcagtaacccagcagtgcccttcctggagtcccctggaacccccaccaaccctccactcagtggctccaacacctacatggaggcagggccagctgcagatggcctggggaaccggatgtatgaaaggtgatgggagggaggaaaactggtgggtggcttacggtcctcactctctgcccagcagtgcggccccaacagccactgtgagatggactgcgaggttaacaatgaggtgtgtgtgccctgaacctaccctggaccctagcttaccccacttccagacttcctagtcccagccgcgactcccagcacatcccttggcctgtgggtctcaacatccccaccctgacttcacagccttcccaggactgggggagtgatgccccccaactctgaaccactggactgcctgcggtggaaggtccggggcccagcccctctccattttcctccccattcccttcctcctaggacttactctgtgtcctcattgatgatggaggattcctggtgctgtcaaaccagaaccatcagtgggaccaggtgaggatcaggaagagagtgaaagaagagagtagggatttgagccttctaggggtgtagcactgccagccctgtgaccatggctttctcctgacatcctcaggtgggcaggttcttcagtgaggtggatgccaacctgatgctggcactctacaataactccttctacacccgcaaggagtcctatgactatcaggcagcctgtgcccctcagccccctggcaacctgggtgctgcaccccggggtgtctttgtggtgagtccccagagatgcctggactggagatgggggggactgggagacctgcccacagatgaccccctacctctgacatttgataaagctgggggtgacctagggcgaggggcagcagtggcagtccacgcccctctctccactgcagcccaccgttgcagatttccttaacctggcctggtggacctctgctgccgcctggtgagtcctgagcgggaggtgggtagagaaggtgctccctggccgggagggctcagaagagaagtagggcatggcatcgtcctctgctgaccacctgcactcggctccccgtgcgctgcaggtccctgttccagcagcttctctacggcctcatctaccacagctggttccaagcaggtaggtagggctttggaggcgcctcctcaagtccgggtccccaatctgagctaagacgactccatggggagggtggggtctacgactgagggaggccggagaccttgccagggtctgtgggcggagctgaggcgctctgggccctcgcagaccccgcggaggccgaggggagccccgagacgcgcgagagcagctgcgtcatgaaacagacccagtactacttcggctcggtaaacgcctcctacaacgccatcatcgactgcggaaactgctccaggtgctggcagtggggcgggaccagaggccaagggcggaacctgtgagcggggcgagacgctcgggaggatggaaggggcggggcctccgagcggccgggggcggggccgcaggatgggggtgggtcagggcggggcaaactcaacgccccgcctttccgggctgcccgcaggctgttccacgcgcagagactgaccaacaccaatcttctctttgtggtggccgagaagccgctgtgcagccagtgcgaggctggccggctgctgcagaaggagacgcactgtatcctgcccccgccctccccgccgcccgctccccctctgccccgcgcgccccctccgtgccgccgccgccgtccgcctccttgactccccacccatgcccagcggacggcccggagcagtgtgagctagtgcagagaccgcgataccggagaggcccgcacatctgcttcgactacaacgcgacagtgaggagagggggcggtggacccgaaatcccgcggccttgcgcccgcccaggccgaccagctccttgtctctccccgcaggaagatacctcagactgtggccgcggggcctccttcccgccgtcgctgggcgtcctggtctccctgcaactgctgctcctcctgggcctgccgccccggccgcagcctcaagtcctcgtccacgcctctcgccgcctctgagcaccctgccccaccccacctccactcccacctcacccggcctcttcgcctttcccaccctcctgccccacactccccgccttagagcctcgtccctccctcactgaaggacctgagctggccaggccctgagagtctggtctgcgccttgggatggggagtcccaaagcgggacgccgcaggtgtttggcacccaaatcacatctcacctccgaactgttcaagtgtccccagacccttcttgcctgctgggctccccccagtgggatgggacagggaggccacacgcactggtgccaaaaccaggcctctgctgccgcccttcctggaggctgcctatgttgggggggaccctgcctcagctgacccggcctctctgccccacccaagcccaaacttggtttctgtgagaatagtggaggaaggtgagatggccagtttgaagcctgtgcctcccagcttaaatcctagcaggagagaggctctggggcagcccccatgggctcctgcccctttcaggcctacagccacatccccaagcccaccaggtgtcaggatagtcacagtgataccagttcagacactaccccatatacacctggaacattgaggatggaaactggactcacattcgacataccccactgggcacacgcacaaacacacacactatggggtggggtgggtgtaggggcttacaaagccttacacagggcgaggggttggtgggagggttggcacctgcacactccatctcctgctcaccacctgcctctaatctgagctgcagcctggctggtcctcccatttctaaagctgaatgtcaaacagtgccaaatgctggggcagggggtgaagaaccctctgtcccacccctagccaccagtgtcctccaagtgccccctcacctctccaggtgctcattgtaaccatttctcactagtgtcaggcccccagtgggaccacatgccactgcctgcacctttcggcagaggaacccccaccagacatcaccctttgccttagcaggggtgactttgtctctcctggctgggccatccttccgccaatctggcccttacacactcaggcctgtgcccactccctatctccttcccacccctacacacacactccctgcttgcaggaggccaaactgtccctcccttgctgaacacacacacacacacacacacacaggtggggactgggcacagctcttcacaccattcattctggtcatttcccccaaaggcatcccagcctgggggccagtggggaactgagggcaaggggatatagtgatggggctcagatggactgggaggaggg

SEQ ID NO: 1880974 - DNA, 4001 bp, Homo sapiens; identical to SEQ ID NO: 315560

SEQ ID NO: 1880975 - DNA, 4001 bp, Homo sapiens
tcacacagaatgacaagaaaaaaggacacgtcctctttcctccccttcctcctttttgcttttaggggaaggctaggatgacattgagaactcacacaaattttgtttttgactcctcagtgtcccctgggaaaaggtgcattggcctttgtgtacttgctacaaggctgtgtatccttgagagcaggactcggatcttatttatttctatccccgtttcctagcaagtgaacatatatgaacaataaatgttatcaagggagagggcaaatttccctccctgtttcttctgaattctgaagagattccattgttagaatggtttcttactgcaaccatcccattcacagtccatcagcgaagtcttgagagtatgatgcctgtcatgagccactttcactactaaataaattccgtccctctgttaagttcccggctgttaggacacctctgccttcagcaccgtttgacccttctatcccattttctctatgcaatgttgctttaactgttgttcaagatcccaggatgcttgatccgggaaagcacagaggtctgctgccaacataccaacatacctctctgtcaagttgtccaaaatcacaagagaaagagccctggactagagctaggagacctgagttctcggctgctctgttactgattagcgtctatgtccttggacaagttgcttccctttttccggacctcggttccttgtcctagataggttctaaagtcggtgggtccttacagtaagttaggattctaaggtgcaatccaaaagtaaaaccagtggtcagtatacctctgagtagctgttaaggttacaatacgaggttcctcggccttccctttggtagccaatggatacggcctcagtcagaggccgtcaggtttactgggaagagccttccggttttgaaagacaggatctccgggtttccagttctgtcactcactcggggtaactttgggcaaattctctctggacctcctaatagggaggtcctcgtcaccccgaggaagttcgaagacgtgggcagtgacttggaaagcttcccgagattccccttctataacctgggtggctcagaccgggagcggggtcccagccggccggtaattccgcccggaggtgcgcacgaaacaaacctgcagcgctggccgagggcggctcagcttcggagggcgcgactccgggtgagttcttaaagggaccgtcagagtttgggtaacacctgcgatgctgaccgggcggggacgcaggcttgagggaaatgaatgaatgaatgaatgagcgaatgaatgaacaaaccttctctgcccacccttaagtataccatactcggaattaatcagttaggcttaaaaatcttgtactataaccctcaaactcttgccaagttaaccagtgtctctatttcatatgtccttctgtaatgaaacccctccccccaagcctattactaagggacgaagagtaacttaacaatcagcctggagtggaaggcaatgcagagttggcacccctccccgaactcctccctctccctctcccaggccccgccctccccgccccctgggaggtgcagttggctcctccttaaggcggcttttccccggtggggatctacccccggggtcgccaggcgctgtctctgccgcggagttggaaacggcactgctgagtgaggttgaggggtgtctcggtatgtgcgccttggatctggtgtaggcgaggtcacgcctctcttcagacagcccgagccttcccggcctggcgcgtttagttcggaactgcgggacgcgccggtgggctagggcaaggtaaaggcgggctcctccagggccaccccgggccacctgtggagtccgagtgttaactcctttgttctcagagccacttcagcggccgcccttttaagcgaagaggttcccttaggatgctccccgggtaccccttccgttcccctgccctcccccgacccgcctcccccttccaacccgaaggtagcagcgcggggagcccggggctcggcgcgagccgcctcctcacttcccattggctgagagcgccgggaaagcggtcacgtgggagcgcggcaggccagctcgggggccgccatcttggcggaaagtttcgggggagagcggttgggggcgcggaaggaggcgaggttccgggggtggggcgtgcggcagcaactgggcgagcgggccggggggccgcggcgagcgaggaggcggcgcggccgagaaggaggacgaggccgcgggggtgcggcggcccaggggagctcctcccccgtcccttcgccccctccgctcggctccgcgggccccgggcggggcgggggtacgtggagcggggccgggctggggagctgctccgagtctggccggggcgcaccccagttccgagcgcacgccgctcaccggaactttgtggcggcgccgcaggtgtgggggcccgcggaggtgtgcatgcggggcgcgagggcgtcgcggagagcggccgctgccctgtccggcccccgctggagcagcccggaggcagcgagcaaggagaaaggcaagcgagaggagggggcccgagcagggcgggcggccagtcccgctggtcccctctcagcgctctgcggccgctgctggctcaggggccaagggtcggagcgcttcacccgcccgtacccagtagcaggtggggagtgtggatacttgtgcgggggaagaggcggcctcaggtctaggctctttggggaggggacgctttcgaggagagtttggaagccgacttctgtctgttcttaatttggaggggtacccactccaaggaaaagctttccacgttgacagacaactgctgcgttttgagactctttctttgacttggtaaaactttggaacgtggggttttcaaataggctgcgagggttttctatttcgataggggaaaatgctagtttaacatgattctatcctttttcctttccgttgtgtgttttaaaggtgtgtgccctcttcctgattctggagaaaaatgccggtccggaagcaaggtgagagtttattccgtaactctgttgtcgatgtcacttgcttttccgtgtgtcagttttttgattgccgttttagaatcgtttgtgtaactttgatgagacagcacggtcctagctttattgcttagggaatctaagcctcatatcatttcagaagatggaaacacgaaaatgtttgttaaactttcttaacatttctctagtgattaagagaggcagttagcccccccccaacagatgtccttaataaccctgaattggtgttttagtatttcactctatcattcttactaagcactattctgtaagcaactgtgggatactaagaatttgtattttgaaatgttaaaaatttggattatgatgacaaattgtagataatctgcttttgcattatcaggtaatctgaaactgttgctaatactttgatcttttactttggcaaactaccagtacacatttattccaaactgctcactctcctccgttttctaatgtgatatatgtttaaatttttcttgtatttctttaatttttttttttattttttggtcattctaaggaatatgtgtacatgaacatagtgacatcaattgacctgaaggatttgcggaactatttagatgtcatgcagaattatttgcactagtatgtgatactttttttgtaaatagagagttttaatcaggctctgctttttcttctcagatacccagagagcattgcaccttttggaggaatatcgttcaaaactaagccaaactgaagacagacagctcagaagttccatagaacgggttattaacatatttcagagcaacctctttcaggctttaataggtgggaattaaaacttcgtaactattatgccagctaggctttatgctcctctcaattcatttattttaaacttaagaaaatgatgtacttaattctctg

SEQ ID NO: 1880976 - DNA, 4001 bp, Homo sapiens
tcccatggtcacctctactatataatgacaccttatccatctccatggacacccaccgtgcctctccccaccagcaacacagtcaacagcagtgcctctcccactgccaccgccatcatggagaactgtgcagggcaagcatctttctcccgccccaggaacaagcctgcaagggacagcaggtgctaactgctaaccgagacatagtgacaaaaatccagccacagagataaagaatcaggttcatctgtagctacatccagtggagaagttctgctcttcaactcctctgctaagccacatgtgtcagcaggtgtaggtgggtggatgcccagcatgggggtgcgagtcgtgcttttgataagctgcatggagggacagcgatggtcactggaggctgggtttacaaagtgtctctacagtctgtctccattcctcctggcatttgggattggttagaacacacactgtcccctgctaggagcctgaaacctagcacccatgagcactgaaagaaaagagagagagggaggataatagaaagggatgaagactagaaaaaggaagaggaggaagaagggaggaatgaaggaaggaaggaggaaggaaagaagccaggagtgaagaagggagggaagggagaagggggaaggggagggaggaaggaaagaaagaaggaaggaaggagaaagggaggaaggaaggaaggaaggaaggaggaaatgaaggaaggagggggaagggagggagggaggagggaaggaaggcagggaacggaagggaagggaagggaaagaaggagggaaggagggagggaggaagggaggaaggaaagaaggcaggcaggaaggctatctttagttaagacttggtgacccaaacatctaggctctttattggtgtggttagtaggtggtttagcatggttttgatcttaattggagtggggtgaggtgaaggtaggaacagatattaatcagtattgtgaattgctgtttctatatatgatccaacaccagaacaagaattaaaggaatataaatgcctaagaatatttggttacctcactcacctgattcgttttctagggctgttacaaattattacaaactgggtagctcaatacaaaagaaatctcttcccccagttctggaggccagaggtctgaaatcgaggtgttagtggggccgcactccctctggaggctgcagggagaaccctcctggcccccagcttccagctgcgtcagtgtccatctcctatacggacatgtgtcactggatttagggcccactcagataatccaggatgatctcatctcgacatccttaatttaattacatccgaaaagatcctttttccaaataagctcacattcagaggttccaaggattaggataggaacatatctttttgggggccaccattcaacccactacagtcagtaatcaatatttatcatcaattcctatttttcttaccagaattgagtggaacacttctttggatttgctgtccgctgcagccttggccctggtttcacatcccctccctcactgactcgctgtgtgaccttgagcactgtgtgtctctgagcctggttcatccaagagtttaccgacggccctcgtgtgccagccactgtcctagacagggacagactttcccgcctttgtggagcttaccccggaagacctggccagataatgggcacaaaaaaagcaggctcttgtccccaccccagcctgcctgaaccccaccttggcctcctcttgcctcagctgctgcccagccatcggccgagtggacatacccaggacgcccttgcccgcctcccccaccacggccacagacctttgtcactcaccaaggctggaatcccgtggctgatcctgcctctgccctttggctcccgggactcagcccacaccacctgggtcacagagcatcccattcccacacaccgttgtggccacctcaccagcaggggcaggcccatatgcccaggtttgcctggtgaggagctgggggcgggggtatgccccgccccgggagctgacgtcataaaaggagctctggagggcagcccactctggcctggccccacagcggcagtgtccctcccctccccccactcctctcagtgggggcccctccagtccctgagaattggtactacgaaaaggtgaactcctgggcagaatcttgcctagagcttgcggagtccagccaggcccctgctgaagggccccagaccaccggccacttctcccccgtccatctgaccagctgggcccctgcgcccacctggcctccacgttccctctcctctcacccacacccctggccatggctaactactacgaagtgctgggcgtgcaggccagcgcttccccggaggacatcaagaaagcctaccgcaagctggcccttcgttggcaccccgacaagaaccctgacaataaggaggaggcggagaagaagttcaagctggtgtctgaggcctatgaggttctgtctgactccaagaaacgctccctgtatgaccgtgctggctgtgacagctggcgggctggtggcggggccagcacgccctaccacagccccttcgacaccggctacaccttccgtaaccctgaggacatcttccgggagttttttggtggcctggaccctttctcctttgagttctgggacagcccattcaatagtgaccgtggtggccggggccatggcctgaggggggccttctcggcaggctttggagaatttccggccttcatggaggccttctcatccttcaacatgctgggctgcagcgggggcagccacaccaccttctcatccacctccttcgggggctccagttctggcagctcggggttcaagtcggtgatgtcgtccaccgagatgatcaatggccacaaggtcaccaccaagcgcatcgtggagaacgggcaggagcgcgtggaggtggaggaagacgggcagctcaagtcggtgactgtgaacggcaaggagcagctcaaatggatggacagcaagtaggcgctggccacccggccctgccttcccaccaccaccaccgtgcatggggcagcaaacacgtggggccgcagacatagcctgatggttaataaatgtgccaagtgagttcatggcatagctttctcagctttgtggggacatggggccagctccagcctagtgaacatgaaggagggagtgggtgctgcctccagggcctgggctgtttctatcaggaagccaggggtggttctgcagggggactgtcatctctcctgtgcccaccatctgggttgacaaataacgtggctgccctgtcctgattacctcaaacccaaccctgacccctatccactctctactgctggcccctgccatctgcacaggccttgctgctcccgttctcagccttcccctttctacccacccgcataagttcttcccgggacagctgtgccaaacccacgttcagtcacgttgcctggtagctttaaatcaggctctccctgcgctaagcataaggactgcacatctcatcctcaccacaagggcctggtggcctgggcccacccacctgccccggccttctgtctctggtctctgacctcccaccgtgctggcctccccagttgttgcactgcaccacacaccctgcagccccagggcctttgtacaggccacgctccctggcgagtgcccactcatcttcaggcctggcatccatgggtgggggcaggatcccagggagcaggtctcagccacgtggagccagaggtttccccaagtcagagccaggctgaccccctcggagggtgagtgagctccccgtcacgggagggtgccggtgctaaaaaggaaaggggactctgtcctgatgacctgagtcctgctgagtgccaatctttaaaaagtatgtattttaaaagtaacgttttactttgaggctgggtgcggtggctcacgcctgtaatccc

SEQ ID NO: 1880977 - DNA, 4001 bp, Homo sapiens; identical to SEQ ID NO: 315573

SEQ ID NO: 1880978 - DNA, 4001 bp, Homo sapiens
ctcatgagaggcaactgtgtgcatcgtgttcgggctccacgttcagtgacatcacattggtagtttgacatcagccatgataaaagtatttacaccacaaaaatcagcaaaagctacaaatcagggctttcccccgccacccgccccctccctccagggctgactgttaaacatttcctaccacaccacagcagatatgtacatatatacatatgtacatacatacatacataatttcacataaaaggcaccatgtcatacatggtattttccccttcagctgccaaatgttagctgcagacagctcacagctgagtctctctccaggaattgccctaagctgaagggaactgccgcaccccaggtctgcttccctccctagggcaacctccttgcaactactcctcaaggccaagataaaaagtgaaaaggccagactcatcttaatgcagaacaacttcagctccaaagctcctccgggttcagctgggacttctgttgcaattgcattagagagagagggagtgagagagggagagagagggagagagacagagagagagaaaagagaagagagaggagagaggagagaggggaaaggggagaggagagaggagagagacagagagagacagagagaaaagagaggagagaggagagaggagaaaggggagaggagagaggagagagacagagagagagagagacagagaggagagacccatttgtccacaaccaacttctctcttcatctcccatcttgagttacctatttcagttcatttttgatttgcttaaggttctttctggagtatttttctcagatgggatacctggataatatacttttctcttttcagtgactttattttaatgagttttcagacttacagaaaggtgctcttcagatggggctgtgtcactggtcaaccatcttcactgtggagtcctagtcactacgattttgtgttgcatatcatgaagattcattcaaattgtctcctcttcctttccttcataataggttacatggtctgaaagtacatccctccttctctagtacattgtattcaaagaggttgctgctgcttctccattgtcattaatcttctcatcatcttcttattcctcttagcacagttggggcataatatgttatcttctatgcctggggatgggaaaatgcaggcaggtaacaagaagagagaaatcatcctcctgtgagtggtaggcacccaggcctgatctgcatgaaactgcaggtgtacccagctctttgtgtctgctgagagacgtctgccatggaccacacaccacctgacatcagaggtttgcatccaaaaggcctcaacagaaacaggaatggaacatgaatttacagcctttggctgaacagctcttgcaccaattcttgcccatgatgccaacatggatgcctgcactgaagttatcacttcaactatattagtctctctgttctttcattcatctcataacttttctgaagcctcttgctctctcggtcactgccttgtgttttctcgagcatcgctgtaatctggtcttatgtgatgtttcaggcgtatcttgctgttgttcagggaaagcacgcctacggagcctcagataaacttctattttcttgccattagcactcaaaccaagttgttgacaccagtcccgctaagtgtcccgacacaccttattaatgggaggcaaagtggtcggcaagggaagggctggtattttgcaccagctttttgtggagctgtaaattgttcatgtgtttgaagtgatgaccttgattatatttcttaggcttctccagtttgacatcagaagttgaagaaatacttggttccatttgttccatatttgggtcatctttaactggcaccagtgtcaaaatcacacttccctcatcaactacttcccccctcaaagaaattcttcttgctgctatccaaatttgagtctgacattttcagcaacacccctgtcttgtccactcagtgatacgatttttaaaaattaggccgggcgcgatggctcatgcctgtaatcccagcactttgggaggcctaggcaggtggattgcttgagtccaggagttcaagatcagcctgggaaacatggcaagacccccgtctctaccaaaaaaaaaatataaaaattagacaggcactgtggcgcgtgcctgtaatcccacctactcgggagggtgtaacttttctttttcccctggccagcaaaaggtattttagctggctcaagtattttatagacctcattcccctatttccagcttcccgttattataggtgagaagtgtgacactgtctcttttctgtttcttggtaattaatgtttttctctttgtattaaagggtgcaaaaggttctctttttacctgctattcaagaatttaatttggatgggtttaggtatgtgactttcaggaaccccacgagttctttttaaacctcagacccaagtctttttcactcaaagaaattaccttctatcatttatttaatgattctctctttcgtgtgttcatttttctctttctcttgcaactcctattaggtctcctggatctagcctcctagtctcctcttttgcccttaagatttccacctctgtgtttttgttctatatttgggatattcttgcacttggccttctcagcctgctttaatgtatccaatgagtattttagtcaaagctccaggaagtctgtgtttctttgtttttgtttgtttgtttgtttgggatactgtggttgaatgtccttcttgcacttctgccctggctgtctattccagcagtgtgatttccatgaagggctgttcggcggatgcttcctctccctctcactgcccactgaggccctgtagatgcagagttgtttttttgtatctgttctttgaagttcaaggccagcttctgggggttctttcagtgatcacagtcctgtgagtggtgggagggatggcccctgtgggccattagtgtagctggatataaggggtcagtcccaattaaggcacgggaaggaaggaggcctctcagtcccaccacgtccccacgttcagcttctcttcagcaatctgagaccaggaaagcccattcatgaatgccaaggtagccctttccatgggtccacgagtctaaaggaaccaagcgcagggcctgccacaattacagcctcatccccaagctttccacccactgatttacagaggagaaatcccctccccagctctcttcaccgggccaagatttgagtagagggccgacagggcaccatgtaatgaaaatctctatctcgcccccagccctttcatagacatccaggacaccctggatctactgtccctggcaaatgcctccttaacttctgagatggtttaactctttgttctccacatctcaaatccaagacaccctggcgaatgcctccttaacttctgagatggtttaactctttgttctccacatctgatttctttggatgagtcattcaaagttatgtgcattaatgacagatccttgaacaattagattcactttaaaattgtgttcattgggaaaacaactgggtgaaaagggcagattacaaagcacgtgtgtgtgtgtgtgtgtgtgtatctcccacatacacggatatatcacatatactcagaaaaatgttggcatggacgaacaccaaattgttacctgtagatgatgaagttataaatacttttattgtccgcctttttcttatctaaattgtgtaatatttcttgtttatgaaagacaaaagagcctgttcaattgttaattcagcaaaatgcattacaaaatgtcatttgactcttacaggtattttcagagggtgtgaggagggagatggcaactccacctcttcgtctcagtgtctgtcaatgagagcccaccttgagagccccacgctctcagcaggctcaccaggctgttagtaaccggtagagaaa

SEQ ID NO: 1880979 - DNA, 4001 bp, Homo sapiens
ctgttctgtctcagtgtgcatgggtgatttcgtggctaattagccaacctaggatccacttaaataaaggcacttgtaaaggtaagagcatggctactctgcaagctttctaaaagacagtttctaagaagtgcaggcttacgcatgcacaagctatccaaagtcggatgtgttttctgagataaactgaagaagaaaagtctaaatcaaccttctcttcaaaataaacaagacacatcaattcaagagaaatcacatacccagaaacgtggcatttttgccaaatacatatctacaaactatgtaggcaagaagttctgagatgccactgacaccctggccatgtgtcaagattgaatctcacatgaaagaaatgaaatatggaaatgtaatttgaaccctgaaatcgaatttttcttacaggaaaaagtaaagcctcagagatctatggatggctttgtgtacttatctaagccatttttctataataaagtattcacatttcagaaaggcaaaggtgaagcagagtaggagcaaaatggcaaaaatgtttacatgttcaaaatattctggtgtctattcataaccgcccaggagcagaaatcgaaaagcagaattagatctgttttctctctcaggtggttcgatgatgattccgctgaggctacagaattcaggtgaaacttctccagccagtcaagaggactaggcaatttgtaaagacttagacttcccgtgagctcctcgctaatggttgacacggtgacaagaattatctcctagctttcatgatttctaatccggaatgaaaccatgcccatcctgagacgatgcgtttgagtcaccttcctactaactcttcagttctctaataaggggactagcagctaagtggccgagcactcaatccttcatatactcatctccccagctcctcacttcggcagacgagccaggatttgcctctggtcaaacctgtggaataaaccactccgtccgactcggcgatacttcccccaaaaaaagaaagaatacatgtgcacgaactcattggtctctacaaagaaaaaaatgtcaaactcggtgttcgacaggatttcattcacaaccctgtcacaaagtggtagtcattagccaattactcttaaaacagaaaaataacgaaaacacacacataccacgcgcgcacacacccaaacctgggggcgggggacaaaaatctgtcaggcgctgaggaagtaccgggtggagagcacacccgccccggtcgcggtctccgctcccgggctggcgctccccaaggactagctggggactgcgttccgccgcgctccgcccgggacagcccgcagcccccgcaggtgtctgtccccacctcctgccccccatcccttcccgggctcgggccgcggtgtccgcaccaggtccgaggtggggcggggcatactgttgtctgctctctccaagcgttccggagcgcgcgggcgccacttacatgcccagccggagctgtagggcgcttcctggcggccagccggcaaccgcccaggcagaagcaccagagccacagtcgcgaggacatctcggcgaggctgatccgccctggccgccgcccgggctgcgcgcggtgcgccgttccggctccgcaagtccgaacccggcgcagaagttgggcttgtcgggcagaagttggtgcagggctcgtgaggctggcgcggcgcgtctgtctgcggagggaacggcagcagcttggccccaacaggcgtcacaggcgtctgggagcgcgaggagcggccgggcgagccccagaggctcggtggccgctgagctgcatgcccctgctccgccgggagcaactgaaaccgagtgagcccagtggcccagcagcccccgcagccccggtgccatggaaacgcgctcgccgccctcccgccccagcccctccggagcgcttaaagagacagccccgccgccaccacgggcttgaggcgctgctgggcgtcccccacgccctgcgccctcctcgacccctcctcttcacccagccgcggcgggggctgggcgctgggggctggaagggcagctgggacgcaaaataaggggcttcgctcagtactcagcctaactctgctcccacctcttcctacccgcccccctcccagcatacacactcaaatcccgccaaagagcccaagcagtcctggcttttcctctcaaacatcagcctgctcagaaccaaaccagttgtgcacgagcagagaccaaaagaaggctgacttttgattctcttgttctgcttggtccccaccccgagtctggggagtcggttagagcactaggctgagggaggtgtgtttgaagtgggaaccaattgtcagttgattgagtcaaatctgccaaatcgacagttgcaggacatatcgccggctcatccagaaatcctcctcactcaaaacggggtcatctctcttcgttttatttggctatcatctcaccccctttaggcaccagagttataaggaggagccaacgcttttacaaacttaatccctcctttccttcaaaccagctcctttcccccaaatataaggaggaacagccagtcgcgagcaccatggcccctccagagacgaacagcgtccgctcctgctcggagcgggaagctctctggctgcggtgctggccagcgcagcctgggacgcacggccaagcgcgatgcagtcgccagcagctcaggccgtaggctgtgcctctgcccggtgccagctgttgtctggaaggccacaaacctctggagtctgtttcgtgaaaataaaaatctatggtgcatcgtgccctccaacaaaggacagcccaggctccgaagccataatctgctgtttatccctgaaaaaaaaaaaaaaaaaaaaaaatcaatctgcagtgggacgacttttttctttgattcctaaacttaccaaaagtggctctccagtgactcattcatagttaaatactgtacttaaagtggtaccacctgatttcctcagttctgggagccctaaaaggacctttcccaaatggttatgtgggctccctcttgtcctgaatatttgaaataaccatctggctcttagtttcagtgttttgagcctttgttccctttgttttttttttgttttttgtttttttttttgacggagtttggctctgttgcccaggctggagtgcaatggcgagatctcggctcactgcaatctccgcctcctgggttcaagcgattctcctgcctcagcctcctgagtagctgggactacaggcgcgcgccaccacgcgcagctaattttttgtattttcagtagaaacggagtttcaccatgttggccaggatggtctcctgacctcgttatctgccctcctcggcctcccaaagtgctgggattacaggcggagccaccgcgcccggcccatttgggcttttacagaagggattgagaagcaaacttttgtcgtttctctgaaaaggaaaaaaaggtggaggtgagataaaaccaaactactcctgaattcttcagcattctgtgactttgctctccttgagcttcagagtttggaattcatgccaccctatagtattttctatttctctgagacatatctgtatcttttactccttttaaaattgaagtttaatttagtaaactgaaaagccacaagtacaagtacgtaactagacatctttatcctttgacaaacatctttaacaaacataatttttgagctttccacaatagaaatcattacttaaccccccttatttcatttttttaaaaaaaggattcattctgacttctctttctaaatgccagatatacatcaaccaggccttctctaaccccagagacagtggacttggtgatagtggtgattatatctactgtagagttgcattgtaacttggctaactctaattagttctgatattaacaggcctagcataggctgagaaaacacgttgacaa

SEQ ID NO: 1880980 - DNA, 4001 bp, Homo sapiens
cgcattatctgtttgaaagtcctctcagttcaagccacacattctaagactcagcaaaagcttattgacaccaagggcattgaattcaccagcacctgtaacgtttcttgaagaatgcttgctagggaaaagttcccatggtaactgtttttaaaagagttttgtagcatcaacaggttagacaggaagtcaaaatcatggagctcagcagcatcccctataagcacgtgctcctttttaaccacccctaacaaagacactgaagcaccctgttcataagccctgatgggcactggagggtctggccaggttgggctggatttcaggggacctgatttgtgtttccctgtgcagtgctcgtttccatcaccatctttaaggaggaggccttttccatccactggactcttaccatcgtgcctgttaaggaacaaaaagacaactgcttaggcctggagggtatgtggaaaccaccagttacctttgaatatacctgtggtgctcgaacctcctttagaaaacccaagatgccattttaatgatgctttgctcttgggtatcaaatttactccttaatttacctcaggagatgttctaagaggaagccacaagattccatacctgctgttgttgttttagagctggtggatttttttttttttaatccgcggaggaggacttgaccctgtgggttcctaacttggatggccatgcagagcacccttaacttggaaatctatatcctgctgtttaaacttcaagatgattcctatctggattaaagtcctcaaccagcaggccgaggcaaactctaaagaaaaacaaggtcatgctgcatttttttttggtaagcacaggaatcaacaaagagatgttatataacttctatttatatcctccttgctcactatctgcaggcagacaagagtcgctgagaagggatttaatgagctctctgggtttgctcaccttcctgagctggtaggaaccagcttgttctcaaatgcgtcagtaaagaatctggctgtgggtgggcggccagggtaggtggactgcgttgttgctatggtgttttttaattcccctgtctctcaaagatctcactccccccttccctgactccttccttttgcccccttcctttctttctttctttttttttttaaatctgtaagcttccttgtttctcacacctactcatgattcttggagctgtctccggaaacagaatattttccctctccttcctaagtgctcagctcccccattgtgtagccccgggacatcagaagttgttttctaaggtgtgttttttccaccctcccttatttcttttcccatgatttttttattaccaatccctccatgagagagacctatcctaggagtcttccatcttgcctgatagaagttttctctggcatattccaaattcagattgctccaaaaccaggtgaagtctgttgctagttggacagtcggtatggcctggaggagaagggctgtttgtatttccatgcatcctcctttgtcctcttgccctgggtgaagcaatgacgtctctgtctcctctagtgcgttataaaatagaaccgcaagaaaacaagagaatgggtttaccccacaatcataattcctggagcttgggtaactcctgttacctgaaggttgcaggttgaaatgactcagcttgcatttaattaaaaaaaaaaatgctgccccatcagattctcagcagggacgacgaatgcaccttgctgagaaccctatggctgcccagggagtggccccctgcaccctggccggcctggtggtggccacagaggcttctgagatggctctgtgttgtccatcacattcccaccagagcagagacacttagaagatgtgagtagggaggttaggatgaaaagttcttagaaaagaatatgtagttccatgaggacaggctgaaaaaatttttaaaaagccaaacccacctctgccttgcccagaagttgtgcaatccttaatagcagtagcctgtttgaataatcagaggcaagctgacttccctttattaacttctgttagagacatctgcataaaatatccccggattccagaccaagtaggtaatttttttttcccctctgagtaacgggagggactttccctttggaaatcttccagcagagttaacttcatggttgagactgttttctcattataaggtgccaacagctagattcctgatgcagggacagtgaaggcgcctcatgtacacacttggatcccctgcttccctgagaactgacttgatgttcacagttgcctctggttcttctgccttgaccctccttttcacggagaaatctatgcccgctcacatttcctgaggtcctctgagttcctctttgaaactgtcagaggctctctcaaagtttctaccaatttcctattcctgggttttagacttttgatcaagatggctctgacactgaaggggatagtcctgtaaaccctctgaagtcttcaagcctcgtttttcccctggaattcaggactttaaaaatatatatattttattgctcttcgaggaggatgtgttgcagttgccctcaccatatggtatttgagaaatatgtttttattagcctccttgcaacacaaacccacaaactgttgagcccagagcttgtagctatcaagtctggggagggagccaggtttggagacggaaggtgcacaaatgatcatccctcccgggctgtagttaatcatgcaagctgctgtgtcactggggccggggtagttaacagttaactcgatggattaaggatcctcagccaggctgagcccatcacagagttacgtgcaaaaaccggataagcccgtagaggtgacaacaccacatcagctgcctttggctggtctgcggtgtgctgcatattcccacttagcaggactttgagctttcacatgcaggcttcttctggccataaagttatacttcagctgccatggatgcaaagcttggcttgagtgtttcggaattgcacctccttcaggattattgttcattcattaatatagtaaattttttaaaaagagagaagaggccttactgtgttgaccaagctggccttgaactcctgggctgaagagatctttctgtctcagcctccggagtagctagaactactggcttgtgtcaccacagccggcttaatatagcagatgtttacttactgagcactccctgggtgtcaggtgctatacacattggcgtcaatacagtcagggatgagaccaacatagcccctgccctccaggagcttacagtcttgtgggagacagagctaggaaatcagctcatcatcagctaaatcagagcttcagagaagtgtgatggggaagcaaacaggcgccacgaagcgtggccagggagggcttctctggggagataccgttcaagctgagacccaacagatgcgaagagaaggagctgtgtgaagagtagcagagggcaagagtatttcagaagagggttggcttgtgcttgggatgttggaggagctgagtgaaggaagctaacgcggtctaccccatggtggtcggtcaggggcagagctgcggaaagtatctgctccaccagggtgatgggcttgtcatcaagtcggggctggatgaggtgatctctgtggttcccgccgatccctagtcggtgcttctaaagggcaccaagttggcttgggcctgtcccctgcttggatatgcgctgccgccgccaaagccctaatatacaaagcagctttacccagatgagtgctgtgtgatttcaccctgccctgctctaaccgcttggccatctgtacatcttactgtcagctgccagggatgctctctgtggccgtgtggaagttacctggtgggccagcacacagcaagatggggatgcagggtggggagacatgaagagtcccagagcattctgctggggaccagactcggctgtaccc

SEQ ID NO: 1880981 - DNA, 4001 bp, Homo sapiens
agtttcacagctatttacaccttgagcttcaggaaggaacatatgcatttggatacccactggagaagtgaggagggaggggagtccccagccctgtgcctcctggaaatcacaacagctgtcactggggctcagctctctccctccaggaagcagagatgaaactctccccgatagcagctccctgggggaagccagctgcaagggagggagaagaagccttggttccaccctcatttcaccccaggtgaactagctttgttctgaactagggtaacaatagtgcacccaaatcctacacaggtatacacccaggccgagtaggtgtgagtagcagagaaagagagcaaggcttatccttgtgctttgaagccagggcaggaaaggggttcattttccagatagctatgtaaagaacctagcaccattgacatcattgacattacggttgaagctaattgctttgatggtcctttgtacctgaatatcaggaaaagggagagggacttttggaggaagcttctggttttgtactggttacatgtcatcttcctgcaacaatttcatactgacatttaaaataaggccgggtacggtggctcacacctgtagtcccagcactttgggaggccgagatgggcagatcacctgaggtcaggagttcgagaccagcccggccaatatggtgaatccccgtctctaccaaaattacaaaagaattagccaggcatggtgacctgcgcctgtaatcccagctactcagaaggctgaggcaggagaatcgcttgaacctgggaagctgaagtcaagattgtgccactgcactccagcctgggcaacagagcaagactccatctcaatataaataaataaataaatgtatcatatttcttttctttttttctttttctttttttgagatggagtttcgatcttgttgcccaggctggagtgcaatgatgcgatctcagctcaccacaacatctgcctcccaggttcaaactattctcctgcctcagcctcctgagtagctgggattacagccacgcgcctcagtctcccgagtagctgggattacaggcatgcactaccacgcctggctaattttgtatttttagcagagacagggtttctccatgttggtcaggtcttgaactcccgacctcaggtgatctgcctgccttggcctcccaaagtgctggaattacaggagtgaaccaccatgcccggcccaagagtatcatatttctgatgtgccttaccactcccagcctcctggcctccactggacacacacatatgcactatccgaggcatgtcaatcatagggcctcctcacccagtcccttctatgggaaattgtcctctcatagctcctgctaaaggagcagtttaggtggcctttatttacatcgcatgatgtgccttctcttccttcagctgtggatgactgctgagatagtggttgaaacaaattctaactctcgggaatttaatctgggagggaagaggaaaatgcaggtcatatcgagagctgaattagaaaagatttataatggaaaagaacaagatggagttgggattagaggaagtcagagtagaaggaaacagactgatactatgtgtaaatagaagctacaaggtagacaaaagacaaaataggaagaatagcggtgttggtgatatgggatacctacacgtgggtaacagcaaaatcacatattctggagcataccagtgaagccgcattaacttctgctgctgccagttcaggctgccttggatccagccccacttcctggagtcctggatgtactgtgacttttgttcttggagtctcctgttgcgccatgtgcctcctgacattaaacttctcatcacttaaagtacccacaaccaaaagacagatccacatacccctcaagcacactgagttctgagagttccagcacggctgttccaggatgactcttctctttgaatagaatggcgaggacattcgctgtgtgctggagtctcgcctccttcagtggagatgacggccattattgcatcactatcagaatgtcagctaccacttctcaagcacctctttggtgccgggaactgtacttgatatttaacaagcagtatctcatttaatcacaacaaccttcctaaaactggtgttattagtctcttacacagccaaagaaacgctggctcagagagcataattaactcccccagggataccagttagcacgtggcagaggcaagattagaactcagtgctgtctgactccaaagctcttgtccttttcattctgcttgacacttccctaaggagtgccactcaagccagcttctcttgaaactgaaatgagcgtcgcagacagcagagtttcaaacatgtgtggctttggtacccctaaggaaggcaggcactgtgcaattcaacacggtccctgcagctcctgaatgcaggacccttcacccaggacccttcactccttgatgttattttcttggcacagaggcattggagtttgcagcctctgtgagtgaagcaacctgaatgtataagggcaacttcttacgcagtctcttctttcagactgctttgaactgcgtattgactatttgcatgcttcatatgagtgactcacagccactatgatctccacacatcccaaatggaacatttttttctttccctccaaatatgttcctctgtccttgttccctagctaatgactggcattgtccttgaaactcctcccctccccagaaacaatcccaagacttactgattttaccttcccaggatatctaccattcctctcccctccttcctacccccatcattcaaccctcttcgtctccctcttggactagcagttgccttatctctggtcttgttccattcaatgtatcctcctgggtctttcctgagtcagcattcaaaatgcccatttgatccggtcactctgggctcagcattcctcagtgggtcctgtactcgttatttattgtggcagaacaaattgctccacaacttaacaagttaaaacaagaaatatttatgatcttacaatttctgtgtgtcaggagtataggtgcagctgcgctggccaggtctcttacaaggctgcagtcgaggtgttggccaggactgtggtttcatctcaggttctactggaaggatttgcttctaagctcactcacatggttgttgtcagggtttggctcctcaccggctgttggccagaggtgtcaggtccttgccatgtgggcctttccctagggccacccacaacatggctcctggcttcccctagagtgaagtccctgagaaagagagagaccaacacaacagaagtcactttccttgtcaactaattttggaaacaactcccatcactacttttacgattgttaagtccagtccatactccaggggagcgaattaacacaaggaagtagcgggagccatcttagaggttgcccagtggttttgctctggtgttgtggggattacaaacaaacggggttccagccttaccccagcaacacgcaacagcctcagctggagcagctggactttacagatgtttcatttatgatttctgatgagttttttaattgaacaaagtgcgcccagctgaaagatatacaaaaactatgggtttagaggactcggtctaaactctaccaggcttttcgtgatctggcccctgcctaccagttccgcctcttgtttgactgctcccacatgactttcaggcaagacagatccacacagcagcctttgcctttcttgcctttctttcattataccccaccccagcttgtctgcgtcaccagtgccgacgcatccttcctaggaaatgtttttaaatggctccaggcagacatgtttctccctcattctcctatagtgctttgtttaaaccccttaatcaaagcagttaccttttatattcctatggttggtttatgtcttccctcgaaattttctc

SEQ ID NO: 1880982 - DNA, 4001 bp, Homo sapiens
tgtacatctactaagaaagaaaggaaacaaatagagatgcattatctagattacaaattatttagaaattagagtgttagagtattaacatagggcacaaaattgaactaataaaattactttaaagcacacttatttagatattttgatgctccttgttttggagccagctctaaactttacacctcaatttgggatacgaagagtgttttccatttgaaccagagctggaagaccacaaatgtggttagatttctgagagttaagaatttgatttttttttcaggcattaacctacaaaagccttcatttccacacctggtgcatagagtaatgcttaccttataaaatagctatgaagattaataatgttatatataagctttgtaacaggcaaacagtaagtactaaataaatggcacttatcatcattgttaattacaaaagattgtcaaatccaggtattcttaacctgcggtctgcagatccttggctcatggataaaactgcaggggtggagatccctaaaattggatggggaaagattatatctgcattttcattaacctctaagcaaaatttaccatttctttccattatgaataaaggcaacatcatagtgatagaaggacctgtcacttcgcaccaacagaagttacacatactttcatattaaatttctgatgttacggacatcacaaaatatctcttacatttatcagctttttgaaattatagtattagacctaatcttgctagatcttattagtgtattaataaagaaatacacgttattaatgtattttttaaatttcaatataattggtttcctttgtaatcctatgtactttgtgaacttaaaacttaacttctcattattctgagaagggattcagcagcttcacaggattgccatggcacacacaaaaaagttaagaatccctaaattttagtctatctctttgcttccagaaagccaaccaagtttgacaattgaacacacctgcctgagtgagccaattcccaaagtctcgggtttatttttctgtgcgtgacctgataggaagatattacggtctggtacatgactccatcaattaacctatttgctgagctcaccttcagcttatacctggcatctttcctgaattctctgttgggccttctgaggcacacaaaatgagctgacaagctgattttctggtatcttctgttcatacacacctggcccccactcgatgccaggcccaggattaagctgggcagtgattctcaagcctgatcccagaccagcaggcaggatcagcatcaccaaggagcttatgagaattgcagattttcaggtcacaccctagacttcctgaaacagaaactctggggtctatcagtgttttctcaagccctccagagacacacgctttagtctgagatccaccgtgctagggaatcggaggtccgtccaatcctggaaagagaggctcccatctccagtattggttgagactaacaccgctcctgcaactggggttggaatttcaatgcaggtagttgctgagcgggggccaatgagttgaaagccggagcaaggggacttgttttgttcctgcaccccgattttacttacattacccggggcctcgagggtgactcatagagattagccctgagcgtcgacccctcggcgccgccactgcacagcgagagaaggggagtcaagagagacgcttgagtcccttgactgtcctcccctacgagctctctgggaagagagccccagacctgcgaactctgggccgctctgcggccgcttgaacacttcgcgggtcttccgccccgcgctagaggacgcactccgtgacgggaattgcggtctcggccgcccccggcctcaggctttccgggctctgctgcctccagaaaactacaagtcccaggatgctcggcgcgggacggtcacgtgggaggggccgcgggcgcggctaaatagtctccatcggccattttgtgcgagaagccgcagcgccgcctcttctctcgcgccctcgcctcttcctccgcctcctccttcgcctcttcctgcctcctcccggcttccgccgccgccactccagcctaatcccaaccccagggcgaagcgttttcttatttatttccgttttctcgccactacagcctcctgacaaggtgatccgggcgggccccgcaggaattttatcccctcaccggcctcacactagtatcgcatgtccactatccagaacctccaatctttcggtaagatcccgtcgccgccgcctccctcccttgcccggcgcgcatctcggccttttgcccgcctggccaccgcccctaggggccccctttctgcccttcccgcacccctagtggggctttgtctcggcgcccagaaaatggcgacggggcccctggcgaccccttccccgaggacagcgccggactccgagccctcctctcggagccccggccgcgggccctgcgccaccccctgccccgtccttgacccggctctcgcctccgcttctgccccttgaaaccttggcgatcctatttcgtggactcctagatcggccctgctacttgcaaagggtatgccgggccagggaaaccagggatcggcgcccgttctctggcagctcctgggggcacttagggaaagatgcggatgcaagcctctgatctgtcactggccagtggttcagtcttctctgcttgcgtagcaatttgttaaattacgcctcttgatatatatgtaatctactttttttttggcaaggcacagttacggttaaatgattaaggtgggcgtattcgaatgtttatgttttcatcagaatgtaatcgagatgacgcacatttttatagcggctacaatattaaggttttctaaatctttttctcattagaggaccatattgaacgataacattatttatctataacagcgtttttctacaatggacatagctgttcaaatgtttctctttttgtgagagtatcttgggggttttattaatactccacccccatctccattcctaccggcaaaaacagcaaaggcactagaaccttcattgatgactgtctggattggtagtataatgtatttctggaaagtacttcttaaaaaatatttttctactttggattttttttttttttttatccattcgcagacccctttgctgatgcaactaagggtgacgacttactcccggcagggactgaggattacattcatataagaatccagcaacggaacggcagaaagacactgactactgttcagggcattgcagatgattatgacaaaaagaaacttgtgaaagctttcaaaaaggtaaagggattaggaagaaaggattagagttactgatgcacacctctgaactggattatgattcacacctttatatcggcgtggatgaaaataactagaccaagaaagttgttctcatttttgtaattaacatgtaaatatttagttattctcccagtgtggtctctcattttaaaagaagattcgcgttgcttttaaataaatttaaatgtgaaatatttagttcttgatgttacacataaaatcatttcctggtttacaaattaatttggaaggattgtggattataggagacaaaatctgtttctctaaatatgatctagcttactgaaatggctaattctgttcatacggtgaaataaaacctcatagtagttgactaaattttgttgtatatttatgcacttttccagaaatttgcctgtaatggtactgtgattgaacatcctgaatacggagaggttattcagcttcaaggtgaccaaagaaaaaacatctgccagtttctcttggaggtgagtgattgggtgctttatgtgtaaccttgagattgcttttaaaattgtatttaaaggcaacatgatttgttttctactaagtaaaaaatcatacgaatgaaggaaattaggtgaaataaagacat

SEQ ID NO: 1880983 - DNA, 4001 bp, Homo sapiens
agacagctaatgtttattagagcaactagggaagagagagaagagtgactggagggaggagaaagaaagacagtgggaaggcaagctagccaatgtcattacttttaagtctgcaatactgaaaatgcatagtacatgaacattaccttgtgttcagatactgaggcagtgttttcaattgcctgaaaaaacaggagagtcacaaaaatattatgacacatcagcgaaacacgttacaccttattcagcatgccctgttatctcatctaagagccaatgtgtccatatggcaaccatcagctatcatttccacttgaatgagttttgagatttttatttcaatctacctcagttatacatctgtcactaattgccactcatttcctccttgataatcaaagttccaaagatcccaccttaatccaggcttctgaaatggttttctcatatctaatagctgactttattacatcaaagagaataatacggttctgaccgctgctttcttgatttcctgaggaattacaagtagcagagaggaaaaaaattactcttctacctaccagaaaagaacttacaagatgtgaattcctgcttagtagccatgtaccctggagtaaatgacaacctcatgtataagatggctaataaacttgcactgtagtctgcctgggattgatctgaatggctaagaaaacatatgaacacatacatagccacatacatatacgtaatttgaaaaacgatataatactagatgtaaatatcataatagtaccattatttgtagttgtaagtattaagctccaactctgactgtgggatgtcagagaactgtgacatcctatgtgaggaaaagggtggcaattatccatgagctctttaccttgcttgtcctttactttttaactttacttggaaagcctgcaacagtgatggcaaaacacaatgctgcaggatccaacttctcccgaagctcagagattacctgcagaaagttaatattagctatggtgttctgctcattcatagtgggtaggtacagtccagtctctcaaccatgacaatctcctgaaagactgaggaagaaaaaattttaaacgttggacattttgaaaaatagagttgtgagaatagctaaatgcaatgtcgtagaatgtcatatccaaaatttcagaattctgtgaggtactacacagaaagagtaaatgtaacttatagcagcttatatagatcaatgaatctgttgaatagctccatttcctcttctcaatgctatccggattagtcaacattctcagttagtcaggactttcggcttccagacacccgcctttaacacgtgcgataccatttggcttcccgagaagcccaacagacgtgagatgaggccgactgcctggactagttcatcgggaagggggtgagggtaaaagcctttctcatttcctcattttaacgacgcagaaaggtacctgtggggactatcccatctcagggcagatgaggaagccgaggcttggggcgcggagccccagagaagaacgccgaccgcggcccggacttaagagattaggtcgcaggggagcggggcctcgagagactacgaccactgctccatttactcaccgagaagccgtccccgcctgtagttttctttctttttttttttttttttttgagacggagtcttcctctgtcgcccaggctggagtgcagtgcagcaatctcggctcactgcaggctccgcctcctgggttcacgccattctcctgcctcagcctcccgagtagctgcgactacaggcgcctccaccacgcctggctaatttttttgtatttttagtagagacagggtttcacctgttagccaggatggtctcgatcccctgacctcgtgatccccccaccttggcctcccaaagtgctgggattccaggagtgagccaccgagcctgggccaccgccgatagttttccactttcccgccaggcccgacgccgctctgacgccactgaggtgcgccacgacgtgacgtcaacgttcgcgccggaagtggaagaccaggcagcccagctgaaggcagtaagctcggctcacagtcgcaggagagttctggggtacacgggcaaaggggcttgagaaggcccggaggcgaagccgaagagaagcaactgtgccccggagaagagaagctcgcccattccagactgggaaccagctttcagtgaagatggcagggccagaactgttgctcgactccaacatccgcctctgggtggtcctacccatcgttatcatcactttcttcgtaggcatgatccgccactacgtgtccatcctgctgcagagcgacaagaagctcacccaggaacaagtatctgacaggtcagcgccctcccttctccagcctacctcacaccgccgtgaccttgggcaaaaaagtgcaggagttgtgtcaatttgcctaggttcacgtcgcgccccctctgacagggtgaccttacccgttacctctgtgtttcacttttgtcctctgtgaaatggggatgataacagtacctgcttcatagacaggtaggaatcaaattaggtgatgtctgtaagtcccttagcacaggatctaggacgtattgagtgttgaaaaaaacagtactgttaatcctttaggttagtcgccgaccctcggtgggtttacctatgaactattccatcccacccttccgttgagaagagtgccaggtgcgttacagcgtttagtctttgtaacatccagtcaagtgagtgtgataatctgcattctaccaaattactgttccaggcgtcgggcctggtgggactgtcagctgagatgccaagtaccaaagcgctttgcagtctgtaaaactgccattagagatgtaaggaattgtaattatttccccccactagagtggaggcaacttcctcacatatttcattgcagtatttatttatttatctatttatttgcttatttttgagacggagtttcgctctcgttgcccaggctggagtgcggtggcgtcatctcagctcactgcagtctacgcctcccgggttcaagcgattctcttgcctcagccccccgagtagctgggattacaggcccgcaccaccacacctgactaatttttgtatttttagtagagacagggtttcaccatcttggccaggctgttctcgaactcgacctcaggtgatccacctgccttggcctcccaaagtgctgggattacaggtgtgagccatggcaaccagcccctcgttgcaatatttatatacagataaaggaatttgagatgattataggtggttatctagacatgtagcccctcatattaaagtaatagttttctcccagcaacttgggatgctgaggcaggaggattgtgggagaccagcctgggcaacataacgagaccttgtctcttagaaaaacaagcaattttcagtcagttctgattactttcagaaatcatctcaggtaagtgctactatatctttagcacctctctctcacattaatttctcgttttaataaagagagtaagcctcaggctaagaacttttcacaggtaacagtgtctagttaaaatttaataatgttgttttgtttctactgtacttaagttactttcttttttgtgacaatactggatttccatttgctggtaatttaaagattcctttaaaatcatatagatgggaaaaaagttgatatataaaaagtattaaatatgtaatgatacaagcgttggacaaaaattctaacatggcatgagagtgactgaagtttaggaagcactactgtaacattttcagttagttcttcccaattatgccaagaagaataataaccatttactctatatcaggtactatgtgaagtacttacattcattaacttatttaaaacttcaaagcaactctatgaggtacatattgtctcattttatagaaacagaggctttaacaagttcc

SEQ ID NO: 1880984 - DNA, 4001 bp, Homo sapiens
ctgcactccagcctgggtgacagcaagactctatctcaaaaaaaaaaaaaaaaagtacagaaaccaacactacctccttgtttgttaaatacaatggacagaccacacacacacacacacacacacacacacacacacaaaagcctatctaggcatttggagtgttggacaaacttgtactactgaggagttgggcactgcatcccaagtgtcctgacccattccagagtctatcagcctctttgggaacaggaagttggaagtgggcaatcactgaattgctaagatgaccttcatttgcttctcactcagatttctgtaataggccaatgttcctcttcattatggacatttttgattccagagtgtgtcattacctgtggtttgtgagcttacctcctgctttgcaaaagatctagaacttccccattgatataatgctcagaataccttcttgctataccatcagcattcctaaggaataagtaaatacaagctcagttgagaagaaaaatctgcatggttattcatcaggcaggaaaaacaaatacaaataaagacagctgcaaagttaacaagagactattgctgccaaggacatgcttaatctttagtgtcataataaccctctttgagtgactactgctttctcactttctcactgagaaactttgttcctaaaatcaaagaccctcagaaatttgctgtttgaaattttatcagtaggaataaaatatcttgcttggaggacctaagtcactttaacacagagatacagcttcaatttacaagcagccagttgcaaagcttcagaaaaggttttcaaaaaaacaggacaatgggtccactctgcagtctaggcctgatgttgaccctttttcacagtcctgctttgttttgaggctattaaaaccctgcttcatttaagttccatctaaactttacacttcctcaaaatcctgtaactttatattttccttcccctggtaaaatgtcccatggtgtctctggtgtgcaatctccctcattaaaaaagatcgatagacctggttttgctgactacaggtttgtccctggtggtcttaggctgactgggcttgaacagtcttgctcagcttcagggttcctaagattgcaaatttcaaaaactgatacaacaaacattttttcactcctaaatacaaatgcacctgtccacgttgccaggtagttatgcacatggctaccatgtcaatttggtcataactagggttaggtcacttctctggaaggttagttattaagaacaagaaagaaagtcagggttctgcacagcttttggtttgattcttgtactgacttatgtttctttttctttggggctacaggtaaatattttgtctgctaaactgacgcccccatcgccagtgtctgaacaaacaaaactgagacatatctagtcagctgaagctgacaaatacaggggccaatctggttacaggcaggcagtcctggcctcgtgacaccgcagagactgtgggacaagtggacgtgctcctactgtccctcgcatcccccatctgggccgcgggactagtgccctcaggtctatgacccactgcaagaacccaaagctcgacgcccgcccagcccttcacatccgtcccttgcaacaagcaagagaagaggggcgcggcttcaggggacgggcgacggtttacaggacagctcgtacacagtaccagctgacatcccctaagcctgagtgtctaggcccctgcctccacatttaagagccgactgcgccccttggtgattggacgtccggacgcaccttgagtagaggccaagcaaactatcgagcccgtccaaaacgccatatttgtaactgacgtcatcctcatgttgcctttcctctctgtgattgaggaaccaatcagttgggtgtagcagacggggcgtggctcttcaggtagaggccgaaggggctgagagcggtcccaggcggccatcttgattcctggcatcactctcaacgtgccctccctctccgtgattggacgagcagggcgggccttccggaggcacacagccgaccaaccagagatctgcgcgtgctcgatctggtcatctgttttctgacatctggagccactagcagttatcctgttcattcctgggcgcctgcgaccttccgaaggaaacaagacttgcttggggaaagttgccttgccagtatagtggagcttggtagaaacttaaaaactgcctggggctgcctgggatggggatctcgagatgcttgtggggagcacattttaggaaacagggggctcaagctgcatgaaatgctgcgggaaataggaatgagagacgcagaatggtcggagaaaaaagctaggaaggtgtttgggagtaagattttggagtgccttgaatgccagactagggagtttggactatatcctgtaagataggggataaaaatcaactttaaacaggagtgatataacaagataatgtactttagaaaataattctgtaactgtagggggagtcccaaagtgtttctcaaattgtgttcggggaagttcaaagtgtgtttgagagcttgtttttatatgcagattcttgcccctcaccagacctgcaaataaagttctctggttgtacagccaggaaactgcattaaaaaaaaactttttaggttaacatacatttggtgagaaaacgcataaaccatatggatagggctctgaattttcacaagcaaacacttcagccaggcggggtggcccgtgcccctaatcccagctactcgggaggcttaggcaggagaatggcttgaggccaggagtaccagatcagcctgggcaacatagcaagacccgtctctaaaaaaatttaaaacaaaaataataacacactcccgtagttaacaccagatgaagaaacaacatggccagcagctcagaagctccccttttcccctttagccactgctgcctgcaccaaaggtaaatatgatcattacttataagaactgtagattagttttgcctgttttgaatttgatataaataaaagcatacaggatatattgtgtcagcttatttgttagtgttatttatgaaattcatccgcattgttccatgtagttgctgtagactccgttgctatagattgttatcacaatttatccagtctcttgtttatgggcctttgggtaatttccagtttggagatagtagcaaaaaaaatgctaaaatgaacattcttcttcattcatatcttttgctttgtaaattataaagcaagacaacaagacctaaagactgattcattcactacctatttattgagccccttaccagactaaggtgagaaaataaaacagaaaagacagcaaaggtcctgccctcatggaacttattctaactggaacgaaacaacacctacgtgggcagcaaaacaagtcaaacaattgcaattgtgataactctgagggaaacaaggtgagctagaaaaagaagggtggggacttaacctttttttatgtggtagcctggttaactctcagaaaaatatctaggaaaaaatacaagagataagttggcactgctacacgatgagtattaacaatgggtagaccattcctggcaagagagacaccatgtataaaggtcatggaggaggagagagcttggcccattcaagaccagtgtggcttcaacacaatgaaggagggatggcataaggtgtatctgggtattaaagcatatgatacaaggccagagtaagaagttgagattttattccaaatattatgaaaagcaatcgaactgttaaaaacaggaaataatgtgatctgatttacttacttaaaagatccctctaactgctgagcagagaacagattaaagacagaatttaggaggctgctagagcagtctcagggaagatatgctggcatagagcttagaggaaaggcttgaaatacatctgggaactgtcatggcaaa

SEQ ID NO: 1880985 - DNA, 4001 bp, Homo sapiens; identical to SEQ ID NO: 315619

SEQ ID NO: 1880986 - DNA, 4001 bp, Homo sapiens
ttttgagacagggtctcactctgtcgcctaggctggaatgcagtggcatgatctcaactcactggaatctctgcttcctgggctcaggtaattctcccacctcagcctcctaagtagctgggactacaagcacacaccaccatgcccggctaatttttgtattttttgaaaatagagagaggattttgccatgtttcccaggctggccttcaactcctaggctcaagcaatcctcccaccttggcctcgcaaagtgttgggattacaggtgtaagccaccgcacccacccctggatgtatttcttaacttctctggtctaggtttctttccctgtaaagtgtagataacaatttttaattaaaggatgtgctcaaagggtgaaatgaaataatgtgtgtaaagtgctgaggagtgtctgaaatgtctaataaatggaataataacaatactggcaatggctgtgattgtagcacacctcctgtgctccctggagctctgaggtatagctcccaccgtggatcttaacaaatgcttgctaaattgacttgagccaggactcaataagggatgcaatttctattcatctggcctcaaactgacttatggaaaaaggcatttattagttcttgtaactaaatcattcaggactagtctggctttgggcacaggtgaattcgggatcttaaatgatgtcttcagggatctgtctctgcctctctctccatcattcttgtctactttccttttccttctgacttcattttcaggtagggttctcttctcactatggccctgtcgctcccggtaccccaaatttcatcactccagcttctatttccatagagtaaacagttctttttccaagcaatcttaactcaaaatttcagaactgagactcattggtctagtttgattatgtgcccatttctgaaccaatcactgtggcctaagggatagctccctctgagtgaccaagtctagggaaagtgaactctgattggctggcttgagtcatgtgcccatattgacatagtgctgggtgaagggtaactgtcccagaactgcaaaaactgaaaggaattccccagagaaacttggcccctggtatcaaaagatagggagacagacactgggcagaccaaagcaatggatggctgtacaccattagcaggcattaaatgcattttgcacacttgctcatgaatatctccctctccctgttgcagagccacataatcagaagactgaaggaccattgctgtgcaagtgaatctgagtagttctgacttgccagcctgtgacagggaaatagcagccacagatgtttaactaagcaagtactaccaggccccaggcccacaagctcttccccaagcccagtcccagctgacaggcaggcgtgacaggacatgtcaaggccaagagtcaggacacctgtcaagatgtcacagtgcctcaggacacgtgggttgggcaggtgacagctgcagtgaaccttcccgaggcccacagagcaacctgcatctgccaccttcaacaggcaaggcatctttcttctcagaaaacaaggaaagcaagcaagcatttgaaactgtatatcctttcctgtttcattaaggggttgggctttgttttcctgaaagcttttgttcttctgtcagcatattcaaaacaaccaaaaggcgttacctgctctgaaatccctgagatgcctatcctcagaggtgcttttggctgtcttatgcagcagaaggaagatttgcttcctagctgattctccagtcctcaggacattcacaaatggcaaattataagcccgtgttgcctctgctgactgcaacttgggcctgtcagcccagaataatatttgcatgatgatttggccaaatcaggcctggctgtctgtcatcctgggctcccttctctccctccaccagacgaacaaaccccgtggcccctcctcctcagatagctctggaatcccgctgcttttccccatccctgatctccccacccttcctttctaccccctaccacctctctcaggtcccaatagtctctgtgctccactcactcccctccatcaattcttggctcttccaccagaggggtccttctaaagcacccacatccgtccatgccactgctcagccttttctttcaatggtttccaagtccccttataattaagttcaatctcttcaaaaaactagcagaaaggctttctgacctcagtctcaaccgatagcctgtttgcctcctatactccagatgtatttatggacataggtaggctcccagatcagatctacatcatgacatcccctggggctgggctattctcctctgccgcctctgtacctggccaactcctacttatccgtgaggccacagctcaagggtcactacttctggcttctgaatctcggtatggcgtctctcccatatttgctctaggcatctagtgcctcctccactacagcacttattatactatcctgaaattgcttgcttttctgtgcttccttcattagcctggagtaatggagcctggaagatctatgagtatggaactcaccttattcattactgcatcattagcttctcatgcaaaccccatcacattatggaagctcagttcatatttgttaaatgtctgaacaatgtgaatgttcatactcagactttccattggctgaatttgaggtcacaatttctgtacatgcaactgagagcaaattggcacatcaacccgcacccccacctccagataaaatgtaagcaatagcatttgttccacctgatattccttttggctcctgatctttatgtccaagttataaaaatgtctccatcacaacttccacccctggaattgagtgcctggtgcagggaaggggcacaatctttgacacaatctagagcaagtgagacctccaaggatttgaagagaaatgtaagagtgtgctctgagctttggcttgcagaacctggggggtggggcgggggtggcgtgggagtctcctatttccttgaccatccaaatttgattttttttctccttgctcagcacctagtggtgtagtattccaagggcattaaaacaaggttaaagggctttatgtgatgaaaggcattcttagttgtgagtgtttagcaggagtttaaatatcagcaattttgtatatggaaacatattagcttcatatttaattggggtcgtggtgcactgtgaagtacagcacttatgtgcacagacttgggtatgatgtcccacagacatgggtttgagtcccagccctgccattaataagccatgtgacacctgcccaggtagctaacctctgtgagcctcaatcaggtccctcacctataaaacagggataataacaataaaagcataaatccttgtagggctgttgtgaagaacaaggtaagaaatgcacataaagtaccgtgcacagcacctaaaatgaggtaagcacctagaaaatgcaagctggtcttcttcatattataacattgggcccttaccctgctccagttgctagaaagtaaaaaatgcaccagcttgtcctgtgggccaagtctcacacacagatgttggttcaactcgtctgtgcattagttttctactgctatcctaacacattaccacacacttagtgactttaaaaaatatctatttattatctcacagttccgtaggtcagaattttggcacaacacggctcagttcattctctgctgagtttcatgaggccaaaatcaccaggtgtcaacagggctgcaatcttttttgcagctctgaggctgaatttactttccagctcattcaggtcactggcagaattcagctccgtctggttgtgggactttcctggctggcagttggctaagcatcattctcagcttctagaggccacctgcaatccctggctcatagcccctttccttttatcacagcctcgtctctcctctcctcccccttgggacctct

SEQ ID NO: 1880987 - DNA, 4001 bp, Homo sapiens
tgctggaaagcttttcactttcctctctggtcaccacattttgcccttccttttaaagcaactcagatgtctcctctcatctgtgctgcctgctcctttagcctgcaagaactctactttcaaaaatattccctagccaggcacagtagctcacgtctgtaatcctaagaactttgggaggcccagatgggaggatctcttgagcccaggagcttgagaccgagagtttgagaccagcctgggcaacatagcaagacgccatctctacaaaaagtagtcccagatactcgggaggctgaggcgggaggatcagcttgagccgggaggaggaggttgcggtgagctgagatagcaccactgcactccagcctgagcgacagggtaagaccctgtctcaaaataaatataatacaggccaggcactgtggctcacgcctgtaatcccagcactttgggaggctgaggcaggcagatcacgaggtcaggagatcgagaccatcctggctaacacggtgaaaccccatctctactgaaaatgcaaaaaattagccaggcgtggtggcacgtgcctgtagtcccagctactcgggaggctgaggcaggagaattgcttgaacccaggaggctgaggttgcagggagccgatatggtgccactgcactccagcctgggtgacagagcgagactccgtctcaaaataaatataatataatataatataatataatataatataatataatataatataatatataaaattggccaggcgtggtgacacacatttgttgtccttgccacttgggagaccgaggtgggaggatcactggagcccaagagttcagggctgaagtgaaccatgatgccgccactgcactccagcctgggtgacagagtgacatcctgtctctcaaaaataaaaaatgtatatattttacaaaaatgtaagtaaatacaaagtcccagaaggacgcaggtggtacctaggtggccagatgcttcaggacttttctactccaggatggatagatgggccaagtaagaagcaggacccagatcacagcaaggagcaaaatttatgggacgctaaaaatgtcgccaatcaagattaattaatattaatctaacaatatttaagataactaacatttaaggcaattttaatacgcttattaatatttaaagctattttaaaaatatccgcaaacgagggcccaagggctggcgcctgattttgtaaataaagtttcactggacgttccagcaagcatctgtctactcaataaccagactccagcatccgcaataccaaatggcaccgtgtgtgtccgtcgctagaagccacttcctccacccaagttaaaaaaaaaaaaaaaggccccaaataagctgagagacgaagaaaagatcgtttctccgcaggctgccaggggtttcagagacgctgaagagcagggacagaaagaagtctgcggtggcccccaccggccctcggcacccacattctatccggctaaccagctcctgccgctttaaatccgggaggctcggtggcgcagggcaagcagttgcccggggagaccaacgcacaacagaggctcgcgctcgcgagagccgaccggggccgcggccaaagagctggctgtaatcccgcctcccgccagccatggcccacttgcgctcgcctagcggcttcggagacccggggaagaaggaccagaaggagtcagaggaggagttagaggaggaggaggaggaggaagaggtggaggaggaggaggaagaggtggaggaggaggaggaagaggtggaggaggaggaggaggaggtggtggaggaggagttggtgggggaagagcaggagttggaggcccctgagacgttcagcgaagagtacctctggaaggtcacggacatcggtgactacgacgacgacttcccagacgtgcgcccccgcttagccagcatcgtcagccctagcctgacctctacgttcgtgcccagccagagcgcgaccagcactgaaacgccgagcgcaagcccaccctccagcacctcctcgcataaaagtaccgcccccgacccaccccttcctcgagggtttctcgtctccagggggcacctggtccacccactcctgggtggtgccttcgtcgacctgcgcgtcgtgcctgatttctaaatgcatgcaccattccacacacctaatctctctcacgcccttgtcagagacactgaacccttggctgagctgttgtgatgaggcacgatttaggatataggcgaaacaccataaaagttgaacttgggcatggctgtatgaagtgcttttttttttttagacaagagtctcgctctgtcgcccaggctggagtgcagtggctgcagcctcgacctcctgggctcaagcctcccaccgcagcctctcgagtaactggaactacaggcacacgccaccacacccagctaatctggcgtctcactatgttgcccaggctgctgggagtgctcatttttataacatttttgcgtgcattcacaccgtgacatctctctctctctctctctctgttccccctcccctccctcttcctcccctccctctcccctccccctctctttctctctccctctctctctctctcacagacacacacacacacacacacacacactcatattatttccagagaagtgccttaagggtgctgtactactgaaacagtcctgcaaaaaaaaaaaacaactctcttttgtgtttaacatcctgtgctgaagccactccagtcacttccttgaaaaaagaagcagagaagtcttctagagtaggcttctcaagctctagtgttgacattttggtctggataattctttgttggggaggattggggactgtcctgtgaattacaggatatttggcagcatccctgtcctctacccgtggctgtgctagaagcacacatccttgcgatgatcaaaaatgtctccaggccgggcgcggtggctcacgcctgtgatcccagcactttgggaggcctaggcgggcagatcacgaggtcgggagatcgagaccattctggctaacatggtgaaaccccgtctctactaaaaatacaaaaaattagccgggcgtggcggcgtgcgcctgtagtcccagctacttgggaggctgaggcaggagaatagcgtgaacccgggaggtggagcttgcagtgagccaagatcgcgccattgcactccagcctaggcgacagagcgagactccgtctcaaaaaaaaaaaaaaaaaaaaaaaagtctccagacattgccatgtgttcctggggggggtagaattgaccttttgatttagagggaatagctgatttttaaatgtttcattcaacaggtttccctaaaatatttcagacatttaggaaagacatgtctgaaatgagtatagataggtaagaaaatgttttcaaatttcacattttttgaacccaataatgtttaccttttggataaacatgttaggaagtagagtaaaataatccagggcatttgtgacttacttattttaaaaagttttttttaaatatacactggtagacactttgaaagagataaaggttcccacttatccccagcttattacctagctctagagattacatgtccacttatcaatgtaacatgaaagaataactatatatgccatgtgtgcaattgtaagtgcttgagaattttgaatatagcttttattggctaaatgcaagagtgaccagggacgccttttgtggaagagagtggaaataatagcttttcctttttcctctctctctcttctttttcttgttattgctattagccttcaggcactttaactatagtaagaagataccagtgaaatgccttctggaacatctttgtaaatattccctgaaatctcacaccaaacctgagtcaatgatcttgaattattagttaccctaactttgcttttgtaagcaacttttgaatt

SEQ ID NO: 1880988 - DNA, 4001 bp, Homo sapiens
agtagatccaagggaaggagattccataaaatgttcaaaaaaggtcttaaatagagggtctaaacaaggagtacttaaacaaattaattcaccacacaattgagaaaatgccagggcagtcacagaactgagctacagcaggcacaagcggagtaagcacaagcactgtcacccttgctgtctgccagccccgtgtctcatccccacatcctgacttccagtctgctctctgaggaccctggttgaatttcctaacttctaagatagcttccagcatcaaactgttagtattgtccagaaaagaaatgagctttttcttattttctctttttaaattacacttaccttatttgtacctcaatatctgtacacatagttccctgtcctgaccctcctttcctgccgtgagcctgctggaaagcttttcactttcctctctggtcaccacattttgcccttccttttaaagcaactcagatgtctcctctcatctgtgctgcctgctcctttagcctgcaagaactctactttcaaaaatattccctagccaggcacagtagctcacgtctgtaatcctaagaactttgggaggcccagatgggaggatctcttgagcccaggagcttgagaccgagagtttgagaccagcctgggcaacatagcaagacgccatctctacaaaaagtagtcccagatactcgggaggctgaggcgggaggatcagcttgagccgggaggaggaggttgcggtgagctgagatagcaccactgcactccagcctgagcgacagggtaagaccctgtctcaaaataaatataatacaggccaggcactgtggctcacgcctgtaatcccagcactttgggaggctgaggcaggcagatcacgaggtcaggagatcgagaccatcctggctaacacggtgaaaccccatctctactgaaaatgcaaaaaattagccaggcgtggtggcacgtgcctgtagtcccagctactcgggaggctgaggcaggagaattgcttgaacccaggaggctgaggttgcagggagccgatatggtgccactgcactccagcctgggtgacagagcgagactccgtctcaaaataaatataatataatataatataatataatataatataatataatataatataatatataaaattggccaggcgtggtgacacacatttgttgtccttgccacttgggagaccgaggtgggaggatcactggagcccaagagttcagggctgaagtgaaccatgatgccgccactgcactccagcctgggtgacagagtgacatcctgtctctcaaaaataaaaaatgtatatattttacaaaaatgtaagtaaatacaaagtcccagaaggacgcaggtggtacctaggtggccagatgcttcaggacttttctactccaggatggatagatgggccaagtaagaagcaggacccagatcacagcaaggagcaaaatttatgggacgctaaaaatgtcgccaatcaagattaattaatattaatctaacaatatttaagataactaacatttaaggcaattttaatacgcttattaatatttaaagctattttaaaaatatccgcaaacgagggcccaagggctggcgcctgattttgtaaataaagtttcactggacgttccagcaagcatctgtctactcaataaccagactccagcatccgcaataccaaatggcaccgtgtgtgtccgtcgctagaagccacttcctccacccaagttaaaaaaaaaaaaaaaggccccaaataagctgagagacgaagaaaagatcgtttctccgcaggctgccaggggtttcagagacgctgaagagcagggacagaaagaagtctgcggtggcccccaccggccctcggcacccacattctatccggctaaccagctcctgccgctttaaatccgggaggctcggtggcgcagggcaagcagttgcccggggagaccaacgcacaacagaggctcgcgctcgcgagagccgaccggggccgcggccaaagagctggctgtaatcccgcctcccgccagccatggcccacttgcgctcgcctagcggcttcggagacccggggaagaaggaccagaaggagtcagaggaggagttagaggaggaggaggaggaggaagaggtggaggaggaggaggaagaggtggaggaggaggaggaagaggtggaggaggaggaggaggaggtggtggaggaggagttggtgggggaagagcaggagttggaggcccctgagacgttcagcgaagagtacctctggaaggtcacggacatcggtgactacgacgacgacttcccagacgtgcgcccccgcttagccagcatcgtcagccctagcctgacctctacgttcgtgcccagccagagcgcgaccagcactgaaacgccgagcgcaagcccaccctccagcacctcctcgcataaaagtaccgcccccgacccaccccttcctcgagggtttctcgtctccagggggcacctggtccacccactcctgggtggtgccttcgtcgacctgcgcgtcgtgcctgatttctaaatgcatgcaccattccacacacctaatctctctcacgcccttgtcagagacactgaacccttggctgagctgttgtgatgaggcacgatttaggatataggcgaaacaccataaaagttgaacttgggcatggctgtatgaagtgcttttttttttttagacaagagtctcgctctgtcgcccaggctggagtgcagtggctgcagcctcgacctcctgggctcaagcctcccaccgcagcctctcgagtaactggaactacaggcacacgccaccacacccagctaatctggcgtctcactatgttgcccaggctgctgggagtgctcatttttataacatttttgcgtgcattcacaccgtgacatctctctctctctctctctctgttccccctcccctccctcttcctcccctccctctcccctccccctctctttctctctccctctctctctctctcacagacacacacacacacacacacacacactcatattatttccagagaagtgccttaagggtgctgtactactgaaacagtcctgcaaaaaaaaaaaacaactctcttttgtgtttaacatcctgtgctgaagccactccagtcacttccttgaaaaaagaagcagagaagtcttctagagtaggcttctcaagctctagtgttgacattttggtctggataattctttgttggggaggattggggactgtcctgtgaattacaggatatttggcagcatccctgtcctctacccgtggctgtgctagaagcacacatccttgcgatgatcaaaaatgtctccaggccgggcgcggtggctcacgcctgtgatcccagcactttgggaggcctaggcgggcagatcacgaggtcgggagatcgagaccattctggctaacatggtgaaaccccgtctctactaaaaatacaaaaaattagccgggcgtggcggcgtgcgcctgtagtcccagctacttgggaggctgaggcaggagaatagcgtgaacccgggaggtggagcttgcagtgagccaagatcgcgccattgcactccagcctaggcgacagagcgagactccgtctcaaaaaaaaaaaaaaaaaaaaaaaagtctccagacattgccatgtgttcctggggggggtagaattgaccttttgatttagagggaatagctgatttttaaatgtttcattcaacaggtttccctaaaatatttcagacatttaggaaagacatgtctgaaatgagtatagataggtaagaaaatgttttcaaatttcacattttttgaacccaataatgtttaccttttggataaacatgttaggaagtagagtaaaataatccagggcatttgtgacttacttattttaaaaagttttttttaaatatacactggtaga

SEQ ID NO: 1880989 - DNA, 4001 bp, Homo sapiens
tcccacacagatgggacgcggcttaggaggaatcccgggctgcgggcgttccttggcccagtggccagatttccggcatgtgtagcaagttcctgggggaggaggttctggagaaacgtctggctgctacagttcaggcgtttggaagttcttgtgtgctggagatgtggctggggtttgtctcacagtggaggcaaggaattgcaacttttttctgttatttcacaccttgaaggtgaggttaattaagtcctgttgtggggtttgagggccagattccagtttttggagttttatttaatgtcgggagcagattgggtaataaaatgtatattgagaataagatggccttttgaccttttaggggctagggctgtaaagtgtcttagggttgctgccaaacgagccatgaactgggctagatttttatatttgatgaaaaagagcctaaacactatctgatttgggataaagaaaaaggagcattaaccttgactatgcgtttagctccagccacctttttaagaataaattgctgggcaggtcggggagggctagtcacggaatgaaactgtaagccggagcaggtgtgaggaggggaggtgataaaaagattatagggtggaggagcagaggctgaggaagaattgggacctagctcggcctggcaaggagcagcctggggaggaagggagaggtcagatgggtctgtagaaaaggaagattagaaagactcagtgacgcttggggttggtactgaggggacaggcgggagggaaagaaggaagatttgggacgagttgcactgggcacagagactaggaagggactgatgtgtaaaagaatgcctggacgtcaggcacctcacaccatttgcccattttacgccaagaattatttagatcttgtagggtggaaaaattgaaagtgccattttctggctatttggaactactgttgagtttgtattggggtcaagtggcattgcagaagaaaataagacgcttagattttaggtcaggtgagaattgaagagattttaagttcttaagaatacatgctaagggagaagaaaggaatggaaggtggaagcttgcccatagtgaaggaggcaagcccagagaaaagagtagagacacggagaaggggtgggggtttcttcccctccagaaaagcagagaaagggttggggcgcggaaataagggattggggcgcagagataagagattggggcgtggaaataagggattggggcacagagataagaggttggggcgtgaaaataagcgattggggggttcttgccccctaggaaagcgggacttgctgctaagggtgaaggagaaggggttgaggggtacttgcccctgccccagaaaagcgggacttgccgctaagggtgaaggagaaggggttgaggggtacttgcccctgccccaggaaagcgggacttgccgctaagggtgaaggaccaaggcaggcatccctgcgtggtctgaaacgtgaaatcagagaggcgtccctgcaatgattaaacaccaagggaagactgccttcccagtccgtgaccggcgccggagttttgggttcacggataaaacatgtctcttttgtctctaccagagaatgaaaggaattgaaattaagagaagggagagattgaagtgtggcgccaagattgaaaggagaaagaggttgagggatagtgagggaggttggagaacagagtaaaaagaggccgcttaccggatttgaaattggtgagatgtttcttgggctggttggtctgaggacctgaggtcgtaggtggatctttctcacggagcaaagagcaggaggacaggggattgatctcccaagggaggtcccccgatccgagtcacggcaccaaatttcatgcgcgtccgtgtgaagagaccaccaaacaggctttgtgtgagcaacgaggctgtttatttcacctgggtgcaggcgggctgagtccgaaaagagagtcagcgaagggagataagggtggggccgttttataggatttggttaggtaaaggaaaattacagtcaaagggggtttgttctctggcgggtaggagcggggggtcgcaaggtgctcagtgggggtgctttttgagccaggatgagccaggaaaaggactttcacaaggtaatgtcatcagttaaggcaaggactggccatttacacttcttttgtggtggaatgtcatcagttaaggtggggcagggcatattcacttcttttgtgattcttcagttacttcaggccatctgggcgtgtacgtgcatgtcataggggatgcgatggcttggcttgggctcagaggcctgacattcccaaagagaatacgaagctaagtgagggaagagatttttttatgtttcattcctagtgctgtgtgggcacttagcaaataattttagaacaaatgaatacactttgcagattttaatagagaaggtttttacttactgaaggttgaagattttgtatgtgtttcccatctcgcagcattgacatgtaattgtagggattttaaaggacatggtattactttcaattgcatcattaatagcattaattaagggaatttttcaccccgattccagggaaggacattctgctctggcaaccatattcagtcactctagctgcctaccactcacaaaggctgagagctgctaaaatcttacataaagctgaaagttgaagaagtctagggttttacataccagtgagcgcaatcttagaacttcagcatgccatacatgctaacgtataaactaatatgtaagtttacatgccaacaatataaatttgaaatgaacccttattaagaaaatacttgggcttctcaagtgaattgtcatgttactgactttctccctatatgcctaaaacctccttgattttattatatgctgcattctgtactcatcagatccacccgaactagcctcatttagattttgaaagagatattgtctctcaagtagcccattgtttgtataatgtgttcctaaaacatttctgtgccaactcctttgggcttatttcctaaaacacagtccatacctgaaggtaagagaggttgtgcaatcctagactcttccttcccacctcttgtgtattttttgaaatccccctgtgatctgtatttggatctattggaaaaaaaaaaaaaagccaagctcgatgaagtatttaaagatatttattctgagccaaatatgaatgactgtgtcctggggtgcagcctcaaggggtcctgagagcatatgcctaagttgtggtcatgttacagcttggttttatacatttaagggagactgaagttacaggcaaagacataatacatgtaaggtatacattggtttagcctggaaaggcaagacatttcaaagggataggggacacttacaggtcacaggtggattcaaagatttctgactggcagttggttgaaagaattaagctttgcatgaagagttgaagtcagcagaaagaaatccttgagttaagaggggtgtggaagccagggttttgttatgtagatgaagcctctaagtggcaggcttcagagagaatagatggcaaatatctcttttcagacctgaaaagatgtcaaagtcttagttgaatctctcctggattaggaaaagacctagaaagggaaggaaattctctagcgaatgcaaatatcccccacaggagaagactttatatgaccatttccaaataaataaatatattttggagtaaaataccttgatttccttcagggcctactatctgcctttcagtgctatgccagagtcaggttggaattttgtatattattgctacaaagagtctgttttgtcagtcttatgattgtggttttaacattagtgctgatcagttctcccaaaactccaaagggagggggtataaccaggtatgtctgacccttcccccacttcctggcatggcctgaagtactttttc

SEQ ID NO: 1880990 - DNA, 4001 bp, Homo sapiens; identical to SEQ ID NO: 315632

SEQ ID NO: 1880991 - DNA, 4001 bp, Homo sapiens
aacagatatattaacactctcccttcttaatttcttaacactgacactggcaagctacaacctacttccaataagttgcactcaaaatgattttcagtgcaacttgagttgctattaggcctaaggcaaaattcaaatggtggttgcttggatgtcttaaatctcttttaattttttttttttgagatggagtctcactctgttgcccaagctggagtgcagtggtgtgatcttggctcactgcaacctccacctcccaggttcaagcaattctcctgtctcagcctcccaagtagctaggattacagcatatgccaccacacctagctaatttttttgtattttagtaggtttcaccgtgttgccagactggtcttgaactcctgagctcaggaaatccacctgcctcggcctcccaaagtgttaggattacaggcatgagccaccacacctaaatttttaatttttttccccacttcaataagctggtctaagatttcttaactcccttctcactttctaaatcttattctctgacccctctaacgcaacaggtactttataaaggtttttggttgtccaaagcactatccacactgctctccattccttccttttctatgaaaaatgcttctagtctttgctgatctcaggtgttattttggagagacagggtctgactctgtcacccaggatggagcgtggtggtgtgatcacagctcactgcagccttgaccttcttatctcagggaaaaaaaaatattaaaagagatttaagacatccaagcaagcaccccctcagcctcccaggtagctaggactacaggcacatgccaccgtgcctggctaattaaaacaaattttttttagagatgggatctcactatgttgcctaggctggtttgaaactcctgggctcaagtgatcctcctgccttggctttccaaagtgctgggattacaggtgtgagtcaccatgcccagcctctctctcagatgttattacgtaattaatttactttttctaaagtgtaaataattgacagacttaactatcctttaaaaaaaaaaaagccttgaaaatggatgcaatgcacggcaaaaatccatgcttcaaaaatccaagaattttttttttttttgagacagagtctcgctctgttccctaggctggggtgcaatggcacgaccttggctcactgcaacctccacctcccaggttcaagctattctcccgcctcagcctcccaagtagctgggattacagacatgtgccaccacgcgtggctaattttttgtatttttagtagagacagggtttcaccatgttggccagcctaatctcgaactcctgacctcaggcgatccacctgcctcggcctcccaaagtgctgggattacaggcgtgagctaccgcgcccagcaaatccaaaaatgttttacatcgaggccgtggtgaaacaatctaatgggatgtcacaaccttgttcaaaattttcaatggtgatgtttgttgacttcttgtttccagactggcatgtaaaaatcttggaagttgctactcagtcctaacaacaagtaaaaagctagacaaaccaaaaatcaacagctcttcttcataagttccataaaataagtaaggttactgggcatactactgcctccaaaattggagggactgaaagcaagtgaatgtagagaatcacaacttaccagagcagaaactagccgctgaagcctccaatggaacaagtaccaggataggtaaacctgaaggatcagtgtggacaagtcagagggacctagccattccctcttccccgctccccaattttttttaagctcctggatctctcacaggtcctcagggtgattatccatgcctctggtagtgggtggggaaaaggagccattttgaaatacgccagagcattttgttcttcttaacaaggtctgccctcaggagaagctatttaatgagaagctaacctgctggggttttatcagagcctaactgacttgggggaagggaaatacccaactctagcccgctctagctaccctgcccaacccaagggggttgtagtgaactgagacctgtgaagttcacagtctagatgcataggcttactaaaattctcaatggtctcccttctcactcagaatgaaaactaagttcttaccatggccgacaaggtctcacatggcccttagctctccaatgtcatttcctaccactctctcactggcttactcatccagttacatgatccgggtcttagctctttctcaggtgccatttcctaccactctctcactggcttactcatctagttacatgatctgggtcttagctctttctcaggtgtcatttcctaccactctcttgtttacttcaccatagttgcacctggtctactttgctgtcaatttgtgaaggaagctcctgttttaagggtattcactcttgctatgcccacagcctggaatattcctccccattatagatatctatagggcttttattttaaagtttctgcccactttttatctcatcagagtgattttctttgagcagtctatctgaaagagcaactctctcccttcctttttttttcggcacttattaccaactgacgtatgtttgcttactgtctacttctctccattagaatgtaagttctatgacagcaggaacagggactttgttttgttcactactgtatctctagttcttggaatagcgtctggtgcacagtaggcacttaaatattgttagaattttacaattttttgccaagcacataaagaagtaaagcacactttaaaagtcctctagcaatatattaatacataagagaaagatgcaaagcttttgaaaaattatagagacttcttttataattctaaacttaataaatgtcaaaggtttattaattattcttaaagaatattccatccatcaatttatatatgctttgtcttttgcaaataaagataaaccatctctcaagcaaattcaacatggttcatcaaaataaaaagggagagaatcaaacaatttttatgcttaattttccaaagactggattagaataagatagtgtaggggaggaaaaataattatttccttaaccctcatgagttcttagttggaatgaacccttgtaacaacagaaaaacaaagaagtttattaatgcatgcagcgcatatcaccttagagaaacgtaaatgcggagtaactcaaaacagtggcttacaactctggcttatgtaagtatcttcaacgaagaacaataaatttctggagagaagaaagaacaaaggaaagagttttaggcttccaagggtgagaaactgtgggaatgtaaatctacagaaggaaactaatacagtaaggtttgtttgcagattcgtctggggctttctgggctggtaagagcctagacagaatttatgtcctgccttttaggcagaaaaaggagagagcgagctttccctccttaattgccttcagctcaaaaataatttttatataaaagaggtatattttggcctggcacagtggctcacgcctgtaatcccagcactttgggagtctgaggcaggtggatcacgaggtcaggggttcgagaccagcctggccaacatgctgaacccttgtctctactaaaaatacaaaaattagccaggcatggtggcaggtgcctgtaatctcagctactcgggaggctgaggcaggagaatcacctgaatctgggaggcggaggttgcagtgagctgagatcgtgctattgcactccagcctgggcaataagagcaaaactcagtctccgggaaaaaaaaaaaaaggcatattttgaggtgacattctggtttccttcaatagtttaccttcaagaataagattgttagagctagaagggaccttattgatattcttagctaacatgtttattttataaatggagaagttgaggctttcaaaggtaaagtggcat

SEQ ID NO: 1880992 - DNA, 4001 bp, Homo sapiens
gggccagctccctggttgcactggtcagccaggaattaccagggcagccatggcaacaaggtttgatgggcttgccatctgagtttaagtagaaatgcagaatgtgctcataccagcctgggttacattgtcctcttacaggggcctcaagcccagcagcaagctttggctcctgagttaggcaaactgtctcggctggtatgtgacccacggcaaggcacttcattgcttcagagctccttccatgccataaaaggccctacaagacctggtcctaatccctctctctggcctgttctccctcacccctggcccaccctgctcactccactccagccacactggctgccttgctgtttttcctcaaccatagctggcttgtttccaccacagggcctttgcatatcctgttccccaagcccttcccatggctggctgcctcaccactcaggccccagttcaaataccacctctttggggaaggcttccctgattccccgaccttggtgactcttctccccagttgctccattcaccatttccctgttttattggctttaaagccactctcatctggtcttttcttgtttattcatttatttgtttattctctggctctcccatgcaagcagagcctcatctatcatgggtactgctgatccatggtgcctggctcatggaaggcatttattaaacattttgtgactgaataaaaacaccagctaacaccgacatgcatttaccatgagccaggcactgatccacaggcttttgtactcaacgctgacaacaaccctaagaggtaggtatcattatatcccccattttattaataagaaaacaatagcacagagagatgcagtcacttgcccaaggtcacacagggccaggggttgggccaggattcgaagcaggcaggctgtctcctgggtctgaactctcaactacttcaccctaatcaaacaatctctctggtcaaaagtgagtgataataatagtacccacctcgtcagtgttgagggtgagccgaagttagcattcagtgtgggcatgtgaacaactatagtcaatattgaatggagacctatgatgcttttatgaaggtttctattttgggttaaaaatgcacaaatttctcctgactaaaattgatctctgagtgctaaatattttatgtcaatggaataacgcaaatgattaagcaacaccccataaaatggggcagacccagggaggaatatatatccgaactgactcatcccagtgagctcactgcacatgaattacaaatggagaggggtgcattaagcccctctgctggcagaagggaggctgctgcctgccaggcgcctgtgctgagaatggcaggtccccagggagaggagaggccacccccttctctgtctcttccatcacaggcgtgaaagcctcagcgcatgatccgattctgtgcagtgctcgacatacagatgagaacactgaggcacgagggacagcctgtgacctggtcaccgtgctcaggatgaagtggttacccgcgggcctgagggcgctgactttttagaatgggcgagggcagctgtgtcccagtgaccagaacgattactacctttaaaaagtcgtgaaaatgatcgtgaactgtaccccacaccgagcacgcgtctgcccccccaaggcggtggagacgccctcatcttccgccgccagctcgcggggcaggaggggtgcgagcgactctggccaggccccagggacggggaccgggtctcgcggccctgaccggggagagcccaggaactcacgtggcaggagcgccgggggtttcagcacggagacccatcccgtctgcccctggactcccgcgagccccgcgggcctctccgctcgcccgccgcccccctgccaggggaaggagcgcagcgtgcgcgccgccaggaagcggcgctcgaaactctgcagcaagagttcggtccccgcattctcctcgggcgccatgacgtgggcggggccgcagcgttgccgggagaccgggcggaagccgggcctggactgaagagggggtgggcccagggcagtgcgcggcggcagagagggggcggggcctgggggtagggtcaggaggagcgtcctgggggcgggctgtagggcggggccaggatgagcgttaggagggcgaggcctggggtagggccaggataagcgtcgttggggcaggtcctgggtagagtccaggttggcgggtcctggggcggagtcaggatagggcgatcctggaagctgggcttcagaagcgtccaggttggtggcgtcctggaggcggtgccttgcgtgtgggcaggataagagtcctggaggcgagcattagagcggggataaacgccattgggttcaggaggcgggactcagagcagagcccaggagacaggtcttagggtggggctaaggccagacccagagaagggctcaggaggcggggccggggcggggggttgactatgtcgtagcacatggccaggcggtgcgcggactctgggaggcagagctttggacgggccgacgtggggaggggcccagggtccaggaggcggggccgagtccgggctgccagctgcgctcaggaggcgggccctgggaggcggagcttagggaggggccggtgtcgggagggacccagggactgggaggccggtcggggctgggctcaggggccgagacctagctgggcttggggcggggccgagacggagcgagggatccagggtgtgggaaacggggaggggtttgaggaggggatcggaatgtggctcaagttgggaggcgttacctgcggagggtttgaggcacgcccaggagcgagcccacggtcggccgacgcggggccaggggcgggccccaggatccggagcttcgggcggggccgagtctgggtttggggcccgggaggcggggccagttagggcgagggtccctgggatcgtcgggtcaggccttgggctaacgtagacactctcgcagtacctccgccttcaggaaggtctttttagcaggggccttacaggtgcacgcttcggtcctggaggccttatcctaacctctccatcagcgccacccgtctggggcccgaaaggagggagctttccctctgtcctccagcctttggactgtctccaaacaagccattcgttcaccaaatacttattaagcacctaccatgtgcctgacaagggagatgtaacggtgagaaagactaggtgtggtctgggccctccagaggctcaggggctcgtggaagaagtggacattgaagtacttatcacacaaatgagtataaaagtacaatagcgatatctgccacaaagatgagcagacagagctagcggggcttgcaggaggagttttgatcttgcagggacaggaaagaggagttagctcctgcggggtgggatgggggggtggtggtgatatagacgtggggacagagtggaaaacaacaaaaatataattattttagttcaaagttattgtgtcttgagttgaaaggcagggcagttagcaacacagttcagatttcagtactgcccccgaaatctgaactgtgttcaaagtctaaaacgtttaccttagcaaattcctcataaaactccatttggaagagtctcgagagctaatttgttaagtatacttgcaaaaggtagatgaggagacagataaaatcttattacctctttcagatgagaggcacttgagccctgctcagctatgagaataagagaggggaattaattcgaattgaatacacttgttctcttatagctgttgttccccaccagaaccaaatgagcgcaagatctgacaaagaaaaaaaaggttcatcttttattcccccaaacactttcatttaaatcaagaggatgggatgtggttattgctgtgtttttagacagaatcaacggtttctgtgtctgagatgttgcatacaccctctcagtccctctatcctg

SEQ ID NO: 1880993 - DNA, 4001 bp, Homo sapiens
actcttggccgcattagtcctggctacttagcggccacccgggtcatgggccagctccctggttgcactggtcagccaggaattaccagggcagccatggcaccaaggtttgatgggcttgccatctgagtttaagtggaaatgcagaatgtgcccataccagcctgggttacattgtcctcttacagtggcaagtccagcagcaagctttggctcccgagttaggcagactgtctcggctggtatgtgacacacagcaaggcacttcattgcttcagagctccttccatgccataaaaggccctacaagacctggtcctaatccctctctctggcctgttctccctcacccctggcccacactgctcactccactccagccacactggctgcattgctgttgttcctcaaccacagctggcttgtttccaccacagggcctttgcatatcctgttccccaaacccttcccatggctggctgcttcaccactcaggccccagttcaaatgccacgtctttggggaaggcttccctgattccccgactttagtgactcttcttcccagttggtccattcaccattcccctgttttcttggctttaaagccactctcatctggtcttttcttgtttattcatttatttgtttattctctagctctcccatgcaagcagagcctcatctatcatgggtactgctgatccatggtgcttggctcacggaaggcatttattaaacattttgagactgaataaaaacactagctaacaccgacatgcatttgccatgagccaggcactgatccacaggcttttgtactcaacgctgacaacaaccctaagaggtaggtatcattatatcaaccattttattaataagaaaacaacagcacagagagatgcagtcacttgcccaaggtcacacagggccaggggttgggccaggatttgaagcaggcaggctgtctcctgggtctgaactctcaactactacaccctaatcaaacaatccctctggtcaaatgtgagtgataataatagtacccacctcgtgggtgttgatggtgagcccaagttagcattcagcgtgggcatgtgaacaattatagtcaatactgaatggagacctatgatgcttttatgaaggtttctattttgggttaaaaatgcacaaatttctcctgaccagaaatgatctctgagtgctaaatatttcatgtcaatggaataacgcaaatgattaagcaacaccccataaaatggggcagacccagggaggaatatatatccaaactgactcatcccagtgagctcaccgcacatgaattacaaatggagcagggtgcattaagcccctctgctggcagaagggaggctgctgcctgccatgcgcctgtgctgagaatggcaggtccccagggagaggagaggccacccccttctctgtctcttccatcacaggagtgaaagcctcagcgcatgagctgattctgtgcagtgctcgacatacagatgagaacactgaggcccgagggacagcctttgacctggtcaccgtgctcaggaggaggtggttacccgcgggcctgagggtgctgactttttagaatgggcgagggcagctgtgtcccagtgaccagaacgattactgcctttaaaaagtcatgaaaatgatcgtgaactgtaccccacaccgagcgcgcgtctgccccccaagactgtggagacgcccccagcttccgccgccagctcgcggggcaggaggggtgagagcgactctggccaggccccagggacggggaccgggtctcgtggccctgaccggggagagcccaggaactcacgtggcaggagcgccgggggtttcagcagggagacccatcccgtctgcccctggacttccgcaagccccgcaggcctctccgctcgccccgccgcccacctgccaggggaaggagcgcagtgtgcgcgccgctaggaagcggcgctcgaaactctgcagcaagagtttggtacccgcgttctcctcaggcgccatgacgtgggcggggccgcagcgttgccaggagaccgggcggaagccgggcctggactgaaaagggggcgggcccagggtagtgcgcggaggcagagaggtggcggggcctaggggtagggtcaggaggagcgtcctgggggcgggcgctagggcggggccaagatgagcttaggagggtggggcctggggtggggccaggatgagcgtcatgagagcgaggcctggggtagggccagaattaacgtcgttggggcaggtcctgggtagattccaggttggcgggtcctggggcggggccaggatagggcgatcctggaagctgggcttcggaagcgtccaggttggtggcgtcctggaggcggtgccttgcgtgagggcaggataagagtcctggaggcgggcattagggcggggataaacgccattgggttcaggaggcgggactcggagcagagcccaggagacaggtcctagggcggggctaaggccagacccagagaagggctcaggaggcggggccggggcggggcgttgactatgtcttagcacatggccaggcggtgcgcggactctgggaggcggagcttaggacgggcccacgtggggaggggcccagggtccgggaggcggggcggagtccaggctgcgggctgcgctcaggaggcgggccctgggaggcggagcttagggaggggccggtgtcgggagggacccagggactgggaggccggtcggggctgggctcaggggcccagacctagctgggcttggggcggggccgagacggagcgaggggtccagggtgtgggaaacggggaggggtttgaggaggggatcggaatgtggctcaagttcgggaggcgttacctgcggagggtttgaggcaggtccaggagcgagcccacggtctgccgacgcggggccaggggcgggccccaggatccggagcttcgggcggggccgagtccgggtttggggcccgggaggcggggccagttagagcgagggtccctgggatcgtcaggtcaggccttgggctaacgtaggcactcgcagttcctccgccttcaggaaggtctttttagcaggggccttacgggtgcgcgcttcggtcctggaggccttatcctagcctcctctctccatcagcgccacccgtctggggcccaaaaggagggagctttacctctgtcccccagcctttggagtgtcaccaaacaagccattcgttcaccaaatacttattaagtgcctgacaacggagatgtaacggtgagaaaaactcggtgttgtccaggccctccaggggctcaggggctcgtggaagaagtggacattgaagtatttatcacacaaatgagtgtaaaagtacaatagcatatctgccacgaaggtgagcagacagagctagcggggcttgcaggaggagttttgatcttgcggggacaggaaggaggagttagctcctgcggggtgggattgggggttgtggtgatatagacgtggggacagagtggaaaacaacaaaaatataattattttagttcaaagttattgtgtcttgagttgaaaggcagggcagttagcaacacagttcagatttcagtactgtccctgaaatctgaactgtgttcaaagtctaaaacgtttaccttagcaaattcctcataaaactccatttggaagagtcccgagagctaatttgttaagtatacttgcagaaggtagatgaggagacagattaaatcttattacctctttcagatgagaggcacttgagccctgctcagctatgagaataagagggggaattaattctaattgaatacacttgttctcttatagctgttgttccccaccagaaccaaatgagcgcaagatctgacaaagaaaaaaaaaggttcatcttttattcccccataccctttcatttaaatcaagaggatgagatgtggttattgc

SEQ ID NO: 1880994 - DNA, 4001 bp, Homo sapiens
cctggttgcactggtcagccaggaattaacagggcagccatggcaccaaggtttgatgggcttgccatctgagtttaagtggaaatgcagaatgtgcccataccagcctgggttacattgtcctctcacaggggcctcaagcccagcagcaaactttggctcccgagttaggcagactgtctcagctggtatgtgacacagggcaaggcacttcattgcttcagagctccttccatgctgtaaaaggccttacaagacctggtcctaatccctctctctggcctgttctccctcacccctggcccacactgctcactccactccagccacactggctgccttgctgttgttcctcaaccacagctggcttgtttccaccacagggcctttgcatatcctgttccccaagcccttcccatggctggctgcttcaccactcaggccccagttcaaaagccacctctttggggaaggcttccctgattccccgactttggtgacttttctccccagttgctccattcaccatttccctgttttattggctttaaagccactctcatctggtcttttcttgtttatttatttatttgtttattctctggctctcccatgcaagcagagcctcatctgtcatgggtactgctgatccatggtgcctggctcacggaaggcatttattaaacattttgagactgaataaaaacactagctaacaccgacatgcatttaccatgagccaggcactgatccacaggcttttgtactcaaccctgacaacaaccctaagaggtaggtatcattatatcccccattttattaataagaaaacaacagcacagagagatgtagtcacttgcccaaggtcacacagggccaggggttgggacaggatttgaagcaggcaggctgtctcctgggtctgaactctcaactactgcaccctaatcaaacaatccctctggtcaaatgtgagtgataataatagtacccacctcatgggtgttgagggtgagcccaagttagcattcagcgtgggcatgtgaacaattatagccaatattgaatggagacctatgatgcttttatgaaggtttctattttgggttaaaaatgcacaaatttctcctgaccagaaatgatctctgagtgctaaatatttcatatcaatggaataacgcaaatgattaagcaacaccccataaaattccagggaggaatatatatccaaactgactcatcccagtgagctcactgcacatgaattacaaatggggccgggtgcattaagcccctctactggcagaagggaggctgctgcctgccatgtgcctgtgctgagaatggtaggtccccagggagacgagaggccacccccttctctgtctcttccatcacaggtgtgagagcctcagagcatgagccgattctgtgcagttctcaacatacagatgagaacactgaggcacgaggggacagcctgtgacctggtcaccgcgctcaggaggacgtggttacccgcggtcctgagggcgctgactttttagaatgggcgagggcagctgtgtcccagtgaccagaacgattactgcctttaaaaagtcgtgaaaatgatcgtgaactgtatcccacaacgagtgcgcctctgccccctaagacggtggagaggcccccagcttatgccgccagcccgcggggcaggaagggtgtgagcgactctggccaggccccagggatggggaccgggtcgcgcggacctgactggcgggagcccaggcactcacgtggcgggcgtgtcgggggcttctgcacggagacccatcccgtctgcccctggactcccgcgagccctgcgggcctctccgctcgccccgccgcccacctgccaggggaaggagcgcagcgcgcgcgccgccagaaagcggcgctgcaaactctgcagcaagagttaggtcccagcgttctcctcgggcgccatgacgtgggcggggccgcagtgttgccgggagaccgtgcggaagccgggcctggactgaagacggggcgggcccagggcagtgcgcgggggcagagagggggcggggcctgcgggtagggtcaggaggagagtcgtgggggcggctctagggcggggccaggatgagcgttatgaggcgggggcttggggtggggccaggatgagcgtcatgagggcgaggcctggggtagggccaggataagcgtcgttggggcaggtcctggggagagttcaggttggcgggtcctggggcggggccaggacagggcgatcctggaagcggggcttcggaagcgtccaggttggaggcgtcctggaggcggggccttgcgtgggggcaggataagagtcctggaggcgggcgttagggtgggggtaaacgatgattgggttcaggaggcgagagtcggagcagagcccaggagacaggtcttagggcggggctaaggccagacccagagaagggctcaggaggcggggccagggcggggcgttgactatgtcgtagcacgttgccaggcactgctcgaactctgggaggcggatcttaggacaggccgacgtggggaggggcccagggtccgggaggcggggccgagtctaggctgcgggctgcgctcaggaggcgggccctgggaggcggagcttagggagggtccggtgttggcagggaccaagggactgggaggcggatcggggctgggctcaggggccgagagggagctgggcttggggcggggccgagacggagcgaggggtccagggtgtgagaaacggggaggggtttgaggaggggattggagtgtggctcaagttcgggaggcgttacctgcggagggtttgaggcaggcccaggagcgagcccacggtctgccgacgcggggccagcggcgggccccaggatccggagcttcgggcggggccgagtccaggtttggggcccgggaggtggggccggttagggcgagggtccccgggatcgtagtgtcaggccttgggccaacgtaggcactcgcagttcctccgccttcaggaaggtctttttggcaggggccttacgggtgcgcgcttcggtcctggaggcgttatcctagcctcctctccatcagcgccacccgtctggggcccgataggagggagctttctgtctgtcccccagcctttggactgtcaccaaacaagccatccgttcaccaaatacttattaagcgcctaccatgtgtctggcaagggaggtgtaacagtgagaaaaactaggtgtggtccaggccctccaggggctcaggggctcgtggaagaagtggacattgaagtacttaccacacaaatgagcatgaaagtacaatagcaatatctgccacgaaggcgagcagacagagctagcagggcttccaggaggagttttgatcttgcagggacaggaaggaggagttagctcctggggggcgggattgggggtggtggtgatatagacgtggggacagagtggaaaacaacaaaaatataattattttagttcaaagttattgtgtcttgagttgaaaggcagggcagttagcgacacggttcagatttcagtactgcccctgaaatctgaattgtgttcaaagtctaaaacgtttaccttagcaaatccctcataaaactccatttggaagagtcccgagagctaatttgttaagtatacttgcagaaggtagatgaggagacagattaaatcttattacctctttcagatgagaggcacttgagccctgctcagccgtgagaataagagggggaattaattctaattgaatacacttgttctctcacagctgttgttccccaccagaaccaaatgagcgcaagatctgacaaagaaaaaaaaaggttcatcttttattccgccaaacactttcatctaaatcaagagggtgggatgtggttattgctgtgtttttagacagaatcaacagtttctgggtctgagatattgcataca

SEQ ID NO: 1880995 - DNA, 4001 bp, Homo sapiens
ttgctgagcatacttctcagatgtaatggtttcaccaggattcagaaaactgtagtggatcagatgggcagcagaccaccgaacagtgaccatgaccttttttttggtgcaagtttggctttgggaactgctttggagctgcctcttggtccaaccactgagctggttgttgtataaaattcacttttcattacatgtcacaatccgattgagaaatggtttgttgttgcgtagcataaaagaagactacacttcaaaacgatagttttgatttccgctcagctcatgaggcacccacttatcaagctttttcacctttccaatttgcttcgaatgctgaacgaccctaatgaccgtagaatagtcaacgctgagttcttctgtaatttttcatgtagttcaatgattgctctcaattggtcgttgtcaacttcccatggcccatatcacgttcctcatcttcaaggctctcttccttgcaaaacttcttaagccaccactgcactgtatgtttgttagcagttcctgggccaaatgtgttactgatgttttgagttgtcttcgctgctttatgaaccattttgaactcgaataagaaaactgctccaaatttgctttttatctaacatcattagacaaaaagcatattctaaaataaacagcaataagtcattagcaaaaaaataaagtgagaaatgtgcattaaaatgatccacatttatttaagaatgtattccaatatcaaacagcaaatttcaaaaatgcaaaaacgcaattgcttttgcctctcaggtacatcacttgacctttctagttctcacccacttcacccctaaaatcggaaaatctttctgcaagaaaaaaatttgaccacattcccttaaggcctcttccaatttcaagagctgtgctttaccatgacaaaacgaacctagctcttttcccaattttgcaacgtcagaaaaaggaggaaggggaaatagctgtgtttaaaacattttttaccaaatagaaatattataagattatggaaaaaaaaatactaaatgttggagtcatcctgataaaaacccaaatggatactgtgtgggaaaaaaagttaacccatccattctggagtcaatatttattcttaataagcaagaaaactgaagaaaaaaaatcagtataagatctacagcctgtagcctaaacacttcagggcatttaggataaataagcgcctgcaccttcccaggcaagtcaaaaccacgacataaaacagagaaatatgtaaggaaaacctacagcccaagagtttaagagcaagacaggccaatttcttcaaataaatttaagcaatgctgctaaaagctgctttacacatccctattaccatgtactacttccaaatttcgaggaggaggggcatggaattacacaagatctggatcgtatgtttactaagaaaccaaaaattataggttctggggcgtttcaacatttcacctgagatggccagaacgggcgcatctttagacctttaaaacctaaattaaaaactatcagtaccgaggaagggccgaagagctcaatacccacccaatacaacccccacttccgacctacagacgctctgctgagcggctgggagaatccgtcgcgccagtcagggcccggcttcttccaacaacagacactttgcgagccttccagaagccttggctaagcgagaaggcagggtggaggccgccactgcgaggacggtccccacccagctgcgaggagctcgcggttccccagaggggcgggcctgcgtccgggtaaccgtgcgcgacgtccacgagtttttaggacgaccagcccttcagcctctaggccccgacgcctgcgccatttaagccacatatccgcccgcccggccgcggccaaggccggcggcagctacgtagccgccgccgcccggggccccacagcccacgggccggatggaccgagcgccggctgcggcgttccggtgcgcgcgcgcgcctcagccaatcgcgttctcgcccgccccccgccgcggcggcgaggctggcgctgggaagaggaagaagaacattcgccctcctcctaccagcgcgcgggcggcggcggcggcggcaccggggtcacgaactctgacctttcactgacaaaaacaataacaaacccccccttctccgcgaccccggcggcgcccccgggcccgtccccgccaccccgctcccacctcggcgtctcgtctctcgcccgctgccccgcgagcccgcggcccccgggctcccgccatccgccgacaccgggagcccgggctccccgcgccctgccctccgcgccgggggccgcccgccgcagacacgggacccgcttcgaggccgctttggcgccaaatcctgaggtaaaattgaaagagggtcgggcgggctcgggccggcggcggagggggcgggcctggcgcgcggacatggaggcgccgcggcggcggctgaacccgacccttttacctttgccacggggtggcggcggcggcgcccggcgctttgcatagtgggccgggccgctcccctcccctccccgcccgcggccgggcgaagcgagcgggttccccctgaccggcccggccggcgcaagggtgggggtggagggggaatggccgcggccccgccttatagttggccctccgccagcgccgccattttgttctcgacggagatggctccggctgggcgggctcccttcctccttatcctcctcctcctcccgcctgcagtcccttcttccttctctgccgggattttcacccctccgcttctagtccgcctttggcggccgtcgcagcccaaccgccgttttttctgaaggggagggtaaaagaaaaggaggaaggcgggtgcgaggcgcgacctcgtgagcgacggatgggctggctaattggcgcccagataggagggccggggcctgtggcaccgcccccctaagctttgctgattggctgaggcggaagagggtggtccttatggggcgcgggagccctggcggggcgggagtagaggccggggcgaagagtggggccgggtcggcgggggcggggccgggggcggggcgcgaggggcgcggccgggtggagaggccggcgcctggtcttgggtcagcaggtgggctgcttccctccgcctggaacgcgtctcgaatgagtactgaggaacaatagtaataaaggtgatgaagcatttcgagtccacgatgcgctctcgtgggaagaggttttcggaaccaggacacttttcagggctcctgctcgttatttcgcagcggccttggcgaatcccctaatgaggctcaattttatcgactgtaaatggggggcatgcgcattcttgccaggccggacctcccttctgagcattgtttgtggggctctactcagaaaatggaggcaacgctactttgcgagcttcagagtcacttgaaaatggtgttattgttaaaaatgggattacagccaccaggagaggcaagcgttaagggtatttggggtttgagagagcacaattcgggagtgattctcttctcattcgttcgctgaatacatgttgacttagttttttaggcactggggacacatctggagaaccagctgtacaagacccctgccctcactagagttgggggctggggggtgaatagacaaataattccagagagtcataagttctgtgaaagaaaagaagccaaatgacctgctgaagaagacctgaggcgttaatttagatggaatggtcagggtggcctctctgagtaagtgatgtttgaacagaggaacccaagggaggaatggcattccagacaggacatcccgtgtaacggccctggaggaagagcatttgatgtgatcgagaactggctgcttgtggctggagagttggttggaactagtaattgtccattatcccactttgtttccaagccaaaggctgtgaaatatagcaacggtagtg

SEQ ID NO: 1880996 - DNA, 4001 bp, Homo sapiens
tttcatgtagttcaatgattgctctcaattggtcgttgtcaacttcccatggcccatatcacgttcctcatcttcaaggctctcttccttgcaaaacttcttaagccaccactgcactgtatgtttgttagcagttcctgggccaaatgtgttactgatgttttgagttgtcttcgctgctttatgaaccattttgaactcgaataagaaaactgctccaaatttgctttttatctaacatcattagacaaaaagcatattctaaaataaacagcaataagtcattagcaaaaaaataaagtgagaaatgtgcattaaaatgatccacatttatttaagaatgtattccaatatcaaacagcaaatttcaaaaatgcaaaaacgcaattgcttttgcctctcaggtacatcacttgacctttctagttctcacccacttcacccctaaaatcggaaaatctttctgcaagaaaaaaatttgaccacattcccttaaggcctcttccaatttcaagagctgtgctttaccatgacaaaacgaacctagctcttttcccaattttgcaacgtcagaaaaaggaggaaggggaaatagctgtgtttaaaacattttttaccaaatagaaatattataagattatggaaaaaaaaatactaaatgttggagtcatcctgataaaaacccaaatggatactgtgtgggaaaaaaagttaacccatccattctggagtcaatatttattcttaataagcaagaaaactgaagaaaaaaaatcagtataagatctacagcctgtagcctaaacacttcagggcatttaggataaataagcgcctgcaccttcccaggcaagtcaaaaccacgacataaaacagagaaatatgtaaggaaaacctacagcccaagagtttaagagcaagacaggccaatttcttcaaataaatttaagcaatgctgctaaaagctgctttacacatccctattaccatgtactacttccaaatttcgaggaggaggggcatggaattacacaagatctggatcgtatgtttactaagaaaccaaaaattataggttctggggcgtttcaacatttcacctgagatggccagaacgggcgcatctttagacctttaaaacctaaattaaaaactatcagtaccgaggaagggccgaagagctcaatacccacccaatacaacccccacttccgacctacagacgctctgctgagcggctgggagaatccgtcgcgccagtcagggcccggcttcttccaacaacagacactttgcgagccttccagaagccttggctaagcgagaaggcagggtggaggccgccactgcgaggacggtccccacccagctgcgaggagctcgcggttccccagaggggcgggcctgcgtccgggtaaccgtgcgcgacgtccacgagtttttaggacgaccagcccttcagcctctaggccccgacgcctgcgccatttaagccacatatccgcccgcccggccgcggccaaggccggcggcagctacgtagccgccgccgcccggggccccacagcccacgggccggatggaccgagcgccggctgcggcgttccggtgcgcgcgcgcgcctcagccaatcgcgttctcgcccgccccccgccgcggcggcgaggctggcgctgggaagaggaagaagaacattcgccctcctcctaccagcgcgcgggcggcggcggcggcggcaccggggtcacgaactctgacctttcactgacaaaaacaataacaaacccccccttctccgcgaccccggcggcgcccccgggcccgtccccgccaccccgctcccacctcggcgtctcgtctctcgcccgctgccccgcgagcccgcggcccccgggctcccgccatccgccgacaccgggagcccgggctccccgcgccctgccctccgcgccgggggccgcccgccgcagacacgggacccgcttcgaggccgctttggcgccaaatcctgaggtaaaattgaaagagggtcgggcgggctcgggccggcggcggagggggcgggcctggcgcgcggacatggaggcgccgcggcggcggctgaacccgacccttttacctttgccacggggtggcggcggcggcgcccggcgctttgcatagtgggccgggccgctcccctcccctccccgcccgcggccgggcgaagcgagcgggttccccctgaccggcccggccggcgcaagggtgggggtggagggggaatggccgcggccccgccttatagttggccctccgccagcgccgccattttgttctcgacggagatggctccggctgggcgggctcccttcctccttatcctcctcctcctcccgcctgcagtcccttcttccttctctgccgggattttcacccctccgcttctagtccgcctttggcggccgtcgcagcccaaccgccgttttttctgaaggggagggtaaaagaaaaggaggaaggcgggtgcgaggcgcgacctcgtgagcgacggatgggctggctaattggcgcccagataggagggccggggcctgtggcaccgcccccctaagctttgctgattggctgaggcggaagagggtggtccttatggggcgcgggagccctggcggggcgggagtagaggccggggcgaagagtggggccgggtcggcgggggcggggccgggggcggggcgcgaggggcgcggccgggtggagaggccggcgcctggtcttgggtcagcaggtgggctgcttccctccgcctggaacgcgtctcgaatgagtactgaggaacaatagtaataaaggtgatgaagcatttcgagtccacgatgcgctctcgtgggaagaggttttcggaaccaggacacttttcagggctcctgctcgttatttcgcagcggccttggcgaatcccctaatgaggctcaattttatcgactgtaaatggggggcatgcgcattcttgccaggccggacctcccttctgagcattgtttgtggggctctactcagaaaatggaggcaacgctactttgcgagcttcagagtcacttgaaaatggtgttattgttaaaaatgggattacagccaccaggagaggcaagcgttaagggtatttggggtttgagagagcacaattcgggagtgattctcttctcattcgttcgctgaatacatgttgacttagttttttaggcactggggacacatctggagaaccagctgtacaagacccctgccctcactagagttgggggctggggggtgaatagacaaataattccagagagtcataagttctgtgaaagaaaagaagccaaatgacctgctgaagaagacctgaggcgttaatttagatggaatggtcagggtggcctctctgagtaagtgatgtttgaacagaggaacccaagggaggaatggcattccagacaggacatcccgtgtaacggccctggaggaagagcatttgatgtgatcgagaactggctgcttgtggctggagagttggttggaactagtaattgtccattatcccactttgtttccaagccaaaggctgtgaaatatagcaacggtagtgaggaacaaatcttcaatgtaataagaaagtcgaggaaaatacagccttcatatgaattactgatgaatacatgacttgggaggagggcctcagaaactcactttacttccagattcaaatccttcgtcagcctcttatatacattttcagttcatcaagtatttcctgagtgctacgaatactccaggcactatgtgctaggctgggaatacaaaaaagtaagacactggtcctcaaacatgtgaatatgatttatttatttatttatttattttttgagaccaaggtctcactctgtcgcccaggctggagttgaatataattctctgtgtgtgagttctctctttctctctctcgagatagagatatttatacacatacatacaca

SEQ ID NO: 1880997 - DNA, 4001 bp, Homo sapiens
tcttttcccaattttgcaacgtcagaaaaaggaggaaggggaaatagctgtgtttaaaacattttttaccaaatagaaatattataagattatggaaaaaaaaatactaaatgttggagtcatcctgataaaaacccaaatggatactgtgtgggaaaaaaagttaacccatccattctggagtcaatatttattcttaataagcaagaaaactgaagaaaaaaaatcagtataagatctacagcctgtagcctaaacacttcagggcatttaggataaataagcgcctgcaccttcccaggcaagtcaaaaccacgacataaaacagagaaatatgtaaggaaaacctacagcccaagagtttaagagcaagacaggccaatttcttcaaataaatttaagcaatgctgctaaaagctgctttacacatccctattaccatgtactacttccaaatttcgaggaggaggggcatggaattacacaagatctggatcgtatgtttactaagaaaccaaaaattataggttctggggcgtttcaacatttcacctgagatggccagaacgggcgcatctttagacctttaaaacctaaattaaaaactatcagtaccgaggaagggccgaagagctcaatacccacccaatacaacccccacttccgacctacagacgctctgctgagcggctgggagaatccgtcgcgccagtcagggcccggcttcttccaacaacagacactttgcgagccttccagaagccttggctaagcgagaaggcagggtggaggccgccactgcgaggacggtccccacccagctgcgaggagctcgcggttccccagaggggcgggcctgcgtccgggtaaccgtgcgcgacgtccacgagtttttaggacgaccagcccttcagcctctaggccccgacgcctgcgccatttaagccacatatccgcccgcccggccgcggccaaggccggcggcagctacgtagccgccgccgcccggggccccacagcccacgggccggatggaccgagcgccggctgcggcgttccggtgcgcgcgcgcgcctcagccaatcgcgttctcgcccgccccccgccgcggcggcgaggctggcgctgggaagaggaagaagaacattcgccctcctcctaccagcgcgcgggcggcggcggcggcggcaccggggtcacgaactctgacctttcactgacaaaaacaataacaaacccccccttctccgcgaccccggcggcgcccccgggcccgtccccgccaccccgctcccacctcggcgtctcgtctctcgcccgctgccccgcgagcccgcggcccccgggctcccgccatccgccgacaccgggagcccgggctccccgcgccctgccctccgcgccgggggccgcccgccgcagacacgggacccgcttcgaggccgctttggcgccaaatcctgaggtaaaattgaaagagggtcgggcgggctcgggccggcggcggagggggcgggcctggcgcgcggacatggaggcgccgcggcggcggctgaacccgacccttttacctttgccacggggtggcggcggcggcgcccggcgctttgcatagtgggccgggccgctcccctcccctccccgcccgcggccgggcgaagcgagcgggttccccctgaccggcccggccggcgcaagggtgggggtggagggggaatggccgcggccccgccttatagttggccctccgccagcgccgccattttgttctcgacggagatggctccggctgggcgggctcccttcctccttatcctcctcctcctcccgcctgcagtcccttcttccttctctgccgggattttcacccctccgcttctagtccgcctttggcggccgtcgcagcccaaccgccgttttttctgaaggggagggtaaaagaaaaggaggaaggcgggtgcgaggcgcgacctcgtgagcgacggatgggctggctaattggcgcccagataggagggccggggcctgtggcaccgcccccctaagctttgctgattggctgaggcggaagagggtggtccttatggggcgcgggagccctggcggggcgggagtagaggccggggcgaagagtggggccgggtcggcgggggcggggccgggggcggggcgcgaggggcgcggccgggtggagaggccggcgcctggtcttgggtcagcaggtgggctgcttccctccgcctggaacgcgtctcgaatgagtactgaggaacaatagtaataaaggtgatgaagcatttcgagtccacgatgcgctctcgtgggaagaggttttcggaaccaggacacttttcagggctcctgctcgttatttcgcagcggccttggcgaatcccctaatgaggctcaattttatcgactgtaaatggggggcatgcgcattcttgccaggccggacctcccttctgagcattgtttgtggggctctactcagaaaatggaggcaacgctactttgcgagcttcagagtcacttgaaaatggtgttattgttaaaaatgggattacagccaccaggagaggcaagcgttaagggtatttggggtttgagagagcacaattcgggagtgattctcttctcattcgttcgctgaatacatgttgacttagttttttaggcactggggacacatctggagaaccagctgtacaagacccctgccctcactagagttgggggctggggggtgaatagacaaataattccagagagtcataagttctgtgaaagaaaagaagccaaatgacctgctgaagaagacctgaggcgttaatttagatggaatggtcagggtggcctctctgagtaagtgatgtttgaacagaggaacccaagggaggaatggcattccagacaggacatcccgtgtaacggccctggaggaagagcatttgatgtgatcgagaactggctgcttgtggctggagagttggttggaactagtaattgtccattatcccactttgtttccaagccaaaggctgtgaaatatagcaacggtagtgaggaacaaatcttcaatgtaataagaaagtcgaggaaaatacagccttcatatgaattactgatgaatacatgacttgggaggagggcctcagaaactcactttacttccagattcaaatccttcgtcagcctcttatatacattttcagttcatcaagtatttcctgagtgctacgaatactccaggcactatgtgctaggctgggaatacaaaaaagtaagacactggtcctcaaacatgtgaatatgatttatttatttatttatttattttttgagaccaaggtctcactctgtcgcccaggctggagttgaatataattctctgtgtgtgagttctctctttctctctctcgagatagagatatttatacacatacatacacagacataaaatgttttagtgttgtggttagcaactccccaacttttactagcagtgtgattttgtgtaagctacctttcctagcctcactgtcctcatctggacaataatagagccttccttcctgaactgaagattagatgagttaatgtaaataatagagcttagaaaagtgcctgacatgtagcaaatactgtgtaaatagagttattgttgtcattatgaactactggtatagacattggactaattaagtgatataaataatgaaatttttatgcagtgtggtgtaggggcaaaaacaatagattcgaacaccgagattctagttttggctctgtgcttgcagctagttacatggcatccaggacaaaagtttggaaaacaaaataatggaactaaatagtactaaccaaagtatagggtgctttatgatttacagaactctcttacaggcagtatgttgttcaggcgccactagaacccacgtaatggcagaggcttcctgttccatgtttaaaaacctttccaaggcttttcattattttct

SEQ ID NO: 1880998 - DNA, 4001 bp, Homo sapiens
tcatggccgtctctgcctccggaccccggccagttcctccttctcaggggcctcctcgctggcttcctcagcatcctctcccatgtcctcagtgggcctgtcaggatccgaaccctcatgtgccccgctgggtctgtcctggcacagccttcctcatcatcctcctctgcctccccagggttgtcggggggcttgtggtcctctccatggatgtgaggcaggaggaggtcgctctggaagaccacctctccagcccaaggcctgccattgtccaggctgcactccctgtgtggctgcaccagcttctcttcctcctcacttctggacacctgctcttctgtccctggctcatccgcagccctctccttggtcctcaggagtgaggtctgtgccttcttcaccctccctgctcagcaatactgcagctggggcagcaatagccgccgagtccttaccagctcctgtcctctccaggccacatgcctcgcctccctcctcacgctcctcttcctcttctgcagaggcctcgggagacaccagggctgcattccccacactgcccccgtccttgggttcgtcctccctcagcggagccctgaggacgatgtaatcctcgtcggtctctgactcagagcactttgggacggaccggggcccctcatcaagccccctgtctacacagagcagccgtccgttgctgcatttgttcaagctgtcattcaggtacacactggctctccactcgtttggggcagtcagcctgggcttgggggcaatgggggggcttcagacccgtgaacatggagtttggactgtgaagactctcgagcctggctgaggaagggaatttgggtgcggtcactggcgtcagtggactggtagtctttggcttgggagcgacaggtggttttggcaaatctagaggacaaaaataaagaaaaggagaaaaagtacgattaactttatttccattcagagtctcctacacaccacttgcaggggacgctgcagatagttccgtccgtccatgtgaagcccacctcccgtgctttgtcttaggcttatgccctccaccagaatctttaaaaccccttgattttccactaaagattcattctgtaaacaaagtgaacagacctttcttctacacgcagcccaactaatgaaaatcaaccaaatgaaatcctgtgctcctcaaatgaagtgtccaggtcagtgcattcattcatccagcagctactgataaacactttctatgacccagcaaccatgggaaaaggctgaacttgctgtcaccctccctgctgccctcatggagcttacatccccccttctacagctactccattgggtacccactagctacacgcacagcactgcagatggcagggtctcctagggtcaagagaagacagcctctgctgagaactcaccgttgagttagaataactggagggtagagccggggacccttggagtactatgactgaatagctgccatctcatcccttcacgaatgacacgccaaaggtttgaaacagtgatgtgtgtttctgctgggggtcatgtctggaatctgcatgcttcaggattgtgtccagccaagcctcagtcaggtggggcccctgagaagggagcgaggcctgtctgtgacgtctgggagtggagggcaagggtctggggacccgaccaagtcgcttttgcgaaagggacgtctttctccgttgtggaagggaccctcactctggggaccgccgtgagagtgggatatgggctcacacggccagggcgcggcctcgccaaggctgaggcgggtccctgaggcggggcgatttggacggtgggggggaccccgattctcggcgaggggaccccggagccgcgcatgcttcggccaaggccgagcagcacgggaaggtcggggaatcctgggaagctcgtcccgggcgccccgggagctccaacttatggcgcgcgtgcctcggcgccgccggaagtcgcgtgggcggcggccggggcagcgcgcggcttcgcttccgctccggactcagggctccgcgccggaaccctgcgctctggccgccgcgccttcgcctgcgcctctgcttgcgccgcatccgcacctccgttctctcctagacatttcctccgcgccacaagaggaaagattttgtttttgtttttgttttcctgctgggtcagggatccaggaagccgagggtcggggcgtccctgcgcacatttaaaggggccgtggccatgggcacggcaggaggctcgtgaggtttgagggaccagagctcaagcgagttgggcttctgggatgttcctggctccttcacccagcggaccatctatccctttatttttaactctggacattcgttcagtgccgcgccagcctctgcgctgagcacagaacaagacagccccaaattattgccctcatggagcttagacgggaggaagtcgctggagacaccatttcaaagcgagggagggaaaccagggcaatggagctgagcggtggctctcagagggcgccacgcattcttggggccctccctagcctccctgaatcagaaaccccgtgttttatcaaaccctccaggtttgagaaccactggaatagagaatgggtggtcaaggaaggcctccctgaggaggtgacattggtaagggagacccagttaatgaggagcctttcctgatccactcagtacacaccgcgtagcccctcacagatacctgcctggtgctcggctacatagatgactcagaccaagcctccacctcccaggagttcccagtctgcttgaccacacagacacaggcagatagttctgctactctgaggctcgtgctgggatgggaacgcacaggcgcctgtgggagctcagaggaggaccccagtgcggagggttcaaccagaggagaggccttcccagtaggaggaattgctggggcaaagacttcaccgaggtgggagaaggcctggcctgctggaggagtgtccagggctttggcttggcagaggtggtgctggaggcagatctgatttctccagctgtaaaattaggaactgaatttgatcctttcaaagacctttccatttctaagccaccacagatcccttaatcctccagtcttttgtggagaaatacttgtgactcgaatagaaaatctgtggctgaatttggtgttacttagacaggctcttgatatattttatgggtccatgcatggaggtgtggcagggatggagatggaggtgatggtggaggtggtagaggtggcgaaggtggcagtagcagaaacaggtggtggaggtggtgttggaggtgaaggaggcagaggtggtagtagaaactagtggtggtggagaggtcgaggtggtggtggtggaggtcgaaagggtaattgacgtagttgtggaagttgtggtgcagctggaggacatagtatattcggtggaagaactggaagtggtagaattgatagatgatgtagacatggtggaactgaaagaggcgaaggagatggtggacatggaacaggtgatggagtggattgagttgatggaggtggtatagatgacagagccaagggaggtgatggaggtggtagagatggtggagttgagggaggtggtggagttgagcgaggtggtggaggtgatagaggcagtcgagtgatggaggtgggacaagtgatggagtggattaagttgatggaggtagtataggtgatggagtcaagggaggtggtggaaaggattgagttgatggaggtagtgtaggtaatggagtcaagggaggtgacggaggtcatggagcaggtatatctgtgtttaactgtgggtacaaatgagtgagtagataaattgcttcaatgtttgatggaaaaagaaagcatgtttttaaaacttgagcttgtttctgagattagcaataaaagcaaaatatcctagaactcccagggtgggagcaggtgagggagac

SEQ ID NO: 1880999 - DNA, 4001 bp, Homo sapiens
tgggacattgggtgagataatcactgtgcactaggtcatctattttaccagattctgagcagtttgaagtcaacaactacttctgatgtctttttatttcttgcaactagcaaaatcttttgcatataacagctaagtttacatttattgttgcatgttatcattcttattgtagcagataaacatatttatattggttttcagagcaaaaaaataataattttatcagaaaatcatcttaaattcagtgaaaagttgatattccaaaaaaaataacaggggaaatcagataagtcattgtattattattataacattgatttatcttttcttgaatggcaattattgtcactgctgggctggaaaaatccagaaagctctccagtatatggtaattagatatgggatctatcagtcatcgtgtggtgttgaataacaaacatatggaaaaatgaagcatgaatgcatctgttttgtactatttcctctgagccttcagcatactaatggattaccataagggtggggattcaacatgcacaacatctatgaaaaatgtataagacaactttcctggttgagtttttctctaccaagaaggtcatatcttggactttcattcaaagactattatttctgggatcttcccccctgcacccatagtgtctaatacaactttttctcacctttcatcttaccctgtttcactaagacctcagatatttactggggctttccaaccttaaacttagttgtgacttgggttaccccattagcaggattagtagtctatcacaacagtccccaaccttcttggcaccagaaaccagtttcttggaacgcaatttttccacagactagttgggggttggagatggtttccagatgaaactgtttcatctcagatttacaggcattggttagattctcaccaacagcgctcagcctagatccctcatatgcacagttcacaatagggttcatgctcctatgagaatctaatgccactgctgatctgacaggaagaggcagagctcaggcagtagtgctcactcacccgctgctcacctcttgctgtgtgaccagttcctaacaggccacagaccagtaccagtctgtggcccaggagttgggggcccctggtccatcacacacttgaagagctattgttagaataagcttcacataattaacggctttgtcccaatttggtattaaaagagcaatttcccatcttactctgttcaccacaattcagtgtaagagatcagggatttgttcctacttctttaatggaaaaacaaatctatcaaaatcagtagttctggaaacatcaatgcaaacaaaatggacaagtttccatggatttttctattgttcattttgaataacattaaagtgcatggatgctaccatttgtatgcaaaccaaatagagaatagaaaagagctagctttttatgtatcctgcagatattttttgggctcaatttatattttgggccatgtacacttctacatgttacacatagacctcatgtcttttcgtaagtatgaagactaggaaaagttatacactaagcaagcccattctgtgggattggaatgttaacctgtattacactaaaatctctgcttttattaggatgctggtctactttccaagatgagtactgtttgtggaaaatgcacttcccatcacatttgggagaattagattagtatagacttgactcagcatgagcttcagccatcccaggttcaccattgataggcctagcactgtccaaagattgccattgataatgtgctccaggaggattacatgtggaatgaccaaaggaattcactgagttagagtaaactttggacctgtgaggaacctttgaagcagccataagatgatggaaagagcaatatacatgtaacacaaaagcctgggattacctgctctgctcttttccagagacaactcactgaattccttgagcttccatttacaagtctgtccagtggcacatcaaataaaataattgaagtctttctgcttaagaaaactttaaaaattacagttcagtcattttatagtacaggttaacaaaactgaaacttggagtaagaaaacgacctggtggacccctaccattatgcatccacccattgtctccccctgctggcacactccaaccatgacctcccctgccagcacgtacctgcttgcatcctccccctgtcagtgcatacctgcccatagtctttccctgccagtgcacacccaccctcagcctccccctactgatgcgtactcgcctgcagcctcctccattggtgcacatgtgtgtggagactcccactgccccactggagcaattttgccagcagcccctgccagagtgttgttgcaagtgaactgggaacacctcagcacctccagcacagcaggtgcttaatctcaaggggccagagagcaaagccacaggactaatcccccatcccccaggattacagcatgcagcccaagagtgctgaggtgagctttggctccagaaaagcattcagaattgaaaccaatccatgaaacccaatttataccatagtcaaaacctcaagagcatcaaataatagaaaagcaaaaagccccatccaaaagacagcagcttcaaataccaaaggagcatcagtccacacagataagaactagtgcaagaactctaatgattcttaaagccagagtgtcttcttgagtctaaatgactacaacttgctccccagcaatggttcttaaccagaatgaaattgctgaaattacagatacagaattcaggagctgaatgacaaggaaccacatatagttacaggagaaggttgaaacccaatcccaagaacacggtgaaacagtccaagagttgaaagagtacacatccattttaagaaagaaacaaactgaatgtctggagatgaaaaattgactccagaaattttataatgcaattggaggcattaataactgaatagatcaaactgagggaaaaaagtctcagaactcgaagactgttttttggaatcaatgcaggcagacaaaaataaaaaagaatttgaaaaatgaacaaaagctctgagaaatatgagattatgtaaggagaccaaacctgtaactcgttgtcattcctgaaagagatggaaagagaacaagcaacttggaaaacatatttgagaatattggtcatgaaaatttccccaaccttgctggagtgatcaacatgcaaattcaggaaattcagagaacccctgcaaaatactatacaagatgaccatccccaagacacgtagtcatcagattcttcgaaaccaatgtggaagaaaaaaatcttaaagacagctagaaataaggggcaggttatgtacaaagggaactccgccaggctatagtgcacttttcagcagaacccttatgagccagaagagatcagggtcctatattcagcatctttaaagaaaagaaatttcagccaataatttcatattcagacaaaccaaacttcttaaatggaggagaaataaaatctttttcagacaagcaaacactaagggaatttgttaccaccagacttgccttataagagattcttaaaagagtgctaaatataaacacaggagatgattacctgccaccacaaaaacacacatatgtacatagcccactgacactataaagtaactatacaattaagtctacataataaccagctaacaacatgaggacaggatcaaatcctcacatatcaatattagccttgaatgtaaaggtactaaatgcccctacttaaaagacacagagtgtcatgttgtataaaaaagcaagacccaactgtagatccatctcacatgcaatgacatccatatgctcaaagtaaagggatggagaaagatcaagcaaagggagagcaagaaagagcaggtgtggctattattatttcagataaaacagactttaagccaaca

SEQ ID NO: 1881000 - DNA, 4001 bp, Homo sapiens
gcctttcattgtttttggcctcagcattcccatcaggaaaatagataaatgagaccttctccctacctcccttaaatcaaattctaaagaaaagtaatttgttggacgactaagctataatagagaaaacttaaaaaacatgaaaataaactttaaaaaaaaatagtggttttcttataataagcagaagggcttcagagaagtacagatgaataggctgtattcttaaaagaaaatgtggaggaaaagaagcaaagaaagttcattcaagctactactttcttctctagagctacatgatgtagaaactgtcagctaaaccagttattgtaatgaatgaatccagttctgaaggcatcagtctcctcaatctgcaagcagtgaagccttctttcctgagatctgaagggctaatccagcagtgtgcatacacctctgtccttagtttctagttctcaacttgctatttcataaacttcaactagataactttattatttttttttagagtcaagtcaatcaaaccagttgtctttataggtagacatatttgtatctcagttggagttgaagtaaattcaaacttgtttcttaagaaagtctttgaagcctctttaaaaattttgcagaaccatttcctttgtcaaatatttttgaccctgaagcattcataggtgaatgtggaccagccagcattgctttagccttgcaggcatccaccaccgttaccccctctaaagtcaactgcacggatcagtggtcaaagcaaagcattacactggtgagttataaccagctaatgtctttaaattacaatgtgctctgagacactcacttaaactgagccagcctcactttcttcatctggcaatgtgggctgtaattgtgtatgattgtatatgctttggttataactgcttaataataacttggctaaaaatgtttcaatcacatatttaaacatgacccaacagcaaattgcaatatttatgattaaaactcattattaaaattatttctatgtttaggaattgaaggcttattttatatatatatatatatatatatatatatatacacacacacacacacacatatatacatctatctagctgtgtgtgggaagggcttcaggaaaaatataatttttgtgcatgagtctcaagattttcatagaagcaaaagtttattctaatttaagcatctgcatcagaaatatttataaattatagagatttaaccatgaagataatttatatctttgtaagtgttttcagtttttgttacaagcaaaacaaatgacctctcagttcaattttgatagaagccactgagttaccgggtcattttggcagcaaatcgcctggcctctggtgccttccttgatctgcctttaaagcaccactttgagctacagcttgccctaaaggttaataaattcatgttcccaaagtactttgaggtcttcatataatggtactatgttaagtattatacttctgaaagatattttaaaattttctttgttcaaggacacaacagcacttatttggaggcagcagcaattaggcttcttagcaacagtatcatgttaatatataattagaaataaaatgatcacacacacacacacacacacacacagttaacattaacatgttcaaaaccacagccttctacaatagtttggtttccccagtgctatagaataggcctatggataaaaacgtgtttgttcatttctttaagaagacaaaaggaattatcaacctgatggctgtaggagacatgataaataaaaaagaaataggctcttaccgataagcaatgttgagcacaggactacttgaagcattttataggccatgatcctattttgggaaaaaaaaaagatttatttactttaatttagctggaaaaagccttagggtatatcaggtacttttcagaagtataaagcatttgttgcatacctggaagccctgtgagctgagacacagagagaggctgaggtggcttttttatacacctcttgcctttttaccctttggactttttgaactggctttttacaggctgttcttatgtgggtaatttatttatttactaattttaccatctacatagattaacgtaatgttaaaaaaaggtagaaaaactggatcactcacgtattgctggtggaaatgtaaaattttccagtcactttgtaaaacagtttggtggtttcttaaaaattcaagcttgcaattactgtccaacccagcaattacactactgggcctttgtttcagagaaataaaaacttaacgttaagaaataatctgtagaagaatgttcataacagctttattagcaacaggcaaagactaaaaacaagccagatgtcattcaacaactgaatgttaaagcgtgatatatctataccgtggattactaccagcagtcataataataactattaaaaataataattattggctgggtgtggtggctcacacctataatcccagcactttgggaggccaaggtggatcacctgaggtcaggagttcgagactgtcctggccaacatggtgaaacctggtctgtactaaaaatacgaaaattagccagatgcggtggcatgcgcctgtagtcccagctacttgggaggctgaggctggagaatagcttgaacctgggaggcagaggatgcggtgagctgagatcatgccactgcactacagcctgggcgacagagcgagactccatctcaaaaaaaaaaaaaagtttaattaaaaacaaggaatgttttactgcattgtaaaatgtgtttgtttccaaaaacagtacataatcaatacaaccagaacagtactttcatttttcaagcaattgcccttttcagtgccttgattaatcgactgagttcatcatcatacaatttattcttaatgacaaattatgcctgtgtgccagtttcattaagattatgcaatctgtaatgaattggtatggatctataaaagtggtagaaaacaactttgttgatgactatctttaaattgtaaagggtgtttagaaacctacctgggagttatgcctccatttaatgataaatgaaaggttttagaagacagctaactagaaacacacactgcaaaatcttggaagcttaagccatgtgtccacctatacaaggttttgggagatgcaatagctgttgccacaattctgtaagtctccattattttttactttgtaaagaggtataaatttttagttgtgtgataaactagaataatatcaagaaaataataggaaaatactttttttttcttttttcttttctttttttttttttttttaattttgctttaagttctgggacacatgtgcagaacatgcaggtttgttacataggtatacatgtgccatggtggtttgctgtacccatcaacccatcatctaggttttaagcccagcatgcattattaggtaattgtcctaatgctctcccttccttttccccccgacccgctgacaggccctggtgtgtgtattcccctccctatgtccatgtgttttcattgttcaacttccacttatgagtgagaacaaatacttttgtttttcaaactacgagatcatggcaccaaaagagaaatttatctttcttttctctacttttatcattcttaaacttataggcctaaagtgaagtttgtctggaggaggaatgggagaggggctttgcttcctatctcttttaccttacttctctcaatgggtcatcagtcaattattttggatgggttagataatgcaagtataaaataataacagctattccataaatttttacatacattttctcatttaatacagcaattctatggagacagtattatcaagtttcataatttgtccaaggtgtgttcagaaataacagggtaaagctttacagcagaagtagagatgtggttcacacacaagagcatgagccagtaaaatgagac

SEQ ID NO: 1881001 - DNA, 4001 bp, Homo sapiens
aataccacacatagtaagttcaggtttgtttttgccttaagtcttcttgagggaatataaggaggttcaagaaagaggagacagaacattccccagacagaaacaaaggggaagggcccttgggccatcagggcagcatgtgctaagacacagaggctgcaagagagtgggaccagggacacactcagagtagcaagcacagagcatgactggcaggggacagccatagcaaatcctggaaacagaggtgaggtcagacgagagcagggcaaggtgggcacggtgagggattctgcccacaggctacgggaggcagtgagtgagaaggcaagaagccagctgggaagccgaaggacaaatgccttcccagacaccttaaataaaagcagagtcagggagcgcggaagcccacgccagggagagcaggaagatagttaagtgtcttacactcattgccatttacaaaatggttctccttaattttcttcaaacaaggctatgcatatattggtgtctggaaatgaaattaattagtaaatcaaatcaatacattcttattggccaagcatcactcacgatcccttctgacttcatcctaaaagtggacccaaccaacaaccccctatgttgcttcacaagtaatttctgaccagtcaggcacagatgccatgcaaaagacaaggcctcaaggtgccattatctgtcaaatggacccaaggcaggatgaggctgaatgaaagaggaggaagaggaagaaaggctcactcagggggagaggggaagctgctgcaagctaactactgctctcactgactcaggatgcccatttctcacaaccagaggccacagttttggagcagacaagagactgcagagaggcttgctgaagctcactccacggctggattcctggcaggatgagaaatggagttctagtaaactagaaggaatgctgctggcaggagacagacctctcgagagggctttaaatggaaatatgagagcacgagaggaactctaagtgtagaaaatgcactgggcaaacaagcgtgtcgcagatgtgggcgccccagaagggaaggagctctggagtcacaggggacccaaaggacagaatgtcaggtggccctccaagcccgcaggtggcaatgggaacaaggcgggaaatgaactggagagctgaaggcgggggcctaggaggaggccgcagagctgtgatgaagggctgctcatcagaggcacatgcacgggtcagataaagaagctccgctgcgaagacagggggcaatgcaaggccacagccgaagattccatgcatgctcttcacggtggcaaattcaaaagccttggagggcagcatgcttctatgataatagggaatgggggccggggggaatatgtagaccccatatcaatgctctcaaaacctctctctctctctctctctctgtctctctccctccctctctcttgctcactctctctctctctctctctctctctctgtctctctccctccctctctcttgctcactctctctctctctctttgtcgtgctctctctctccctctctctcccactccccacctctggcctaatatacctgcatgtccacagaggcaccaatctgcaatgatgatggactctctcacccaccctgctactaggaaacttcttccatatatcataaacagagaccagtattacaatacttcacccactgcgccaatttggctttcatgtctgtttcctgtgtcgatcacaacatcctagacagcccaaacaaggctttattcacctctagtccccggtccctggaacagcagacaataaataaggaatcaacaagtgtccttcactgccgcacacattggctgtgaatatccttttgcaaagtgcagaacatctgaaagattctcacattgactaaacaacagtgtgacctgaagttaagagaaccataaaggtaaatgattgctagaagtttaattccaaacaaggaagagcaatttgatgcaatgggcagaagacaaacattgggagaatgagaacgtatcctcttgagttgtgatgtgaacaaacagagattccaagatcttgcaaaagcgaacagtcagcaaccagcatggtgcttagagtagtccctgggcaacagaaaaaaaacagataaatgaagaaacatggacaatcaccctacctgggtctcagcgtgaggaggagaactaggacttccagacagaaaagaggagaagcatgaggagggggctgggaaagacatttccctgtgggcatgtggtgccctccactggggccagaattcccaacctgcctcactctccccatctgtgaaattggctgattccctgaggtccctcccagcactgactatcaagtgacagagaacctagaaactccaggagctccatcagagccctgactacctgtccaagtgagactgtgggagcctcactcttctcacacctgtaaactgagggtgctgcagtgtcagctatatcaacactcccaagtatgcctttgccaaaacctctatggatgagaaaggaaaagagcatgtatggaattggccagggcttagaaccatcttgaacatgacacacttatgcacatcgtcacatcttcccagcatccctgtcccacctcgggcagcaactgtcaaagttctgcccccaggatgacctcccagagtcctcagggcagctccatctctccagccctcattcctttccagctctttggtgtttccctgtaataaaaacactgtgcacttctcttttcatgttttaaccatgaagtgccttcctccagacaagtactttaatccttactccagtcagaataggtaacatcagcataattaccatcattactcccattttacagaggagagggctgaggctcacgtaagacctaatcttcatcttcccagggatcctccaactcctagccaggcctctcccagctcctaaatcaatcatgaaagactacagcaatcacatccagtacttttctgatctagtgtctttgccgctaaataaaggcagaaatcaaggtggcaggatcaatcctgtattcaaatcactgtactgtctgccaccctcctatgctggtccagggagcagaactgaaaatgtgcctcaaggccccaatccaaaacagatgccatcaccctggacagattctccaaccatgctccaagactggtatccatctcacttcaaccagccctccttcccaggcctgggtctgtctactggcacagggggaccctgccatgaaaatgagggcatctctactggattgcaggcgatcccctcgctgggctggcccacccattcaaccatcactggaccacccccaggcctgctaccccttcagacactcagcctcatactgcctagctctttctaccaggtctctccctcagatcaattccacctcagccccaaacttgccatctcctaagcagatttatacttcttcccaatttctatccttcctctagctcattactgctttcctgttgcttaagctaagtctatttcaaattatagctcagagagggcaggtgacttgttcaagactacacagccatttagtggcaaagctggggcttgaacccagctctcccaattctaagccttgtgtttttccactaaatctcagctgtctctctctatcatactgctcaagaagccactggtgcatgagagggtgcagaccacatcttattctctttagtaatgtgtacactaagggccaggtatatgttcagtgacttcttgcagtcctaggaggtatgactgtctttgtttacagatgagaaaatgttttcagactactgcactgctataccactagtctaaatacagttgtgaacacacagcactggtcaataaatgtgggttaactgatttttttttttttaattagctgaagagagcctaatggaaagacctgaaaaacaagtttgtggccaga

SEQ ID NO: 1881002 - DNA, 4001 bp, Homo sapiens
tgtgaaaccttagcaagggggtagagttacacattccgctccttttaagaggagcagagtatttcagctccatcgatggggagttgcatccagtggctctaataaccttggcttttaagttttgtggatttagacatcaaattatgttttaaaatataacaaaatccaaaatagttttcaaaaccaaaaaaaaaaagatgaaacaaaaatcaaggagttagaatgatctctgatgaaaaccaattcatagagaaaggtctagtttctgtttttgttttcttttaagctattacataactgattgtagtatgtggtacaggaaataattttgcccatgcacctgcacagaaaaacccaaatcaacgagtttgcttcagccatcaatctgtgggaccaaaagctaagcctgaaagcaaaggtgaaataaaatacgaaaattgcacagcagccgcagaggagtcagctatccagaggccctgctgaaaccccatctttagggtagagtttcagacacattttgatgttttggtcacctgacccaagctctggagcccaattggcctccaaatttacaggctaagtaatgatgtaactagagtgtgtgggaaccaggaggatgagacagatacaatttttcccagtcgtttattagacttggctactaattctgcttgttcttcagtttgactactggttatcaggaaatttgaactacttaaagaacataatcagtttatctataaccagggcagaatttagtcacattcatgtaaaattaaactacagtaacagaaaatagtaatttgtgaaattcaactatttatatttgaatttgatagcagatatattttaatgtatctatattttgtttttctgtactcttttttcactaaacattatttacaatatcacttataatatcattcttatgttgtctaagaaagaaatccatcaaaataaatgtgttggtttatccacgatttttctaatccttttcttaatcttacagcatttttgtctaaacagaataaatgtttatactcaagtaatttgtcactatggtaacttttggcctttaaaatgctgacactatatcagagacaaccaagagaagaaattatccttgttcgacaagtaagcagaaccagtttggcaaacttcaggatgcctagggatgaaaggcgtttgttgttctagaaatactacttcatgtcaggaaaatgagagcatatcctggtttcatgacaaaaacaggagctgtaatgctgatagcaaaacttaaagattgaagacttttttcatctaaatttcctataacacttccctccccactcccaagaaatcatgtaagtaatttctaatactcacacaatattatctttctaatgtgtaggcatgagtttgtaataacttttctgacttgtaatcctaaatcccttgaagatagtcttacagttgtacctcacaagactttgtccaacagaaaatgtaatatgtctccaaatggaatggtatggctatttataatgaactccctgtatattttttaaattaaaggatgttatattttgctgtcattcatacgcataggaagtatttcccattctcaaaatatttaatctagttagcaaatatctttaggaaagaaatctctaaaaatccttctttatcactccccttgtttaagtgtgtatcatgccaaacacacacacagtagatatggtgtctgatatcttctgaaacctgttggggactatatgaaacattaatggggattagtgttagaactggtgtaaacatagcaaacaatctgctgaaagtgcatactcacatttccatatgttatgcagtaagcggagtcatttaagaagcgaggtactcagggagatggtgttcaggtagtgagtatttggctggtgaaaagtaaacacaccctggatgtatttactccatagcaccagcatatacatatctacccgactccagtccttaagcttctcctcaagagacaagtcaagattgagatacgcaatttcactacacaaagcttctaaaacatagataaaaatgatttagtacttccaggtgcactgtaattcttggcagaaaaagttaattccaggtgtgtaatctcctaaagaaatctgttgtcaaagctggataaaaccatcacattcgaaaaataaaagttcacctatgaacaaagtataaggtatggctaggaaaactctctgctctatgtagaaattaaagcataaaagtgaaactcccttttacttatgtaaacattgctgggctttgggcatcatttcaaaagaggtagagccgaacatgcgtgagcatatagaaatatgacatactctcggtgggaggtttggggtggggttctagtgccaagccagactctaacacacagacaaaggaagaaacaagctgcattttatagcttacagatttttttttctttattttttcaagcctctgagccaaccaaataactcaatcaacaacaacaaaaccgagatgggccacaaagtggaaaatgttataacagcttaagtaacaaggaggtggggtgggggggccctggcagggataggaatgctggtggagggtgcggggaggagaaaccccatattatagaatatttaagccttgcaattcaatgcacatttattaattggtttctttttaagagacacttatttatgacaggtttatgaacaatatagcatgtgcagcactgacgttctcccatggcttatttttatttccatatgtttagacaaaatgaacatcacatttaatactagtactagcagctcttgaagtgtttgccagtgctacatcccttgggagttgttaccactagattaatatcctgtgggtcacttaatttaaaaaaccacattatagaggctttatgtgattagatgtactgcttttacaagccagttggggtgtgtccttggcatctggttcagaaaggctggtgagcgtaacttatatagacctccaacctggagtgtctgagcagccaatgattgtactgacatatggacgagcagagaaaaatgtgtcctctgtctaccatcagaaactgccttgaagacaggatctaaaaggaacaacttgcttagtcagaaaccggcctaaacagatggtagaaattggctgcttcagagagtgaagggtagtgctatcataccctgaatcaggcctgtttgtcacaaaatgctcatagtaaataaacagccatgctatttccacactatgctatcaaaaccaagttctaccaatcagagagtattttacttgagaatttaaaatatgctctttattttctctgttaaacattctcaggtctcggtatttggaagaccacccaaaaacaacaggaagcatgctttttgagtgaacaagaggaatttgccactggcttcaaggacacttggaataagatgaccagtatttcctgcgggagtttcaaatggcatcaggtgcagtggctccaggcaacctggaagcattcatcatcatttatggtctactcttgattctgtgaggagatgattcacttaggcttcctacaggccaggcccaaagaggtggcaggctaccatgaggacaacaaagcctaaaagtcatccaggtgggacattgtgaactacagaacctatgtatgaggtagattgcaagtatctccggtcacattcacaagccaataaaaacaatgctgtcctccatgagaacaaatctaattagaacaaatcccagtcctttacaaatactgtagactgaaatgcttgttttaaagataaagacatttggccaggagcggtggctaatgcctgtaatcccagcactttggaaggctgaggcaggcagattacctgaggccaggagttcgagaccagcctggccaacatggaggaaccctgtctctactaaaagcacaaaaattagccagtcgtggtggcacgcgcctgtaatcccagcta

SEQ ID NO: 1881003 - DNA, 4001 bp, Homo sapiens
ctccagcctggtgtgagactccatctcaaaaaaaaaaaaaaaaaaatacagaataagcatacaatacagtaaaataaaaaaatcagaatatgtcacatgtggtaaggattttatgtgtatgcagtaaaacttctgaaacatatgagtactgtctttgcaatgtaaagtagttctttctgcaggttggatttattccctcatctgtttattcacacatctttattaaatgcctgctgtatgccaggcattgtgcttgacctcccctgtccagtgtgggagccactagctacctggagctgctgaacacttgaaatgtgattagcccaaacttggatgtgcagtgtaaaatctacaaagtatttcaaagcctttgtatggaaaaaagaacatgaaatatttgataatttttcttcatcgattacatgttgaaatgatcgttttggatacattaggttaaataaaatattaaaattaatttcagctgtttcttgttacttctgaaaagcgtcacagttacttatgtggcagccattgtatttctattagacagtgttgctggatatagcagtggacagcacagccaccaagccctctgctcattggtttagagggagtggacaaccagcgaagcgtgataaacaagggcgtggtgatagatactgtagagaaaatataaaaggataagggaggtcacattgtcagagggaagggttgctgtgtaaatagggtggtgggtggtcagggtaagtccatgtaaggtgagcagagatgtagcctattctaaagagagcaagtcagccagtatggccgaagcagtgtccttaagggaagagtacaggttgagtatctgttatctgacatgcttgggaccagaaatatttctgatttgggatctttcagattttataatatatgcattaccagctaagcatccttaaccccaaaatcccaaatctgaaatgctcctgtgagcatttcctttgagtgttgtatctgtgctcaaaaagttttggatttcggagcacttttgattgcagaatattggattaaggctactcaagttgtagtaagagacaacataacagtgtaacagggccagactgagtagggcattagggctttttatattcttattggggagccattgaggggctttgaggtagagcaagatctcactcatgctttttaaatggatcgctctgggagctgttttgaaaatagactttgggtggatgaggtcataggcagggagacctgtcaggaggccactagaataatcccagtgagatatgatgatggccaggatcacaatggcaggggaggtgctgagaagttgttgaatttggaatttatttaaacattgagccaaaggatttcctagtgaaattgatggggagtttgaaaaagttgcatcacagaagactcttaagatttttgtcttgaatgacgggatataatcaataggattcactgatggattgcttatgggcagaaacagaggagtcagaagacaaatgctttctgttctaaggaactgatagaaggtggtgctcccatcactaaaatacagcaagacagtgggtggggcagttttggaggtaggggaggtaagcaagggagaccaggaatgtagttgtagatatgggaggtttgagctatgcacccagactaagatgccaagtgggcatttggatatgtagtcctggaaatgtcctagcttggtctataaattcaggatttataagcatgtaagtgatacctaaaggcataaacttgactgaactcaccaaggaagcagtggtatagaagaagaaaagaagagttccaggatctgggttctgactctgggaggctgaggtgggaggatctcttgagaccaggagtttgagatcaacctgggcaacatagtgagactcttatctctacattaaaaaaaacaaaaattagctgggcatggtggcgtgtgcctgtagtcccagctacacttgggaggctgaggcaggaggattgttcaagcccaggagcttggggccacagtgagccacagttgcatcacaatactctagcctgagggacagagtgagactctgtctcaaaaaagtaaaataaaaataaaaagccaacaccattaaaagttttagtcatagaatattgagaacaggaaagatcagagatgggatgaaaactctgagattgtgaaccagaaagtcatcaaggtaagtgtttaaagtaggaaacaaagctgagcatgggggctcacacctgtagttccagctactcaggaggctgaggcaggaggattgcttcagtccaggagtttgaggctatagtgtgctatgatcctgcctgtgaataaccacttcactccagcctgggtgacagactatagtgactctgtctctagataaaaaacaaaattaggctgggcacagtggctcatgactgtaataccagcactttgggaggccaaggcaggcggatcatgaggtcaggagttcaagatcagcctggccaacatggggaaaccctgtctctactaaacatacaaaaactagctcggcatggtggctcattcctgtaatctcagctactcaggaggctgaggcaggagaattgcttgaactgggacccgggagacggaggttgcagtgaaccaagatcgcaccactgcactccagcgtgggctacagagagagactccatctcaaaaaataaataaataaataaataaataaataagaagagagttgtgagccatatcaaattctgccaagtggtcaaaaaagatgatgacaaagaactgaccattggatttgtcaatatggaagtcattgatgaccttagtaagagttagttgtgtttgaatctcactcctatcatatttactggctttatataactagcagtctgctggctggctgaacttacatggtttgtattatttttccaggaatagtaattgttcagcattcttgtttgttacagttaccacattttcccccaccccttgcactcatttttgtgaagtttgggtcatagtacaacctgtgagcagtgaaaaaggaatcctgggcattttgtccctcttgacccgttctctaatctgatggtttggagatttgcagtttaaataaaaggcatagaggaaagtgggatgtgtttatagccctaacttagaatatgtcgattgtaatcatctgaagtatatcacagattggtgtggttaacatagtctctagattagtaaaatactagtttgagcctgagccacgtctgtctatcacctttaccttttactaatataggtagtctttgatgggttcatctgcctttcagattacctaagagcatcacagattctagctttctcaaaacttgtgaaacacagttgaacattttcaagatttcttggccagtcgcaaatcctcaagcatccaggaaatggtaggttaattacaaaaacacacattatctctatatggatgctaaatactgttaagatggtgttggatgaaggaaggacagtttctctttgtggataattttaaatgcacttacgaaacaaaaaataaaggaagcggccttgcgtggtggctcacacctgtaatcccagcactttgggaggccgagacgggcagatcatctgagctcaggagttcgagaccagcctgaccaacatggagaaaccccgtctctactaaaaatacaaaattagccgggcgtggtggcgcatgcctgtaatcccagctactcaggaggctgaggcaggagaatcgcttgaacccgggaggcagaggttgcggtgagccaagatcgtgccattgcactccagcctgggcaacaggagcaaaactctgtctcaaaatatatatatatgaagaagaagtagtgagaaaaatttcattggtaaccttatttaaacagttcaacattgtaactaaatcctaatgttattgtttttattttatttttattttttgggatgaagtctcgttctgtca

SEQ ID NO: 1881004 - DNA, 4001 bp, Homo sapiens
actcatttaatgttttcagcaaccctatgtggtaaacactacttactgtcacctttctacagatgaggcactgggaaatcatctgcccacggttacatggttacaaagtggcagaggcaggacctgaaaggagacagtgtggatctggattccatgctgtcaatcactaggagtacaaccctcacagacttatcatgaggataaactgagttaatatataaaatgctggccgggtgcggcggctcacgcctgtaggggaggccaaggcagacagatcacctgaggtcaggagttcgagaccagcctggccaacatggtgaaaccctgtctctactaaaaatatgaaaattagccggccaccagcgctggcgtgtgcctgtaatcacagctactcgggaggctgaggcaggagaactgctggaacccgggaggcggaggttgcagcgacccgagatcacaccactgcactccaacctgggcgacagagccagactccgtctcaaataattaattaattaattaatttaatttaatgcttagtccaggacctgaactgagacaatgtggttctgggttccgtgctctccatcgctagaatcctcacagagttatgacgaggataaactgagttaacatataaaatgcttagtacaggacctggtaggtagtaagcactcaataaatattcattattacattatttgttggccttacctcaaaaggtttctctctcttttttgcggggggggagagcggggggagacagggtctcgctctgccgcccaggctggagtgcagtggcgcaatcggctcactgcaacatccgcccgcgggttccagctattctcatgtcttagctgggattacaggcgcgcggccaccacgcccggctaattttagtatttttagtagacatgggatttcaccttgctgcccgggctggtctcgaactcctgggctcaagccatctgcctgcctccgcctccgccttcaaagggctgggattgcaggcgtgagccaccgcgcccagccccagctttctcatttcttacaagctcactactaaccagcagcaaggcaagacttgaggccaaacctattatttctgatcatttgcttagttcacatactggattctgactgtggcaatcgtagaaatcaatagttcccatctcacctggaaccaaaaacgttccagataaaccacaacaaaagacacacaagacaaatgggaagaaatgaaaaccgaaagaaggtttccaagacagttatcactctaaagaccgtcctgggaaagggtacgcctcggaatccactagtcaggtacttttcaaatatccgaaaaactgccagccaaacacctggcagagctgacttacacccaacgccatcacttgaatcccgacaaaaatattcgtacttttagcccacctaagctaaccacagcggctggtgcctcggtagtgtcagggctggattttaatggaatcaccaacctcccggtttttatataatcggcaagaaaccacgccaccctctcagatgcgctcaagaaccccacgctttacctggcttctcagcgagccacagcaatcatctctccttcaaagatgtttgctttctcccccattagctagctctgaggcctggagagggagactgtgcttttctaggcagcgctcaatacacaaccacatcccacaggcggccgagcgctgcttcctttctgacagacgctccggggccgcggccggaggtggccccgagagtcgcgcccggcagccatggccggcgccggcctggaacgcccggcgaccagggaaagctccggaagcgctggtttaaccgaccgcagccccggccgggctctccaagacctttcttcagagagaacggctcggtcggaccattcccctcgctccccgataacgcccaccgcgaacgcgctccggggaaaccggcagatctttcctcacaaagagccggcgagcggcgagccgtagcccctccggggagaagagacgccccccgcgaccctgcgaaccttcgggcccgcagcgcccctgcccccgcctccacagcccctcctccgactgccgcggccgaggggacgcccgggtccctcgcggtccagccgggcacctggcgtcgagcctgcgctcccggctgtcctccgggcctccgctcgggtccgcccaccagcgagaaaactccgccggcaactgctgccgaccgcccctgcccccacaaaccgcgccgccggcttccacccgcgccctcccccgcactccaactcggtccaactcggcccctcacccaaagacatatctattttgtcgaggttttcattgctgcgggccttcggcggcggcgaagaagtcgccgtggctcccaccaaccgggtaccaaaccggttcatggctggagacgtcgcgccgagagcgggcgcggacaaggccggagtcgcaggcctgccacctcccactcgcgcacgcagcccgccgcaccgagggagcgcgcacgcgccggcgccgtcctcggtctccacccgcggctgcgggcggggcggggccaccgacactcgcgggcgaccagagcggccccgcgccgtgactcgctcctagcggccctcgcaggatcggacgaggcattgcagccgctgtgctaggcgctcgcgaggaccgccgttgtgagcagttcgactttccgcccaaactgggggatgctagaccgcgggcacctctgaatcttatgccttcagtgatataatcctccgtgtccttcgagtccctcctgctgcagacaggtcccctatacttcggtacacacgagcctttcgcgcccaccgcaacgcagcctcgggaggcaggacagacccctgcgagtgtagattgcagctgcatcccagctcccccctccctggcacgctcctccacctacagctgcgctgagctgccgcatctgaacgcaaagcaaacgctgcagtgacggttcctgcgtcaccttaactccaaagtaaatgctaacgtttcccgtgtctgtaccttctctcaatcggcactctcaaaacatctggcacggtgttcactaccctaataagacctcagcttccctcgggaggggtaagtacctctgttgatgtagctgcattttcttctaattcatttgcattgggaatggatagaagggttcgtttactttttaatcatccctacgggaaaacagtttaatatttgatgaattcctgcatgataacttttttccgtttacaacatacggtatttacctctcttcttacctcattctccttccctgaagtaactgcgtttatgtggaagcgtttaggttatatcaccctcatacagcttaaaactatctcggatatttacatctaaggacaataccagatgcattctgtccacctagaaatctctgtcgcctttctcctctccaattcataaaatgcaaaaattcctttagcatggaaaccagccatctcaaaaccacagtagcctttgcttaatttagtcatgtcacaatgtcatgtggcttccaacttcaacaccaatgacacatttactattttttgcttggggatcccatgttttaaaatatttcttatgcatgtcacacttaaaaattaaagccagctgttccagctcccctttccaggcctgaatttaaagcaaagcttgcagtgacaattttgcggtcaccttaacaataaaagtaaatgtgaacgtttcctgtatatgtagcatggataaaaccaggagtcttcacacagattatgtttccagctgaactcaaagaaccatgacttttttgtaagcctagtagtcttatcttggggaaatgtatgatttttgttaggcttttgggaatattctaaataacttcttattctcaaaggttaagatgtctctttttttttatcatgacaaggacataacaatataggaagagtgaaccacacacctatcaaggggcacaagaaactt

SEQ ID NO: 1881005 - DNA, 4001 bp, Homo sapiens; identical to SEQ ID NO: 315687

SEQ ID NO: 1881006 - DNA, 4001 bp, Homo sapiens
cggccggggagacctgggcatctctgtgtccccacctggcacccgcggcttagtagaggcctgagaagcactctagaaccgggcaccagatctgctacctccccagctcccaggcagaagcacccaggtcaaatggtggcgatcgccgctgtgagttctcgggccaaaagggtccttcgaaaattctgcttcctggctgaccttctccagtcctcagagaaatcttgttcccaagtaaggaaagtgacagcttcttaatgtgatcaaaggcagcgccagcatttccaactatactcccgaacgaacaaagtactgaaaaagggaacgcgtccctctaaaggtgttttggggaccccaaagttccagcccataaattggagtaaatctgctctcaccaggcctggaacagcgcctcaagaccccagcagattctgggggctgcgttgaccctccccgggagtttgtttggggcccaaggtgggaggaccatgtcttcggcctaatggggaggggcccggttggtgtccctcggtctgcctggcacacacagacattgtcgagcgcgggtccctctttattggccagctgggcgccctgctacttggcgtcgcatttctctctcccaggcgggttcgtttccgccagagaatgcagcagtcccgcatcctacgcaggacctgcaaccgaggtggaggcttcggtcaagccggctcctgcctgcgttgtcgaggaaggcaaccccaaggcctgaaaggacctggcagaactcctgtttcctttttttcctctacaccggattgcgggcaaggaggctggttcgggtctcccgaggcccctgctcaagcactccttaaccgtcctgctaagcccctctgtgcggcgattttctgagctgccgagcggggtaattaaatcccctccctcgctccgctctgcgtcaggcaggcggcagcacagggctgacgtttgggcaggggactcagccaggctggccacctccactaccgcagtggccgggaccctgccgcggaggggttagacgccgagctcgctgcgctgaaactgggaatacacacggaacggggagggggagggtaatttttaccgcgccggtgggagaaaaaggcgaattacctgctttcccgagggacgcgcgtagccacttccctgagagccgcggcaccgatcgcggccgggcgggaagcttccgctcggtcctggcgttcacagcccagcggccagctgctggtctgcctcccgcgctgggtcccagggttcgcgctcgagcggggcagctttgccggacacgggggattatccctggggacgcggtgtctttcagagggtcttgctagtctccggagacgccaaataggctcgagctccgcggcgatctcattttacgagttgatgaagaatcgtaagctaaaggatgggaaaagttgagagacagacggacggagagacagtgggccccggcgggaccgcacgcgttgaggggaacgccaaccgggaggcacggagactgctcacctgcccggcctggccgcggaggcccggcgccaagggcctcgcgctcggcctcccgccccctgcgcggcttcccgggctggcgccggcctccgctcccgcagagtggagttccgagcagaccgggctccgcgcgctccagcgtggaggggagcgggaggcttagcaggcggctcgggcaggcgggtcccccaagggcacgagacgcgctggttcccagcccaatggagctctgcgccccccagccccgcgctttacctgcgctgaggcctcggacagacaaacggacgccagacgcctaggcaggaggaggcctcagcctgagcccgcggccccttggcgctgccctgaactggcctgggagggggtgacgggggcgcgcccgcggagctgggcccagccgggcgcccccggagccgaggggaccgagggctttcctccctcctcggattattaaaaagttcatttcctggcgaatcgggtgacgtcaggggctcggcgtcgcggtggcggggccgcccggccggagaagccgcctccagttacccaattaccgactgtcaatcccgccgcccctcccccactctcccgggggtggccgggaccccagccctcctcctgcccccgacccacctgggggccctctggacatctaccccgggagcctcgggcccaacagggaagagggctggaggacgctgttgagtccccccagtactcggcacctgtctaggtcccccaaaatgcctttgtcctggacctccctcctcggcccggggctcccttcgagcctccgtctccccagtctgtacaatgggagggaggaagacttgtgcgcccggcccacacgaaccatagagccgatctccgggctagaagtgagtggggagcacttccaggtgacttagaagacggagacctcagaccaccgcctccccctcaccagaggccacctcggggaccccccccggaggaaaaaaaatgccacctcttgcccgggggcgtctccctccagctggcgccggcgccagtccgggtctccacggcctcgccccaggcaattgggcccgttggcctgcgaaggccacgcccggggaggggtgccccctccccctttctggagccaccggccgggccacctccactgggtcaagcacagccctgagcggccgcgtgtccgaggcccaggtgccctctagagccctgtagttcctgcccctctctgcccctctcggctcctgctgttccgccgctgtcgtccgaaccatcccaacccccagtccacccagacagcgcccgagctaggggagggaacggtctgggtaggtaactgcgctcggactgaccacgttcagcggtgaaggagcgtggcggggttagggtctcggggagaggccatccagagggtgtgcggcccgggctcctggggagggggcagttggtggttagttactgctagggaggcccagagcatcgagggatcccggagtgttcgcaagaggggctgcaggggtcgggccttggggtgagggtcccttagtggtggggcgcgttggcagcaggggccgccaggagcgcgcagggagggggcccgccggctgaggggggccggcccgcgggtcagtcccggagtccagcggttcgggaattgcggacgcagccaatgggaggcggaggctgggaggcgcgcggcgttgattggctggcttgggcttcttaggcgtgcgcggcccccgcttcatgtctgtgcaggagtcggcagctggcgccagggcggccggaggatgccgaggggccggagccgggagggcccgaggccgaggcgcactctacccccagctcctaccctgtaagccccgccagcctccggacgtgctgtccctgggcccgtcgccctcggggctcccgccggaactccttcactctcagaggccgagtccctcccctccccacggctgcgtgtgtaagtttggggtttgagagccggctgggggcctggggcgctcctagctttgaggggactctggggggacttagggcggggggccaggctgcgggcgactgctttggtgtgctttgttgagaggtcctgattgtgccgcttagtactgcgctcagggggctgcgtgtgcatgttttcggggttgagatcagtatgtgtatctggcgccaagtgtgggtgtgtgcgtgtcgctgggatcaagtgccacactgggtgcccgggcgcctgtctccaacttttgagtctgtgttcatgtgtttgtctaccgggcgggggggctcagtgtgagtgtctgactgaagtgctgctctgtgcgtttgttggggtcactggtgtcgggacccgtccccgggcgtgaccccatgtgcacgggtgtgtgattctggagccgcgggtcaccacgtgagtgtgcgtggctgaaccccctcccccgccttcctttcgttttgagccttgggctttcctccca

SEQ ID NO: 1881007 - DNA, 4001 bp, Homo sapiens; identical to SEQ ID NO: 315697

SEQ ID NO: 1881008 - DNA, 4001 bp, Homo sapiens
aaaaaaaaaattagccagtcatggtattgggcgcctgtagtcccagctactcagaaggctgaggcacgagaatcacttgaacctgggaggtggaggttgcagtgagctgagatcaggccactgcattccagcctgggcgacagagtgacactcagtctcaaaaaaaaaaaaaaaaaaaaaaaccaaaaccaaaaaaaaatgtcactggcaaatgagcactttttaatacagtgatcctgagagggactggctggccactaatcaccatctttgacagagtttgcttctttaatcactgtacattccggtggccatttgcccttactttacaaaaatgaacaaagcaaaattaaggtgctgaaagcaaacgatgagtatcggtctcaagcttcctatagaaagatggaaaaacaacagaaaagccaagaacagtcacaaggaccatcactgagtggacaaagccaactgcacattcaactgtgaaggaaatgaaacaaagttcaggacgatgccaaaaatacataatcaatgattgtatctaaaagatgaggcagcaacagagacttcaaaggtgttcagcattcttggaaggaagagagcctttctttttatgcgtaagtttacttttttggccggtgcacttgtattcaagaataccttagtacaaaataggagggctgagtgcaagtaatgaaacagaatttcctccagagtttacccagaggcatcaggaattcacagtccaacgcccaccatccaactgattcatcagtacccccagggactagatttttcttcctcctacagccttgagctggaaacaaaaaaaaaacaaaaaaaaaagaaaagaaagtacctacataggtcagaaagaagcagtgcatctgagttcccagacagtaaaattacttaacactctaaggctgtagaactttaagaattcttttctggggggaggcggggggaggggaaagacagagtctcgctctgtcacccaggctggggtacagtgctgcgatcttggctcactgcaacctccacctcccgggttcaagtgattcttcagcttaagcctcccgaatagctgggactacaggcgcgtgccaccccacccagctagtttttgtatttttagtagaaatagggtttcaccatgttggccagcttggtctcgaactcctaacctcaagtgatctgtccgccctggcctcccaaagtgctgggattacagaagtgagccaccatgcccggccgaactttaagaattcttatatgcagtttaattttacagagagccacatagatactcaagaaagtctccagctggccgggcgcggtggctcacgcctgtaatcctagcactttgggaggccgaggcaggtggatcacgaggtcaggagatcgagaccatcttggttaacacggtgaaaccccgtctctactaaaaatacaaaaaattagccgggcacggtggcaggcacctgtaatcccagctacttgggaggctgaggcatgagaatggcgtgaacccaggaggcggagcttgcagtgagccgagatagtgccactgcagtctggcctgggcaaaagagcaagactccttctcaaaaaaaaaaaaaaaagaaagaaaaaaagtctccagctacctggattcttgggttacaatgctggccaacaaccagactaaaccactgcatcactcaggtaagtctatacaaacacggagagactgggttggctagaggatccatcactttattttcagaaaaagatggccaaagaggggaaaaaatacagaggcattcccacagcacagtgaaaacaattagccatccaaaaagctgaatcaaaaacaatgccaatcagctttcacgcccacacaggtgaggtttcactgtgcaacagcacataaatgataatctaaatcctagagagaaaagtagatagcaccttgtgcttttccttggcaggtggatggcacaggcttggagacttccatgtcatctccgcttttcctcctctaacacagggctggttggtttcacctgcaggcactactgacttcagggcttgctggagaggagatggttgtgctgcagttcacttggtgactataaacactttgatatgctcggcagtcccccaagtcttccaagcaggaaatcaggtcccccccgacttcccacatgggccaatctgcagcacagacaacataacagcacagctaatccgtgaagacggacagtgaatcaaggctgagttccaggccagtgacttgtgtaccaggggcaagatggaaatgccagataggaaatattaaatccattccattttagctcacaaggctcaaatgcgccttccaaaaacacctagaggaatttaggattccataagggatgtattttacaatttaagcctccaagaccacagacgagggactccaggtgatctatccacctcactgcagatcagggtgaaggatcctttgaaacaaagtacagtctcctctcacttaaccctggaccattagaacctctagggcctgtaacgagtatacctttacaaggcaccagcaggcggcagagcagagctcaggacttgagatgactcagttgctcaaaaggtgaaggagaggctctcacttctaaaacgcagaaagacaggacacaggagaggcaaagccaagggggcacccaggagatgcgggagaaggactggtacatttgcagacaccaggcctgcttattctgcatagacaatgtaacatggctgagctgcccagcagagcttcggagaattacgctgattcacctctcaacctgggcggggtacacaaaggactgtacacaagatgaaatgaggattatttttggtcaaatgttcccaagaagggggcaaaagtgaaacaaaaggaggctggcagcccctgacacaagactagcaggtagtttccgccgcaaactgaaccttatcagcttaacacacccacacagcagccctgagggcatcagtgaggaggaagtacctcctttggggtcctcttccccaagaaagcctcttcccggagtcccccagtctgtcctggatctccatcatggacaatgagtgctcctctgcacccccccatatcaatggcagtggaaccaatgagaccagcagctgaagtccttctgcctgtgccgacgctggagttgacaccagaacagtgacagtcaaactgaagagttatccagggaagggaggaggacgacttcactggttgcaagaaaataaacctccgagataggtgtccagttaatttcccccaaaaagtttcccagttggaagtctgtttttagaaccgagaaccaggaactgagttacacacccacatgtgcttagacaagtaggcgggtgactttattcaccaactactcaaaaacaggctgcagagaacagaatttggactgccaaactcactgtaccctcatatcgcactctttcttctttgctgcctaccctggagcattttggctgggaggcaaaatcccagtgctattacaggcagtccccatacccctcattccatgcccaccccaccccacccaccacccagaagctgaagccttatgacccgcttggaggaaaacatcctgtcctggttttctgtgttccaatcagctctctaaacacatcctcgacctgagacacagacttcaagccagcctgtgttctgtcaggctgctggtcgccctggagggtggaagagaaaaagaagaaggttccaaaccatgtcactcaaaacaaatcaggcttaatgctcatactatgtttatattctttacattaacaaaatgcaacaaaagacttgtcctggtttttaaaaaatacagaatgtgagttttacgaccttttctaggagactcccgaggactgtaccttctctgcttaaagactgtagaggcgactggtgttctcacgcaaggcagccaaggtgagggagagtggctgatctttgactc

SEQ ID NO: 1881009 - DNA, 4001 bp, Homo sapiens; identical to SEQ ID NO: 315699

SEQ ID NO: 1881010 - DNA, 4001 bp, Homo sapiens; identical to SEQ ID NO: 315704

SEQ ID NO: 1881011 - DNA, 4001 bp, Homo sapiens
tctcccctcccggacaccggcttcagccagagctcgcacccgcctgcgccgctccacccacccacacttccggcttccgctccgcccaccccctagtacttccgttctccagcgctgggcaccgcggccggagctgtgggctggtaagtctgcgccgccagggctcgcatggccttcagaagcggtccctgggctgggcgatgacgggtcctggtggcagcaggcccttctttctcgcatcaccgggcattacgcggcagccatttccctcgctaaggccctaccttaggatgacgtcacttccggccccctactgtctagggaaagccggaaatggtaccagccttctttgatggcggggaggagtcaagaccggtagtcttcctatttccgttgttttgctctggagcctcccggagtttcggagagaccgtgtcttggatagaattggaggacttagcaaataaaaatgcaaagcgtccagttacattttttttgagttagaatctcactctgtcacccaggctggagtgcagtggcgcgatctcggctcactgcaacctccgcctcccctgttcaaatgattctcatgcctcagtctcccgagtagctgggattacgggcgcccaccacacccggctaatttttgtatttttagaagagacggggtttcaccacgttggtcaggctggtctcgaactcctgacctcaggtgatgcgcccgcctcagccttccaaagtgctgggattacaggcgtgagccactgcgccgggccacgtccagttaaatttgagttaagataaacgacgaataattgttaagtcctaaacattgtatgcacatacttatactttaaaaattacttgtttatttgaaattcaaatttaaccggaagtcctgtattttctctggcagccttagcattgagcgtccccctgtcctgtgctcatacccagtggcaaggctgggatcttctaggctcttgtccatctgggaaatagatacaaatttcatccaggctataaagaccggctgtcttagttgctaagatgcttttagctccaagtccaatgggcaagctccaggggtccccctggccaaaactggacccattttcggaatccccatgacgatgccctctgtgttccctttcacaacagaagtcaggcatggctgtcttttcttaccggagagctgagaactaggcaagcaaaatggtcaaagtctagaagtaaccaccatatttgggtgtggggtaaaccggtgtttgagatctgtgttgcagtggacagtatcagagagcctgaggttgttaagggaagagcgtagtgttaatctcaccccatgtctcattttgcggatgaggcccagtgagagaaatggaggtgtcccagccactcagaaagcctatagtagagctggaacctcaattcccagcctccttaccctgctcagtccatacttgctgatgaagtcagcttgcaacatttatggtaggcatttattaaagtagatgcaatagtacatatgtagtacagatgagctgtttgggtctttgttgttcctatacccctctacagcttcctgaccttcgccccaaggcttctttagcttttactctgcccagtggggaaaatggctatgggctcagttatgggagcctggcctttgcctacttcagcccttgggctctcaccactgtgggtggtgtgacctaggacttgtttttgttatcttggaaccagaaggcgtgttcttggcagggttgggtctggccaactgtgtgggtagaagggcatccttttctgtcctgcaattgggcttcatggcacatggcctcacatggtgcctggggacttttctaaggttccaccatgagccagactttgccctcactcctgatttgaacctaaacctcttgctgaactggtcctgcatactgagattcctcagattgcttgccctgaggatgtgttctgggtttgacctgataaacctgcagcctcctatagaccctgacttcccaggctcctaatcccagtctcatgagataatgaaatagagaagactggaggtcaatgggctcagggtcagttggtgggacaatcaacagcttcctggcagcagaggtggtaaagaggcaaggaaggagtgccagaaaggggcgttgccccagggtaacagcgcagaagtgcagggggtggaaaaggggtgggatgggagcccactggtagaaattactccctctgtcaatgattaactcccagccaaaggggtgacctgggaggagggcccagctaataggaactttggacttgaggcagagtatccagagggccggcatgtggtctgcagaagaggaggacgtggctgggtggcagggctggtctccaaggacgagtaagatcctgcagctgcaggcttcaggaagtctcctggggctatcagatggctccttcttgtagcagcagctgtggggtccactggccctgagccctcagaggggcggccgtgggggacctcctgtcttttgccttgcaagggcctcagttgtgctttttccctctaggcagccatgggtgccaggcagtgctgagagcagtggggcatggctgcagccctgcaggtcctgccccgcttggcccgagcccccttgcatccactcctctggcggggctcagtggcccgtctggccagcagcatggccttggcagagcaggccaggcagctgtttgagagtgctgtaggtgcagtgctgccgggccccatgctgcaccgggcactatccttggaccctggtggcagacagctgaaggtgcgggaccggaactttcagctgaggcaaaacctctacctggtgggctttggcaaggctgtgctgggtatggcagctgcagctgaggaactactgggccagcatcttgtgcagggcgtgatcagcgttcccaaggggatccgtgctgccatggagcgtgccggcaagcagtaaggagccatgggggcctgcctccctctatctatctggagggaaacctgggcccagacacaggctgaatcgggcctcccctccccacccgcttcccatttctcctggatctggcctggccccaggatgcatgtcagtgggcatcttcgttcatgcccccatcacctgtaaagttgagagatcaggtgggaggagaggagtccaccccatctcttgcgtgctgacctttccctccccagggagatgctgctgaagccacatagccgtgtccaggtattcgagggtgcggaggacaacctcccggaccgcgatgcgctgcgggctgcactggccatccagcaactggctgagggactcacagctgatgacctgctgctcgtgctgatctcaggtgtggtaccacattggcccaagactgttggtggggggtgcaccacctgatctctcaggtcttcgagagatcaggtctgagcccccggggtcacagggtaaagttaggagcaagggaggtggtgaggagcctggatggtgactcctgggttgccttgggctagtcgtctggcctcccctgagctgtggagtcctccccctgagctgaccttttcggtgacagtgagagggtgcatggggagcacataatgcagggcctgacacatccgtagagtccttggaaaatgtcactgctattgctgctgtctgtactaatgtcacctggggctaggccctcagacctcatggagtcctctccttgatcttccattgtgtgccccctgccctgcctcctgttctagtctcttaaggagtagttagttcttccggtgcctactgggacctggggtaccccaaggcaggggcaacctcaggtggccaggatgtggtgactgtacacatattgcatatccacaggggggcaccctaaccccacctttccagccccctttttctaatgtgggcttgtcacccctgcttgcctggttccctgggttgggatagcccctctacctgataccctca

SEQ ID NO: 1881012 - DNA, 4001 bp, Homo sapiens; identical to SEQ ID NO: 315718

SEQ ID NO: 1881013 - DNA, 4001 bp, Homo sapiens
tcacaaacattctctcagaccacagtgcaatcaaattagaactcacgattaagaaactcactcaaaaccacacaaatacatggaaaatgaacaacctgctcctgaatgactactgggtaaataatgaaattaaggcagaaataaataagttctttgaaactaatgaaaacaaagaccacaatgtaccagaatctctgggacacaactaaaccagtgtttagaggatgttaggtgcttaagggcagctatgatggctaattcatctttatgcctgtggccccaaggagcaagccaggctctccaataagctgtgtagcttcacaaaagggctctggcaatccagaggaaaccccaatcctgaaggaaaagcaaactttcctgatatttactgaatgtctgtttagtgattgactgtcatcttccttgttgaaatcaataggagactcaatgaagtgaaaatgaaatcaatatttaattcccactggtaagagataatgccatggcctatgttcaactgccaactttccctaattcaaaagggtaataggagctgtgccatctcagcctcatagccaagactcatatcagtaattttttccttactgatttactacgttcctaccacatggtagatgttatgttgtacatttttaccatgctcatacagcaaaccaactagtgatttatcagttgagtatttaaaatgtggcatagaaagggctgaatacttttttttttttttttttttgagatggaatctcactcttttaccaaggctggagtgcagtagcacaatcttggctcactacaacctctgcctcctggatcaagtgattctcctgcctcagccccctgagtagctgggaccacaggcacacaccaccacgcctggctaatttttgtatttttagtacagacagggtttcaacatattggccaggctggtcttgaactcctgatctcaactaatctgccttcttcagcctcccaaagtgctgtgattacaggcgtgagccatggcgcccagctgaaagtgctgaatactttaaatatacaacctcattgaagccttacaaccacattttgagatacgtactattgcctaattctacacatgagaaaactgtggcatggagaagtgaagaaacttgccctcttagaatactgtaggatcaggatttgaacgcatgtctgggtaattccatatcttgtgtttttaaccactatgctttactacctcatttcttagatgaggaaactaagactcagaaataacatttccaaggccccacccagaatccaagtgtctcatttcaccttaaaaagtccctttaaagtgtgagttaaatttcagtcgttgtggttattccatttattcaggagctataataaacagggcccttaattctatgtggaatatatagttgaagacccactccttatctttacagagtatatatctagttgttggcaatatgacaagtaagtaaaaacagaatgcaatatgtggaaatccaggggtgtcacagctggtgaatctatcgagaaatctttggcaatagaaaaacacggctattaaggaaatgcattttcttatataatgggaacatcatagggtgttctggggggtggttgattccacattccagtgtcatgagaatgtacatgcgagctattgccctctttccacttttccactcttgttttgctatgtgtccttcagctaacttctcttactgctagagtatttgtgggagtatcaggtgttacatccagaaatgactatgcactgacggatcaattgccatttcttcctatgtgtctttttaaagtgggaaaatatttcccaaatattctctgcatgtttaagggagtcttttgttagaatcttgtacataccaatcccccaaacaattagtgtctcaggaaatgagacaatcatgactgacttacaggacccacctgacagggctgacgcaactggaggaggatggatacctgaaaaaaaaaagaaaaaagaaaaagaaaaaaataacagggtttcatctggaacagataggggaaataatgaacattaggaagataaccaagaggattgattgctttaataaacaaatgtaatatagttataaagtagtcctaggagccggctgaggtgaccactactgggtgtggagaaggcttagaaatcatggtaggcccaagggaagctcagaaccatagacacaggaggcacctctattcacctggcttcctccataattcaactgacagatcttccaattactgcctttgcagtattgggaagaacacttaacctccatatgctctaatttccttcccttcatagtaagagtctctgtcaggcattgaagagctggactctttactcttcatgcacagggagaccaacaattaatattgctctaaccatacaattgtgcagaaaacatacctggggaattttactcaataaagataccgtgtaagttacccaagctacagagtccaaaggggatttaaatccagcccatgttttacttgtcaaaccatgcaccttggcagatacttgtgtccaccctgaggaaagcatcatcccacaaggacattatccacctgcaagaacaagtccaggggtctgcatctgcgtaaggtgggaagtaacttcaaaacacctacatgtggtttcataggagccctgctcctcaagatgtttcaggagagaaactggtgctcctctaatagggcttcttgggagacagcatacaagaatggtaggcatatgtttgtaagtctttttaacccactcctagtaccaaaagtgtgtggtggctcagatgatgggctctggaatcagaatgctgggacttggtttctgaagtctgctcctttttagctatcttaatttgggtttccgaataagtttgagatcacttatcagtttgttagataatcccaggaagcatggtaagataatgaacaacagaagaaaaccaataactattaccagtattggtagctgggacttcagttcaccaggatctacatgaagggctttgtaggaagcaacttggaattgtctcagcaacgaacaaaaactggggtatttaatccaatgactcctatttctcattacataaggactaattctggggacatgtggaagccagccaacaagataaccctcagaaatatctgcctcataatatttggtatttatgcccttgtgtaatctgttcccctaatatatcaggattggtctgtgcaaccaacagaatatggcacaggtgataggatgtcattgctgaggctaggttatgacagacagcatgacttctacattgttttctctcttggatcactagcttgggggcagccaactgccattgaggaagccaaatgcacaggctcatttggctcatattggcctcctgcccacagccttgagtcagtgatcttggaagtggatccttcagccccaattcaacattcatgtgactgtagctgtgaccagcccttcaaggtgcagtctcatgagagaatttgagatagaatcatttgactatgtttctcccagatttctcaccctcataaatagtgtgagataataataaatatttgttaagttacaacacttggggtaatttttatggaataatagataactcatacatggtgttaactttccaacatttctgaaatgttgcttccatgggcaagacaagctcctgtggccagagaaaatcatcaggaaaggggcacagatgcttgaggaaagaagtttacagcacacaccagaatggctcttcagagctgcaggtgatgtctggaggagtgtgtgaggacagagcaccaggccagctgtgtaaacttgagcatgattatacacacctctaagcttgggttctctctcctcttttggcccactcttcttcttcacttcctgattttaatctcttcttctttcctcccttttatttatttattgatggattgacttt

SEQ ID NO: 1881014 - DNA, 4001 bp, Homo sapiens
cttttaaaatatccttagtgatataatgaattgggaaaatgtctcatgtaataaccaagtcctaagctatatgtttctagaaaaaataatttaggaaaagcaaataagcaagctttacccatagctgcaggttgtcagcaagttgagatgatctcgggttgcagcaactgtggaggtttgtatatgctggtgtttgcccaaagccttcactactgccctgtcattctatagcagcctcttctgcgtgccccctaaccttgctctcagacatattacggagctcttgggagaggagcgcattgtgggatatatctatcacatccccaagcagttcagagttaataatttccttattaaacctatgaacccttcatgttttctagtcctccctccccaacccccttccaagttagtttctaggcaaccaataagcactgaattacattaagctctttatttcaaggctgcagttcagaattttgctgcatatttgttggctcatttatagagactgcagcataaaatgtattaattctgtctaatctgcagtacatcagtgatttggttagaaccacattacccgtacctgtttttcatgtttaaatcactcagtgccatgatgctcttctttatgcagcttatgccaaagatactgtgagctctaatttgaaatcatggaagcaagaatttccacaattcccagttcctggttatcatttagcaccttgagatagtcttttaggaaattagaattttcaaaatctccttttttgaatggccgaaatgtctaacagatgacttttagtaagaaagatcagaaacatacggttcaggaatagcctgaaatgcaggataaaagggaggatattgtttgctttaacaaactgaaattttggtgtgaaagagaagcaggcccttgaaaatattcctttgttggtatgaatcaaggaattgaggttgtaatttcaaattttaccaaggacagtgtgagaatgaagattaatcttccagcaaaaaagaactgttctctgttttgaatgttgaatggtttgagatattctctagaaaactctgagcaagcatgctctctttctctctctgtgatatttataaagggatctggtaagtctctaagtgtataatatattaaggtcctcacaattgagcaaaaatataaattaaatgttagttcactctgtagtttcttaaaacacaaagcagtaatctacactggccacactaaaatggtggctttgagaaaacaaagtaaaatccttttaaaactcaaacttgaatctaatctctttcctttcacctgcttataatgtagctgagacaggtgtgtgtggcatataaagctgtagaaataaattgaatggtcttgtggcatagaaagccagctgcccactagagttgcatggtagaaaaaccttctaggagaccctactgccaaggaggagtggcccagattaggcagcaactgcatcttccaggtgactttgcacttagaggtgccacttactggatttgcttcagtaaaatatgagcagaagggaggtatgccatttccaggcctggcctacaagatcttctgtgtgatctcccatgtgcctgcctttcttttttttttttttaattttacattcttttatatcaatagtttttggagtacagttttggctacgtggaaaagttctttagtggtgatttctgagattttagtgcacctgtcactcaagcagtgtactcccatatgtctctttcgtcccccccgtgcactggatatcactaacctctcaacctggggaaaagtgagatgttttgtcaaagcctccattaccagtgactgcatggagtatcacctgtctagatccctgacaataaaactattgtttatcactgagaatttgggtatatctgtttcaacagctcgttttaccttgacttatagacgtgccatgcatgagtcacaagataggatcacttcagtcagtagaaccacaaatattcttgactgcttactatgtgccttacaatgtagattccaaggattctatggtaaccagacaagaatggcttcttaaagtagtaggaaaaaaaagacacacttcaaactattgcaatcaatctattaattatatacatgtaatgaaatgcaaaatagaaatttagtacctatagagcatataatatagtaagatttaactacagtaaggtttaaatacagtaagatttaaactactctggggtttgacaaatattttcattcattaatacttattatttccaaatgttagttcagatgaaaataaatctggatttcatgttatacatagagagctgagtccagagtagaccagtagaatcagtaggttaaattgtttcttcctctcctcccccaatgcccaggaatcaggatgcagctataaaccatttattaaataaatttttcttttcctttgagaaaaggaggctgggcgccgtggctcacgtctgtaatcccagcacttcaggaggccaaggcaggtggattatttgaggttaggagttcgagactagcctggccaacatggtgaaacctcgtctctactaaaaaatacaaaacttagctgggcatggtggtgcacacctgtaatcccagctactcaggaggctgaggcaggagagtcacttgaacccaggaggtgaaggttgcagtgagccaagattgtgccacagcactctagtctgggcaacacgtgaggctccatctcaataaaagaagaaaaaaggaaagcacttaggaaacatttcacttaatccttcctttcctagatgaggaggagaaatgtattttccgagcttataataccttccattttaatatatggaacatttagtgtgggccagaaactatgctagttgctattttttattgtaaaatttaatagacatatagattagtgcaccataaaaatatataggtcagtgatttgtcccccgaaaaaaagaacactcaggtaatgctgcctaaatcaaaaaactgatcattgcctactcctgagaatcactaaacagcctggcccaatcccagctacctttttccccacctactacccttccttttatggtcatggttagtatctctctttatagttttactgtattaccatgaattcaaaaatactgggctttataattttttgaagtttaaatacattggatcttaacagtatatattcttgtatgtgtgtcttccctcactcaactctacgtgtgtggctttcattcatgctcttgattgtagcattccttgggtctttcccattctgttgtatgaacatatcacagtgtattccattgtatggacattatacaatgtatctagtttagtatgaatgatatttagttgtttgttatgaatagcagggttctacataatcttatacctgcttcttgacacacaggtgcatgcctgtacttccagttcctaagtttcagactttggtgttatgttatagcaggcacccatgcctctgtatcgttccccaaagttattttcttattttaaaaagttgggaatggagggctgggataacgtaatagagccagatatactacactggccgtctggttacagtgccacagacatttagttcaatatttaatgggtgaagctgagttccatcctgtatcattgaaacaaatgactggagaaaacagatgatcagtatcctctttggaatgccattactcatttcttttatttgtttaaccatttttaacgtgggtaagatgagtgtattcttgctctcaagtttgattttactacttttaatgaattttttttctgactttttggtcaagccaagttttttccacatcatagcataagctgttccctttgcctgaaatgttcttattttaaagctttgcatgattagctaattccttattatgatagttttaacttaactcagaagtctcccttgagtatcttacctgccccaagtcactcttta

SEQ ID NO: 1881015 - DNA, 4001 bp, Homo sapiens
gttccagggccggctcttttgggtttcctgctcccatcccatctctgtacactgcggtcactccagctgtggccaccatgttcctctccccagagtcccctctgcacatcctcagaaggctcctggtcctgagcaccctgatcagtgggcccagcacacacagctggctgttcctctcacgtcctccatgcagccagcctggcctggaaacagctgtgcagtttcggcaggctcagctgggtggtgctttcagaaacccatccccgttctctgtcaggaaattcacatggtccttcttcaagaaggtggaggcctcaggccctcaacgttgtcctgtgccctggagacagtccactcagccagtccttcctgggaaaggagcccatcctcctctgcagggacctgggctgcaatctctcttctcacttttctcagggtacctggtgctctggggggcgaaggctgtttcctggctccatgcccctgccagcctcccccctaaaaaacccatccaggctcaccgtttcctcctagacataatttcttcctctctggggtttattcccttgacagggtgacaaaatggggggcgtgtgtgtgtgtgaaaggggtgagctggagaagaggggaggtgctgctagccctcacccagagaagcctgcttgggcccaaggccacaaatgcaccaacccacccccttttcagggccttttactctgtccacctgtaaatgttcctgtctctcactctgggaaccccaattcgccagcgtcctgtcccccctcacccctccatcgcttttctatgctgggcctctggagactgtctcctgcctgcaaccctgccaccccccagccccagccccactcctgtgccctacatcacctacccccaaagggatcccctctcctacccgagcatcttaccctggcctcagcttccccaagtggaggctgcaacggcttcaacaaaaactgtcctgtgccttctctgcacccccaatactggaatcagcagagatcgggccgccagccttgcacaagcccccccggggagggtggggcccgggaccctctccaggacatggtctcctttgctgtgttcccgccatcatttccctgtgcacgggagagggggaggggtgcacccaggaactaagagcgaatcccttccccatcctctcacaggaattcctctgggtgtcacagcctcacccccgcccaccctgtcccaccctggagcccccatttggctttggggggaccggcggcagctacttgtggattacaaaatgaggccctgggaacatcagcggcaacagggtggggggagcggcgaggcagtgtccctagagaggtcctgccgtagtcctccattccccgggttgtgcctaggctcccagaggcacaaccagaacccggggtgcagctggagagtgcctcccatccgccatcccctttggatggggcggaaaacccccgaggatgtcctagcgcagttcacgttgccccagccgaccacgtgagggcgcgccctgtgttagtttggacaaattaaagctcctcttgcgggcaggcctggagccccccgggccgggacaaggctcgggtgcccgtggcgttctctgggttgccggccgccaagctcccggccgtggggcctcctctggggcccgcgctattggcctccaaacgaggtgcccccctcctctcgcgctcccgcagcctagggtgcacctctccgttcgcctttgctgagcccttccaggacgcaagtcgcctctccactgcgccgggagctcaggccctgtccggggcgccccgctgcgggcgcggcggcgctggagaggcgcggtccgagaagccagcggccggagaaggggctccaagaagcacaagttggcgctggccccggaccaggctgttgttgttctcaacgtggtccgccatgaagctataaaaagccgagagaagcgccctcccgccagagcgcagcgcgcacgcccagcgagttccagaggcgccagtggaagctgcggcggcggtgtctcgcgttcggcgggatttctcttcgctccggctcggcctaggtctacgtccccagctccagccgccggctcggactcggtctctgacccccaactcggtcccctagtccggccccggctccgggccccccaaccctcgctccggcccggcccggcccccaccccagccctgccgcccggccccaggcccggccgcggccgctcccgcctggagccgccgcgcgcccccagcccccctgcaccccctcggcccctcgccttcctcttcccggcgcggccccccggcttccgcgcgccgcccgccaccaatcctcttgctaccatgtccgtggagctcgaggaggccctgccagtgacgaccgccgagggaatggccaagaaggtgaccaaggctggcggctcggcggcgttgtccccatctaagaagaggaagaatagcaagaagaagaaccagccgggcaagtacagccagctggtggtggagaccatccgtaggctgggcgagcgcaacggctcgtcgctggccaagatctacaccgaggccaagaaggttccgtggttcgaccagcagaatgggcgcacctacctcaagtactcgatcaaggcgctggtgcagaacgacacgcttctgcaggtgaagggcaccggcgccaacggttccttcaagctcaaccgcaagaagctggagggcggcggggagcggcgcggagccccggcggccgccaccgccccggcccccaccgcgcacaaagcgaagaaggcagccccgggcgcggccggctcccggcgcgcggacaagaagcccgccaggggccagaagccggagcagcgctcgcacaagaagggcgctggcgccaagaaggacaaaggcggcaaggccaagaagacggcggccgccgggggcaagaaggtgaagaaggcggccaagcccagcgtccccaaagtgcccaagggccgcaagtgagcgtgtcggccggtcagagcggccggcgtgggcttttcggtgtttttgtttttctaccccaagtgacgtagattttgtacggctcacgccggccggggccgcgaggcctggtctgagcctcagggaggggccccgggtcctctcagtctttcccctcccccaacgatgtagcgtttttcgttgtttgctttaggtttttgaaacagccccggcgacgcctctattggctctcggccttggcaacggccgtcgtcatggttactggcccctaggcgccgatggccgaggccgcgcctgcccaccgggcggggtcgctggttggccgggcccaggcgcgcggggacgcggaggccgcgcatcctttcccagctccccaccctccttgcctttgggtgcgcgacaaacaatcgctccgggctcagggctgcgcggctcttcccttcattccatgggcctttttttgggcacaataaagcgtttaaacctttcagcctctctcgtttaatctgagtggaatagggatgggcgccttcggcacgcggggttggatggcgggcccctcgggtccttataccccagatctgttggccagggtaggcctggagccaggggccttcagcaaggggtgggaattgctggcttgggacgaacttaaagtacctgggacagggagatagacaggatcggtcccttaggagggatggatctatctgcccccacagggggtccatcggccattgcggggagcgggatgggggaggggagaggaggggggattaatgggttttcagagttaatggtcagggacctaaacttggcctccagagaggtagttcttacaaagtcacaccagactggcctgtaaacttagtcattctgactccagcgagggttagagtgagatgtgaccaggacgaagtgtggtggccagagagtggagttcctgaccacaatccaacgtgtggtctcagaagggtatttgctgtctct

SEQ ID NO: 1881016 - DNA, 4001 bp, Homo sapiens; identical to SEQ ID NO: 315747

SEQ ID NO: 1881017 - DNA, 4001 bp, Homo sapiens
cagctgtgtccccagtgctgtgtcttagtgagcagacacactaggatactgcaacaaagaggcccccaaacacagcagcgtgcataacacttatttcttccccacgtgataatgcggccggttggcccaggctttcatggtggtttgaaggtgttcacaagctccagggcctccgcagaccacttaactctttagctaccaggacacaattttaaaaacccttggccaggcattgtgactcatgcctgtaatcccaacactttggaaggccaaggtgggaggatcgcttgagcccaggagttagacaccagccttagcaatatagtgaggctgtgtctcttaaaaaataatttaaaaattaaaaaaatttaaaaacccacttattcagaccaatcccactctctttggcctcagcttcaggtccaggctgcccagatcctcattctcccaaccagaggatcatctgtgtggcttcccaaactacagagcaagttccctgaggggaagtcggtctctcacaaatgccacagggccactgcatgcactctgtcactttataaaatagtacttattccttctgtggtttacatctgcccacatccctgacctttgagtgagttacttcaccattctgtgcctcaatttctttatctataaaatggggatgacaatagtttgcctcctaggactgtcagaagagttcgacaagcaaaaagcatttggacttcaacttagcacatgacagatggtctctgaataataatcaacattattgtctcttgattccctggacttgcccatgaaatccagagaatgaagtgcaaccagaacttcattttcttccttttttttttttttgagatggagtctcactcttgtcgcccaggctggattgcaatggcgcggcctcaccgcaacctcccctccccggttcaagcgattctcctgccccagcctcccgagtagctgggattacaggcgcccttcatcacgcccagctaattttttgtatttttagtagagacggggtttcaccatgttggtcaggatggtctcgaactcctgacctcaggtgattcacccgcctcggcctcccaaagtgctgggattacaggcgtgagccaccgcacccggcccagtacttcattttcagatgcagacatgaaggaccagaaggctgaagcaacctgcccaaagccactatgctggcgggtggccgagtttgggtttaatccaggcccgaacctcagttccctcaagataaagttggggtgattatggcacctttctcaggattaggttgtgaggctcagatgccatcatgcaatcatggcaggcacacgggggcccctcttcaaacgtctgtgcgcttcccttgtgccccgccctggcacacagccgcccccgcggagcccagggatcccagcccggcagtcctccgtcagctgcttctgtttggatggcggggacggctgggccgacagagaggcccattgtctccgtcctctggggctctattgttggggcctcctcctgggttgcagccccacggacaaccccagctgtcgcttgggcctggctcagcttaccccggcggtgagggtgcgggtcggggacggagacgcgtgcaccctgaagacagtaactaggcctgctctacagagggaaacgcaggctctgagagcctacatgtcttcgccgggagtgcttgtcccggagctgctcgcagactgggccgggggtgggctcgggtcggagaggtcacggggctccttaggtcacaggcggcagggccagagaaactcccccgcccctacgtttaactcgcggaaacaagggcccagagagcccagacgccagcccaaggtcacacagcgaagccccggcacagcccgccgggaacctgtcgtttctaacccccagcctctcgccgtttctacccagcttgggaagcgcaggaacaggacatacggtggtcgcgccccttccgcgaggccggggtgaaacccgcttggccctcccgccagggggcggagcttccgaaccaggcgggattccaccgggtatttgcctgcggaggcgggacttcgggcttgatgggcgttgggggtggccttcctgcgggcaggctctctgtgtcgcaacactggcggggcgggccaaatcggccagagctctgcccccagaggacgcggctaagcccgggggcgtgtcctgggctggccccacccgcgccccgccccgccccgcccggtcgcggagctgcggccagctttgggagggccggccccgggatgtgagtgccgcggggcgagggcgggggtgggctcccaggggtcccggtgggcgggcgcgctagggcgagggcggggacggccgggcgggcgcgccaggtaagggcccagatttgctggtgaggggtgagggacgctcgggacgggtgtttccaggccctcccggcgcgccaggccagccccgcgcccctgctcggtggcccgagggacgcgcgccggccgcgggcctgggcccggacccggagcggtcgggcgatgtgcgcgggtctgacgtctgcgctgcccagccccctggctacgcggacgcccccacggaggcagccactggggcggatttctgtctctgggtgacgactgccagggtgtgatgggaagggttagcagcgcagcggggtcaggggatccccgccccccgccctggctcaggttgggtcccgacttgggtttctgagtgcttactgtgctcagctcctcagttgcattctctgagtcctcacaacagccacacattttgcagccgaagccttgtgccacacagctgtgggggcatttattacggtgcagaggtgatgcgcggaggccttgcagccagacacacctgagtgcacgcctgcttctccacagacctgcactgtgaccttgggcacacctggtctgctctctgagcctctggtgcgattgtggtgcctacccccagggctgctgtgaggactggattggaattgggttccgggaaaggcagccagtttaagcagctgttgttgaggggcccttgtctgcggctgaggggctagtggtgctgggcaatggctggtgggtcagtccaggcgggctcgggagggagctgctttctgccgaggctgccccagctgtgcgtctgtctttttccacacggtaggctacacacaacccagctgtaccagcatgtgccagagacacgctggccaatcgtgtactcgccgcgctacaacatcaccttcatgggcctggagaagctgcatccctttgatgccggaaaatggggcaaagtgatcaatttcctaaaaggtatggaaggtcccccttggactctcatctgcttcctccaacccacctgtcctctccgtcctcatccccaacataagcctcaggctctctcccatcttcagtttcagccctcggatggccttccacccatgcttccgcccaaaatgatttttccaacacagactcctaatcacgatatgatgtccctgactcagactctccctggctccccatcctgtgggcctaagtcctgcctctgcccaagaggcctagtggaaaggtagctgattactgatgggcacagggaaggtgaagcttggaggagtccatttcctaaggttcagagagtcaggaggtagagcacctccaccgcacctctcttgattacagatgggggaaattgtgtcctagaatgattaggaaacatgtgcacccaattccagtccagtcctcacagcagccctcggggtaggcaccacaatcgcagcagaggctcaggagctcactgtaacctccgcctttcaggttcaaacaatttttctgcctcagcctcccaagtagctggaattacaggcgtgagccaccacacccggccctgatttcttaatatggcactcattataagattgtaaaagcccacctgtagaccgaactgggcacactggctgcctgcttgtgacc

SEQ ID NO: 1881018 - DNA, 4001 bp, Homo sapiens
aggctccactgaagcacactccactaatgcgacctatttcccaagtgagcagggcccgggcaaacttgatgtcccaggaggatacaggaggggccagtaaagaagctgaaggcactgaagctcaagccagaggccccagagctgtgagaagctctctgttacttgccaacatctggaacagcagagagcagagaagggttcgggatgggagggaccctgggatgtgggggacctaccatcttccggccaatgtactcccagccaggtcgcacagactcccggaaggccttcctgtgggccccatctgagaacagagtgtggcctcagggagaggggccttcacatcccctgccccaccttcccccgtggacaaggctgccccaccctggggagcgagggcatcaggaacggggcacgggtctgagtctctttggtgctgcatctgcttctttctgggtctcgctgtgtgtctgggtccaggactctgtgtgtgtgtgtgtgtgttggggtgtgtgtgtatatgtctgtgtgtttgtgtgtgtgtcggggtccaggtctctgtgtgtgtgtgtgtgtgtcgggatgtgtgtgtgtgtatgtctgggtctaggtctctgtgtgtgtgtgtctgggtccaggactctgtgtgtgtgtgtgtgtgtgtgtgtgttggggtgtgtgtgtatatgtctgtgtgtttgtgtgtgtgtctgcatccaggtctctctctgtgtgtgtgtgtctgggtccaggtctctgtgtgtgtatgtgtgtgtgtgtgtgttggggggtgtgtgtatatgtctgtgtgtttgtgtgtgtgtctgggtctaggtctctgtgtgtgtgtgtgtgtgtcgggatgtgtgtgtgtgtatgtctgggtctaggtctctgtgtgtgtgtgtctgggtccaggcctctgtgtgtgtgtgtgtgtgtgtctatgtgtgtgactctgtgtccatctctctgtcagtgtctctgcatctctgtgttcctgtgactgaacctggctccacccagcctccagtgactatctgagatgggaaccccgggctgaaaagggagatccagccgtgttctagaaggagtaccctaggtctggagcctgtaactttctggctttgctggttggaaccctgaggcctccaggggaagaagggtcctgtccacctgccccggggcacagccattaccttgtgaagcctcaaggaggccccggccagcataggccagggccccactcagcaccagagagtagaggcccagctcagccgccggcaatgctgtcttgatgcccatagcctggacagggctggggagacaggttgggtgagggaattacagtctccagccaagcctagccccacctcatggtcccaccaccccagtggggacccactctgaagagagattgcccctccagccccttggggaccttgtaccatcactctgcctgcccctgtgccccccacagttcacaggccaccgaacaccagtgccccatcccagctgctgctcttgcccccaccccacccatcaaggctcttgcccgcagagccctcactcgcagcctgcctccctcaccttcatttacatcttcataccttccagaggcaccggccccaccctctgccaaaaccgctcctgccaaggcccccatgacctgcgtgcggagaaaccccacctctatcactacagtcaggtttctgcctgcagggtccccacctcgatcagtgagtctcccttagctcctcacaaagccccagcttctctaagaccctttctctgactcccactcccctccctgagatcccatgaccaccccaggtgctgcccctagagccaagcctccatcctcgcattaagcctccagcctgtcactgacccccattcccccaacaagtccctgagctccagcctgtcacatcccagtccctgcctgtgtccgtgaccacactgccccactctctcagcgctctgtgtattcaggccctgggcaccagctggaggctgtgctatttgaggaggtgcccaggagtagcggatgtggggccaggcggggccaggcggggccagggagggcactggctgctgtccaaggtgctgaccagaatcaggccccggctgagtctcaccactccctccagcgggggcctagcttgtcccctggagaactgctgggccgtactacggctcagctagcacctttacccttcctatcccgcttcagcctggctcaggggcttcccaaggactccatggatacagacataggacccaaattaaagggaggaagcagggaacatgtccaggcaactcttgggctgacggggccaagaggtggctgatgtggcccttttgcccacccttgatcctcccctaaatcttcatccccagccctgtagccatctcccctgggccccccagcagccgacggtctcctcgtacagatggaggggtcatgggccagataggggcagggacctgtcaaggtcacatggcagacctgggacagacttctgcctgcctcccttcaggattgggtttctcagtgacccccctctggaatctggggtaagagaagaccaccactgcccctgcccacagcagaggctgccagcctgatggctgtgctgtcggcctgagggtggaggcacctcctcatcagttgggtgggggtggagaggccctggggatcaggttaatggagcaggagcttgaaaccggagcatggtgaagagcccgtgaaatagctttgtcagctgcctcccactcgccactttccaattttagctccccatggccggtgcggggtgtccccagtgaggcctctgcaaggagctggcccccagcctggggcctctcctgatagacccccagaccagggctggcctgtggacacgggggcataccctttcccctggtcctgcctgccccagatgccccgggggtaaagccccttttggggcctgtgatttgggatgagggcctggggtgtgccccacaagtctcaagagccccagagtagctgcatccccagctggcactgaccttgaggaggccgcaagggaccctggcacactgcccacctcaggctctggggtccggcttccaactgtccgtccgtgcgaccggctgagctctggggccacggtggggtgtgtccagccctggggtccccacccccttgaggttatgagcggtgagtggtgacagcgggaggaggagggggaggaggaggtggccttcctggagcggagctgagcagagtggagcagagccgagtgctgcagagctgctggccacagggagccgcagggaggatccttgaaggggggcgggtgctgggtggggggagggtgtccagtagcataggctcagacagggacacctgggcctctcttcagcctgcctcccctggctcctagagagcctgtgcctctctctcactgctacccaggacttccctcttccaggaagactcctggtggtcccaccagcctctccaggcttgtaagccctgcccccaccacagacacacacagtcacaacatgcaaacactttcatgcttgggctccagggactccagctcctacctttacatatgacctcctaagggctatcccagggcagacttgtctcgccccatgacctggtccttttcattatgccgtgagtcctggctggccatgcatcagtgcctgagggagggctgacttgcctgatgggactggaactggcatgggacatgtggctgagagggatccccataagtcagccctgtcccatagggagtgtcctggatggaggggtgctagcagggtcacttggcaaggcttgtgggtacttggaatggctggtatcctctcggtggcagagtggaggcagacaggaagacaggtgtgttcctaaccaactgggagtcctggtaggacagggccctcattctggaagggagcatccaaggcctcagccctggatacctgaggggagg

SEQ ID NO: 1881019 - DNA, 4001 bp, Homo sapiens
tctcgaactcctgacctcaggtgatccacccaactcggcctcccaaagtgctgggattataggtgtgagccattgcgcctggccagtcttaagtctgaaagagctatgttctcatatttggaattttttctttgtctagtgagcatgactttcttactcttacaaaacatcaatttgagcaatttctggcatattttccaagaatttatttaaaatctggcatactaaaagctgaactgtattgccatttgcctcaacacacttcaagaagaacatacaacaattaaaataatttgaaatgccattgtctttatcttcctcatcaactttggtcaaatgaaataatacattgtttcaaattctattgctcatccatggttcatgattagagatcactacagtttatttacgataatgaacaaatgtgtcttgaaaagctgactaccggcctggcacggtggctcatgcctgtaatcccagcactctgggaggccgaggcgggcggatcacctgaggtcaggagttcaagaccagcctggccaatatggtgaaaccccgtctctactaaaaatacaaaaattagctgggcgtggtggcgggctcctgcaatcccggctactccggaggctgaggcaggagaatcgcttgaatccgggaggcggaggttgcagtgagccaagatcacccccattgcactccagcctgggggacagagcaagactccatctcaataaaaaagaaaaaaaaacaaaaaaaagaaaaaagaaaagctgaccacctaatattattgtgctgacaggcgtgtaacatggacctctctgtgacgcgcaagtattatctggcagttacatggtgccgcctgtgcagctgggcgccaccaccagcttcctgccctgtgcgattaaaaggccagcttcggggacagcagcctcctcaacgcaaagcgaccagccctgccaggcgtcggctgcagctggtccaaggttgacggtcccagggccgcattctccttccggtcacctcagactctggaaagagagccatggagggcctcagagcgcccctctgcagttccttgaggaaaacaagggcctccccctcttggctggagcagccaagtgcccacggggaaaatggtcccgtccaccatttcaggcaaacgcccccatagctgtaataaacatgtgatgggtttcctgcaccaagaaaggaaaattttccttaaaaataacaaaaagaggtggggaggggactctaagttccatttaagattttccaaactcgttgtgtctcatgcatacgctgaggcttaacatgaaaatttggagcgaaagtccccacggttcaccacagggaatgaagtaaagtatctcgccggtagctctaggtctcgtaaaccgtggagctcctttagtataaggccctattatgtgccacattagatgagaagaaaataagaggaaggatacggtagagcctttagaatggggttcagtcttaggactcgtaggataaaggaaggtcgtttccctccgtttgaggcagggaatcaaacaaaacaccggcaccgcaggcaccgcagtcgcactcctggggcctcgtggctttcccgcgcgcccgccttgggggcggggaagaacccggatggaaccacccttgcagcccggaccccccgccgtctttgaatggcagcggggcggagttgccctcccttctgtgctctgactggtttggctccgcactctcctcttcgtgattgggctttcctagtgccagtcacagagcgacgctggtctcccagattgttgcagaaggagacggcgtcgacgtctgactggactcgcggcgacttacctttcagtcgtgcgctcctgatccggcgctcggaatttgtccccggcttcagggctgcggggcctggaaggaggcgtatcgaggcggctcgaaaacgatccaggggagccgaggcgctcctcttgtcatcccactcagcgccatgtcctggatgttcaagaggtgaagggggcggagggggtggggcgctcggtctaacggcctggaggcgtccccaaatgaacctgaccttccccgcgttcctctgcgttccctgggcgatttgtgcagctgtattcgttctgttggtcgcatatgtggccgccggagaaataaatgcattgtcttcgctggcgagtaggggctcctagggcgagtcccgtgttagggacttgggaaatctctgtcaccgactgtggggggcctggggcttaaagcatctcggccagtgctttatttaacaaaacatccattagatacccactgtgcgccaggcattgtgctcggtggagggccgagtaagacagtccttgtccccaagtggctcacagcttatctgtatgcacagacgtgcagataagtatttgcagaggcgctagtagagatatgcgccacttgcaaggaaaacgcatcgcaaataagcgactgttcttaggagaatggaaactttttgcaatgctccagtagactccccttcacttttcattgtccaaattggtatttatggtcattcccgaaacagttacacctaatgggtttggggttatgcttaaaccggcgacggaaggcgggtacgggtggcttggggccaatttcccacggtggcgtggtttggataccagaataggtgttctgctcgcagggagttacagtgatggatgctggatgtattttctggaaaattataaacaacttctggtacattaatagttgtatttttataagtcttttatatagctcaatccctattgaaattttggcatatgatttcattttttaaattatttttttgacatggagtctcgctctgtcgtccaggctggagtgcagtggcacaatctcggctcgctgcaacctacgcctcccgggttcaagtgattctcctgcctcagcctcccgagtagctgggattacatatgggcgccaccacgcctggctaatttttgtatttgtagtagacagggtttcacaatgttggccaggttggtctcaaattcctgacctcaggtgatccacctgcctctgcctcccaaagtgctgggattccaggcgtgagccaccgcatccggcccataattgtagttacagacatcatatacatatcaatttagatgattttcactgggaaagaggttagtgaactctgactaggcttttcattttgaatacctagggggcaggtagaagagccaatattgaaaacaggtagagttcctagaagccttctccactcactgcaattcctgctttaacgagagtaactattaatctttaccgtgattcccatgtaagatttcatttgctgaagtaaagcatgagaaaactactcatatggtctttggaaatacttaaatattatattgtttttctttgcctttaaaaaaaaatagggatccagtttggaagtacttgcagactgtccagtatggagttcatggaaattttccacgcctctcatatccaactttctttccacgttttgaattccaagatgttatccctccagatgactttctaactagtgatgaagaagtagattccgttttatttggaagtttgagaggtcatgtggttggactacgctattacacgggagtagtgagtataatagtagataattaaattttgattatatttctggcgttaacctagaaaataagagaattcgcaggtgatgtgtgcggttaatctttattttactttaagttagttaaatatttgtacgcaaaaaataacaaataccttaagtgaccctcccacctcagcctcccagagtgttgggattacaggaatgagccaatatgcttggcctcagtgcgttatgtttggttattatgggtagcaccccacccccacaccccagcgccttgttcatgtcatcgatttgttgcaaaaaggagatcgttttgtggaatcttctggattttattctttcatttctccgtatg

SEQ ID NO: 1881020 - DNA, 4001 bp, Homo sapiens
agaaaacctgtctctactaaaaagacaaaaattagccaggtgtggtagcaggcacttgtagtcccagctactcaggaggctgaggcaggagtattgcttgaacccaggaggtggagcttgcgacgagccaagatcgcaccactgcactccagcctgtgctacagactgagactctgtctcaaaaaaaagaaaaaagaaaatgttacttgatcatttactcactgaagatgaagagaatactaattgctttccctttttatttcaatgacatacctattaaattaccaagtcgagtacccagtaggcagctaagtatgtgagtctggagccccagggccagatccaggctgagatacagatttaggaataactggcatacagataggttatttttaaagagcatgttcttagcagtctgtaacattgagcctccatgtcttttaaggagggtctttcatatgcctccccaactcattctgaatctttgatgacatctcttcccaagcacctaactagaaaactgaagtgttaagacactgctatgtacagtgccaggagactgcaggtaataataccagcttgcggccaggcgcagtggctcacgcctgtagtccctacactttgggaggctgaggcaggtggatcacctgaggtcaggagtttgagaacagcctggccaatgtgatgaaaccctgtctctactaaaactacaaaaaattagctgggcgtggtggcacgcacctgtaatcccagctactcaggagactgaggcaggagaattgcttgaacccaggaggcgggggttgcagtgagccgaggtcgtgccactgcactccagcctgggcaataagaacaaaactccatctcaaaataataatgataataataataatagtaataataccagcttgcatttgttgagcacttaactacctgccagatgctgttttgattgctttacatgttctagttaatttaatcttcccaagtacaccagcggtagttactgttgttatctttattttactgatgaggaagttgagacactgagaaattaagtgatttacttaatactatttaatttaattcacccaatactatctatttaattggtaaataggggagctgtgattcatatgcaggcagtctgaaaccagagcctgtgtgcttatatttcgcattctcattatcagtggtaagaatctcatctctaaaggaataatctgttatcggcttaaagagactcataatttagaaagtcttttgtttatatatcattatgaaattgtgtctattagttttccaaagtttactcttttaaagaacactggttacttggagctacaaataagcagcttttccatttgggctttgagaaccatttctgccagtaactcaaacctgatcctggagctcaaagcttaacatatgtggctgccttctttaaatctttacttagttatttaatagggatgtcaaatgtaaacaagacccagctactgaattattctccaaacctgctttttctccaaactttcctgtctccataaattaaaccaccaactacccaatttcacaaaggcctagcagtattctgatttatttatttttttcacccctatatctcatccatcaagtcctgttgtcactacctcgaaaacatatcctgattctttctttgcatttttcttcgctctgcctccattggagtatacattttcatccttactgccataagcttctaacagggctcagagtttccaccttgtccctcactcaccagctagaggccttttgaaaagaagtcaggccactttcctgcttaaatcttccaatagctttttccctggcacatagaatgaaattcagattacttaccatggctggtggccaccaggtcttctactatttactcccctatagtttatgctgccccacccacaccagccttcattctgttcctcagtaggccacactcattctgtcttacttagccgtttgtgttagctgttcttttcctttctgtcctgtccttctgattggctggctttctttctttctttttttttttttttgagctggagtctcgccctgtcacccaggctagagtgcagtggtgcgatctcagctcactgcatcctccacctcctgagttcaaatgattctcctgtctcagccttctgagtagctgggattacaggcgcctgccaccacacccagctaacttttgtatatttagcagagacgggatttcaccatgttgaccaggctgatctcgaactcctgagctcttgatccgcccgcctcagcctcccaaaacactgggattacaggcatgagccaccaggcccggccagctggctctgtcttaacattaagtactcagttcaaacgtcacctactcagagtggcgcttcctgatcaggcagtctagagtaactatctaggtgctctattacattatcacaatatctattaaattattatgttattataattctcagcagagcacttagcaccaactattatttttccttgttaaattaattactttttcccagcagtagactgtaagagctccatgtgagcaggtattttgtttgtcttgtttgctttagtttcagggcctagagtagtatctggatacagcgaaggcactcattaagtatttgttagttaaccaattaattattaatatttcgtagtcacaccttgaagacctcaacctaggagatctttatcaaaagaaccttgatctgctggcagatttgtcaaactcctgtccaggcttttgacagatttggcaaatgccgcttttctcttttcaaaattacattagtagtccttgtaaaactgtgtctaacattttattgtaaccatatttggatttaattttataaattacgtttggaaagaggacaagagactctttgtaaataagcctgtaatttttactggtgacagcttttgtcacctagaatcaatgtgcttattctttttgagattgctgaaatgagctttgtaaatatttttgttgtaatatcattttatggtatattcttcaaattatattgctttatccatggtgaattccttctggaaatggagtaggggagcaccttggatcttttctttaaacccaagtacccaggtttttttgttctgtgttttttctattttcacaccaaagttaaacctttacagtattagttttacatatagacagtcttgcattgtagatgttgtaaggcattgtctctacatataaaattcagacttggaatatttgtaggagatgttaataacacacaacagaggatcgacttctgggcatgttgttttcataatcattcgtcaagctctcatgcttagccttgttttagacactgtaccagaattagagggaaaaaacataatcagcttacattacaggatttacacattgatgtggttcagtcaaaatgcaaatagtattgacagatattcaggggcaaaacacaggggcaggatgaatttaaaaagcaaggggaaggaaagaagaaagaggagggagaaaaatgactatgttattagtcattgctctacacttgaaggctgtaacagatggacacttagataaccttcatggtctggtttaatttactgcatataatttccacagttctttcagatgattaaatgagtggttcttgacaacaattacgaacatttaaaggtggaaatttatgcatatttccctaaattgcatgtcaggtagttcctgctataattttgctaaatgtccatgaatctcttgaaaaatacaactcataaatgtggaaggcctatacataacttccatttcctccctcagattcaataataatatatcattttgtggcacaaatctttttttctttttttctttttctttttttttttttttttttgagacagagttttgctcttgtcccccaggctggagtgcagtggcgcaatcttggcacactgcaacctccgcc

SEQ ID NO: 1881021 - DNA, 4001 bp, Homo sapiens; identical to SEQ ID NO: 315780

SEQ ID NO: 1881022 - DNA, 4001 bp, Homo sapiens
cttgagattcctcaaattcctgttctggctgccatgcctttgtgtgcctcattcccttagaatatctttcccgacccctctatgctctcacttttcccattggcgtattctgccttccattcctcagagcgttgctaaggtgttgcctccccctggttccttgccaggtttcccctcctgtctgtcttgcccctcaggcaccctccatcatggtgcaggcttgtcccttggcagtgcggcatgtgaggtgcactccctgcccactagcctcctggttgggagcaggtggttcatgctgtctttctggtatctaacatagtaaatgcttggtaagggtctgtggaataagtgaaatgaaattaagaaagccaatagtcacctgcctgaatactgagaaaaagcaaggaagaattctgtgaagtttcccagagtgaatgggatgggataggttggttgctttgctttttgatagggatggagtcttgctacgttgcctaggctgggctcaaacttctgggctcaagcaatcctctcgacttggcctcccaaagtgctgggattagaggtgtgagccactgcacctaaccataggttctttaatatatgaaaaatgatcaccctcatttgtaattaaaatgcaaacaagatagtatttttcacctatggatgggcagaaatcaaaagtttgatagctccatgttttcagctcccatgtttcagatacatggggaaatcagcattgcactgtgtgttgatgttacaaatgcacagcccaataactgttccacttttaggatttcacttctaggagtttatcttccaagatatgctcacacgtgcaaagtgagatggatggatggatggatagctagatgatagatgaatagatattcattgcagcatttacttactttttggaaacagcaaaagattagaaacatcttgtgtccatcagtagaagaccagtttaattatggtacattcataaaactgaatattatacagctgtcaaaaagaataatactaccctatactaagtgaaaaaatgcatatacagagcattaatgtttgtgtttgggtaaaaaaaaaaaggaatgtattcatatatgcttatgtatagactacacgggaaggatttttaaaaaatgagtaatgggacctggaggactgaagtatagatgtagaagagagaatttttctattctattctttggtacattttgaattttgtgcaaagaatatacagtacttgggctagacgtggtggctcacgcctgtaatcccagcactttgggaggccaagatgggcggatcacctgaggtcaggagttcaagaccagcctggccaacatggtgaaaccccatctctactaaaaacacaaaaattagccgggtgtggtggtgggtgcctgtaatcccagctactcaggaggctgaggcaggagaatcacttgaacccaggaggtggaggtttcagtgagctgagattgcgccactgcactccagcctgggcaacagagcaggagtccatctcaaaagaaaatgaaaaagagtatgtagcacttacttctaaaatataaatttatttcaaatataccagttgagtggtagatatagctgttcagatttgctgagatccacagaatcgcaatgttaaaaataacgagaaagagctccatgtgaaataaacaattttcattctgatgtctcaccagcactccccactcccctcaaacccctgcctttggagtctatcttacttacctgttaccttgaccattggatctggaaagggccttagacagttatctagtggtgttgccattaaaccaagccgcccactgctgcttttccaataaatgtgccatgccttaagttttcctcacctgctgctaaagcatattattttaaaaatgtgaaaatgggctttacagagctgtttagatcaaagtcgcaataacaagtggagtatccctatattactaattaaccaacatctgagttatgggccagagttctgtttctatgcagtgaaaatgtgaactttgacctggtggtttatgacagtggtacagttccttgggtgcagttctggtcttctcattcacagtattacaccaagacacacacacacacatatatgtctcttgcacacacacacacacacacacacacacatacatatctgtagggcaggctatgcaacaccctctattctgttcatagtaaatttcatgaaataaccttatactttcaaaatctggacaccagatattgtacaagagtatcctggcagtaatgaaagtgtaagcgtaaagcttcctgttttaggagagggaagaaatgggtaaatggaggctgtagggtcatgacacaagtagagtcacaaacccattgttttttgatttgtaagccatccaattataaaatacagtggagtttgtcacctaacttatttattgggatgttaaaaattgtgacccaaacaaaattcaagatttgttgagattattgtttttttttttccaaaattcagcatctatttgtagcctaaggtccatgtgggatacctcttctttctgctccttaccttctccttgcaacagttctgttttgctgtcaaaatgaggtaaatcatagatttagaaagaatcttctctgtctcatggctgaggcattagagaggttgaatgactgactcagcatcgtggtagagctgggattcaaattcgtatctccagttcccacttggcatatctctcactctgcttctctattgtgttggaataatggcagcctttggtaacaataaaatgttttattaggagtggggagaattatggtgttagaaaatctagggaatatatttaaaatttgtattttttcttacgtcattgttccctaggaaatcaaggctttttctttgcttatagacactagtaaataaaaatgtttgcattttcataagtatttatgattgattattgcaaattttacatttcacaccaaggaaaaaaggtattcttagtaagtatggtaatcagggtgctattaaataaaaaataagcataatctgttggtttgacagttgcacttctcagcttctgaaaccatcctgaactaggtctttagctgaatctacaggtgactctgtataactttaatagtttctctcctgattcagtgctggctccaggtcatgccttctaattagttgccagattcattcacatttcatgggaaaaccaggcaccaactctcctgagcacatcaggaccaaagctgggaaaggggagtttggtgtttgtagagtttgcagtttgtggagtactttctcataatcctggggcttgatgaaagccaagtgagaggagagggcaggagcttatctaccatggtgactgggaccctgtgaacagcaaaggagagggcacctactcagctctcttccttctctcaatcatgctgctaaggacaaggctctaggcaaggaaaggtcctgaaagtaggaggcactcctgggctgcgtccagggaaggaaaaagaggtaggaaaaggaatttgaagctgtggtagcggggactgcctgtggccacctgctgagccaggtaggtcgttcaccgttattcacttcaggtattgactcccatgtgcacctctctgctggtgggtcctgctggagcctgctcagctaatggtgctgtcttgagaggaagcgatgaaaactcaggaagtgatgaaaactcaggaaccgagacagatgctgttcattgtctttgtaggacacagaactcagaagatagtgtgaatcagccgctggaaggaattctgtgtttaagcaccagagatgttaaccctgtcatgttcattcattcatcaggttcactgagagactgcggtgcacatgtcactagcctagaagctgtgggtgtgcagggataggaataggatttgcatagttcaggaaagatacaggtcagaaatcttggatttctatcagc

SEQ ID NO: 1881023 - DNA, 4001 bp, Homo sapiens
atgccttttcttaaagatgtcaaaaaactaaagccaacaagttaaaataatgtgccccaggctacacaattagtcagtagctgtacctggattctatgtcctgtgctcttttcagcattcctcagaggctttaagtaggagttaggaaaggctctggagtcacactagacattgttttgaatcccagttccatctctgggtctcagtttcctcatctgtaaaatacgattaataatcatatcacctccaagtcttgtttgttactaagctttatataaaccgcctaaaacaatacttggcacataagttcttgatgaatagcatcaagtacattgaacatcaaatatattgaacatttactgtattatggtctctgtgtgctgagacccgagcatataggttctacttagaatcaaattgagaaaggcctctattaagagaatttaaagtgtcgtgactatatcaaggaagtacagggtgtcatgagggcatttaaaaaggaagggtagtctgttctggaggtcagcagaattttgaaatctgaaggatgggtagaaatgagagggatcgtgtgtgtgtgtgtgtgtgtgtgtgtgtgtgtgtgtgtgtgtgtgtgtgtatttcaagctaaggcaatagaccacataaatcttagatgggagagtgcagtgtgttgctgaacctgagaaaagcccactgtggaagaaagtactgtaagactggctggaagaacaggcaaaggtcagattaagcagagccttgaaggtcatagaaagtaaacctagatacattgtattagaacctaatgatgatgccatattacctctatctctattcctagacttcaagagaacttctaaaaggataaccaaactctttacttccacatttaaaatatttgtatgttaaaaactgaagaatgctttaaactagttagaagttaaattagtactaacacaaacatatctaaaaatcaagaaaaattttaaaaatagtgtttaatttggaaagaagcagtgttactggtgaacaagaataaaatatttcagttgagccatttttaaaaagaatttaattggtttcagaatgtaacatccttcctgatggtttcagatggctttatttgttcataaataactctacttgttgatttagccacttttgtcatatgaatgcttcattaaacaaatggagcttgctcattatagccaagtagagctatattcaaccaagtggtgaagttgagagtacatggttgtatttaacagcaaaggccctttatctggcctcttgccatctggaaactctagatagcatttcccaatataaatctcaatgtagtaaccagactgataaggacatgcaactatagcatcacaatgtcagagagtgttctgtatacaggaaagaaaaatacattcttctcaccctattcattatccaagttaaaagcctagattttcagaagtcctttagaaagctaagcagcaagaaattttattttctctgaaaaaggccagtcacatggaagttcagatttggctagagggttatcattgtaataaaagacaatcctgaaatagcgaaaaaatagcccctagattctgtcagttttctctgcccattccctgccttgtctttaaactatgatttctgaaatttttgaaagcacagagatcttttttaaagtccttatataatgcttagggcattaagatttatttttaaactttactcatcatttctaggctccacaaagttttgtaagaaatgtctatctgttttttaaaatgtcaagttgaattcaaatctgagacccctttttaaaaaaatcattgtgataattatcaattattgaggctcccctctatatgctgcagtctgtcttacagagccacaatgctgggaggacccctctggtcttctgtggagtaactgctttttgttcgagccccttgttcaagcccgcaggatcctttgtgttgctctgcagcttctgtgccttgtaggacacatggaatgttgtgatgaccagagctccagtctccaggacagccatactctttgaggcaccattatttcctttgtcctctgagcaaaggagagcatgcatctcctcttgtcaaggaacttggccaacttccattcccctcccagtagtattttttctcctttatcaggctcaaaggcagcccctcctacctcctctgccccactgtagcttcctcagtgagcataggcttcacaagagacaggaagcctgttggtcttcagtagtttcatcttttcaccctgcaaagccgacaagataaaggaatacacagacaacttgacaaagataggcttagaagaggtaggagagaagaaggagaaagacataattgttattgttttcatttgttgcttgctgtagtcagcatagtcgtattcatggctgacaaatcatattttgaatagtatttctatttggaggaattcccacattatgagtctacctccccagtgttagaaatgagaacttaaatttctggcctcttgtgtagcttggacttcggcccttcagtcagattcacatagagagtctctggccctgacttgaaagaagaaacttgaaagaagaaacgtgacagaacaagttctatgttgagcttctattgctagcacagatagcagcataagagtatggctttgcaggatggtagtgttgtagggttaagtgcctgatatagcactgggacatcattcgtagttgcagtaaagttttggcatttggggtttggtgacagggacagttgcagcaattttcttaagccagttttacagtatagttatggatgttttcctggaagattagcccttaatttgtttttcaagccatttccatgattctgtgagcttcccaacatacctttttctaaaaaaacatttttttaaagtataacttacatacaataaaatccctctgtctaggtatatagtttgctatgttttgacaaatgtctcgtcttgtgttcactaccataaccgtgatgtacactatttctgtaactccaaggacttcccttatgccctatgtagtattctctgccaaactttaaccctcagtcccagctccagcatctggcaactgctgctttgttttctgcctgtatagttttgctttctccgtagatttttttttaatggatacatgcagtatatagccatttgtttctggattatttcacttagcacaatagctttaacatttagtcattttgcatatatcagaagtttgaggttttttttgttcataagtaatatttcattaaatggctgtgtcacaattgttttatccatttgcaagttgatgggcatttgagttgtgtctggtattttggctattacaaataaagatgcagtgaacatttgcatataggtttttctgtagatctgtatctttacttgtcttgcataaatatctagaattggaattgctagattgtatagttaagtgtacatttaattctgtaataaaatatgaaaatgtttccaaatgactgtactacatttcatttccttcagaaatgtatgagagttagttgttctacattctcgtcaacacttagcattgtcgtgttaatataatatattctagttgatgttttgtattatctcaatgtggttttaagttccctgttgactaatgaagtggagcatcgtttcaggatgttattactcatttgtatactttctatgcatagtgaagtgtctgttcaaatcttttgtgcatttaaaaaattggactgtttgttttgttgaattttaagagtttttagatattataaatacaagaacttgtgttttgaaaatattttttcccaacctatggcttgtatttttattttcttaatagtgtcttttgaagacaagaaacttaccttgttttattattgttttattatcaaaacaataattttgatgaggtcttacccatttttaagtggttaatgcattttgta

SEQ ID NO: 1881024 - DNA, 4001 bp, Homo sapiens
gctcactgcaacctctgccgagcccccagttcaagcaattctcatgtctcagcctcccaagtagctgagattacaggtgcccaccaccacatccagctaatttttttttttttttttttgtatttttagtagagatgggatttcaccatgttggccagactggtctcaaactcctgacctcgagggatcagcccgccttgcaggtagtcctttatatcaatgtgagaatgaactaatacacctaaacttcagcatcacccatttccacccttttcctggtgatggcaagagaaggagaagcagagtctaatttgggctacagcaggtaaaatttgagaaatttaatgaagtcaaaatgagaccacccagatcctgaaatataaagattaagaaaagcaaagatttagtaaccggttctgaagtctctggacatcctttggcacttcaaagcttccagtgattctacaagacttatagcagaaacaccaatcttaacatttcaagattattgcaactttttcttaatctacctcaatccattctatatcatgccattaatagacatgtcctaaaatatgagaatgagagcatagggggttgagaagaaactacaaggggatggaaagtgaaacgtttccctagtttagacctcgtgaaattcttgaggaatacctcctggcacactgcctggaatcctgtcccaagcagggaagccaagccctctccaaacagggcgtgagtaggaattttgcatcatcctcctagaaccacgagtaggagggtcttgtgggaccattctggtcctggggaactagagttgttggcttcaattgtaacccagaaagtaggcaacaaggcctacagctttgtgtgcagagttgaggacaaacactgaccaatatcattcaagagaactccttcctcgctaattcagtgctgtgccatcattctcatcatcttttcccttttgttcatgcttctcccagtggagtctttgtcctccaactcctcacagttagagtctctacgtttctttccttttcctcaaagtaatcccaggaaaaggtagataactccttaattctcaatgcaaatttcaaatatttgaccatccatcttctgtcaaagtgaccgacactcagagcactagaaatttggagttttcctggaaatagaatcttatgagaatgtctttgcaaagcaatgactttaacattatggagttttacccacgtgagaagactgctatttgttaaggaattgagattaatgagttgtcacattcttatgatggaaaaggagacagatgattttgcaattcatattcagccttcttctattaaaatataaaatcatgtgtcaaagcatctggatggtctaaaaacagtggttgcgtggagtatggagctcagtcacttttgagaaaaaaatgcacgtttatttttaaaggaaaaatgaaaaagagggatattggaatgtagggatggttatgttgagaaagtttgcccagattgacttgacatcttggaaaatattttagttcatttgaaaggaggaatccagtgcttccagccaggacaatgaaagagagttctaagaaatttaaatgcataaaaagaaaaaaaaaagtaagagggggcaaaagtagagagaaaacaacaaaggatggtaatattccaaaccctagagttgcaattgtctttaccattggctatcttaccacacctccctagtatacattcatacattcatcttcactcacctttggctctccagtgatttccaatggattgcggttagagtcttgacagatgtgtccagtggtcttcaatcaggatcacgatgagagacaagccaagaatcccatttgctcttgctctgtttggaatatctccacattagcccaactttccattactgctactgactttagacttctggatgacaaacgtaagaaagaaagtgattctgttatcaagcaaggaggatcctaaagagctccttgttatcatcaccaagatctgaaattatgtgctgttccatttgtgagctcattaatctctgttttccagtgggagctttgcaattgcaaagagctgctcagcggtgacctccaacagctgtccaactgcagcatccctgggccacaggcacactggcctgattggaatgggaatgcatatttggggcatggggaggcaacaggaggtttgagctaatcaaagcacaaagcttgtttagaatttattgatgtgttgttaactgtgttgcagcttttcctagaatgatggctgtttatttattgacttttcaaaaaagctttcgatattgtggtttgtttatcacagaggtttgagttgttgaaagttgaccttaaaattgatgtaattaactggttttagtttgctgtgtttaattgatgttgaagtgtagacaggaaagtatgtgggggtggtggtaattttctagttagttggacattgtttttggcttttagagccttccggttactcaacaataactttccaaatgttagctctgctctgattattagttttatgatgatgactttcccattatgcctaatcaacagctgtgcggaaactcattttaatcatatttttcctgcctagaaattagcggatgaaggataattactacccaatagcttgagttatgattggctgcttcctaaccctgttgaaaataaaaaatgcaaacttaaagaaaatgtaaaactgttatttctactttgtaaaaaaaagtgtgaactctttgccttttttcctacctgaagaccgggaatgaattgcccacttccctaccttaagaccagcattacaaatcagagttgcttcattaactagattaattagattaaactagattaaagatgctttttacagcatgagacttatgcacccacagggtcatgaaggatgatggcaacatttatttccagaatgtaagtaatgaacttttcctttccataatgtttcacagaagcatgagaactttcaattaggtcagggctggaatggctcataaagaccatctattccagggctgtggactgggggtatatatgcacatgtacatattcggggagagtagtcccagcttccagacattctgaaggggaccatggctccaaagaagttaaaacccacaggccaaacccaggtctttcatgttacaaaaatgaaaatcaaaagggtctcatagagtcagtggtggcagaattgagatttagaagcaaggtcatcacacttctcaccaccttcttgcctctcagaagagctgccacgtcccctaatcctgtatcactgttagcaccggctcctgaagcctcatcgcccctcatgtcaccaccctccgataccgctgtggcaatgaatatgggtcagggtgtgatatgcaaccagtgaagaaatgggcccttctgacttcagtgattggaaggtgatggatggttggttgtttcccctgtatcactgctattgagtaaagtgaggaatctatgagccatgacttataaaagttccagtgtacaacaccattaatgaccaacaaggcaattaagcactaactggcctttagatcaaaatgcccttatgactccaaagaatattaaactaataataaataatagtttggataactgttgaaaatacaatctatataactttatatagtttctttaggtttcagatattattgatatttgatggtaaaataatcttacaacattggaataaacatggaagaacagtggaaacctttacagtttaggatgtctcaaaggcccgaagatctaaaaaaataattatatatatatatatatttatatatatctgcagagctgatgtactctgaggcagagttttccaaacttcatagattaaaacacccggagggcttactaaaacacaaattgctaggctctaccctggagtttctcattcagtagatctggggtgggcctgagaatctgcaattcc

SEQ ID NO: 1881025 - DNA, 4001 bp, Homo sapiens; identical to SEQ ID NO: 315798

SEQ ID NO: 1881026 - DNA, 4001 bp, Homo sapiens; identical to SEQ ID NO: 315801

SEQ ID NO: 1881027 - DNA, 4001 bp, Homo sapiens; identical to SEQ ID NO: 315811

SEQ ID NO: 1881028 - DNA, 4001 bp, Homo sapiens
gggatgcagtctgtaattcggcaaatatgtgatcccaggaagatgtcaagctcaaggctcagctggcttgttgtgagctcgtagctgccatggaaaaagccacgggtatggcaacttctccagcgccaatagacctggatgatgcggacagcgttgagcaaacgacagtaacgccagcggacacgccacatgcggacccaggactgcagcctgactgctgcccatagctgccgtgcacagagctccagtgctgcccgctgcctcttcgcctgcagccttgccagcacctgcctccaccagcactgaatgatcaaagctctgagggtcacgtgcagtagtgtgcattgcaccagcgtgccccaccatcaggactggatcttttttgctgccagtaccttgtcagtggggggcttcatttggaaaaggaggagaggttgcaagaaaagaaagaaaagtcaggacattttcctcacaaacatcagccccagtgggtgagaggaagtggccaggtactctacaatggccctttcctgtaaagttcaggagcactgggcagggcaacacctaactcaggagaccaggttgtaccccctctgccacccacaggccaatggacatggccacctcaccttcacctctgaatctcaatgttcccatctgcaaaatgggggtacacctgccctagctaccttgcccaggtttttgcaaaccttgttggccagtctagagtaaggacactgtgatgtagggccaaagtgttaacacatttcacctaggcctgaccatctcctgagacccatgacccatcccttcagacctctcccacctgccagagaagtgtctcctttgctggccatgccctcttatttctaactccaagtgaaatccacagcctgctctttcctgctgtcacgtcatagtagtcaaagtttccctgctccacacagtttggagtctttttcacctacttcttactttcacttcttttaacacactttttcttgttaaaacttcttttaacttcagcttacctacacataagtggactcatgtgcacactcccccacatcccacccaattcaagacttgggtttccctttatggccatgcattccccaaacagagccctcaccatgccatgctccaatgttgcatgtctgctttccacttttcagggtttctctttcctacatccaagtctccatgcctcagtcacccacctttcccagactcataaggaaatgggagaagaagatagcccaggatgagtcaatctctatttattgcagctttgaatacaacgactatgtccttgttggcctgggatattcttggtttatggtggttgttcctgagtaaggattaatagcaacacctttcactcacaaacgtttcctagtttggacaagaaattccataattaaccaattctatgagccacagagaagacaaccaccactactgggtggcacaggtcagagatgttgcaggtgtggggtctcttccaaccttgagggcctgttctgacttacctttggctttggaggaggaggcattttctcccgctccatttgtttcaacagtgcggtttcatcaacatcttccattatgctttggcgaacatggccatccttctgtaatcagattttaaagaggtgaggtatggataggtagttatttgtagaactcaaggcactctccctcactgtgactgaatcccctgtgtctgtattgcctgcaggatacccagttttcagccaagttcaccacatccttaacctcttggctttcccagagacccagacacagggcttgcatcctgattaactgtgggaattcacctccgcctgcctgcatctttgaattgactggttgtctcttacaaaacattgaatgcccatgacttgcagtagttggttcaatcccttcaagtctgcaatcccctttagtgcccatgattagaggctagaggtctccattatactcaggtctgtacttctctagccaccactgtggcaggaagtgtgaaggaagagagagtgtgatgatgtcataagggcacctatgactctggcatcagaatggcttccaacagctgagtcttttccagcgaatatgtggaactcttgtccattcttttttgcagacatggccacaatttgactacaaaagcaagccactggaaatactggctaattagcacaaagaggtatatagttaatgctttcaatctagttgataaaaacaaaaattgagacaacctaaacctccatcaaatacaaaattcagtcacatggatttcagttcaatgaaacaattgagccatataaggatgagaaagaatgaattagcagcaaaattctcaaacagatgcttcagaaaaggagatttaggaatagctaagaagcacatgaaaagatgcccaatatcaatagtcatgagggaaataaaaatgagaaccaaaatgagatacccctagacaccctaagagaatggctaacatgagaaatctgacagtactaaatcctggcagggattcagaatgggtagatctcttatacactgctgataaaaaggtgtgaaacagcagaatcactttggaaaatggtttggcacttcctaatgaagttcaacatgcacccgccctgtaactcaatagtttcagtcctaaaatttgcaaatgaaaaatgaaaacacattttacaaagacatgtgcatggatattcatagcagctttattcaaataggtcagaacaggaaacaacccaaatgtccaccaacaggtgactagacaaaaattcgtgacatattagtataatggagtaatagtaacaaaaatgaatatattcatacacagaataacatagatgactctcagaaacttgatgctaaatgaaaaaagctagactacctacaggttcttttttttttttttttttttttgagacggagtctcgctcagtcacccaggcaggagcgcaatggcgctatctcagctccctgcaagctccgcctcccgggttcacaccattctcttgcctcagctgcccgagtagctgggactacaggtgcctgccaccacgcccggctaattttttgtattttttagtagagacggggtttcaccacgttagccaggttggcctcgatctcctgacctcgtgatccgcccgcctcggcctcccaaagtgctgggattacaagtgtgagccaccgcgcccggcctacaggttcttccatttatataaaattctaaaacaggtaaaactaacaggtaaaatgaagaacaatagaaaatgaatcagatgaattcctagatataggggttttgcctgcaaacagcacatggaaacaaagaggaatgtgctatatcttggttttggtggtggttaccaaggaatacggaattgtgaaaattcatcaaaccaagcacttaatgaaaccacagaaaagaactttgttctctctgtactgatatggagtacaagtgaaacaaattgagttgatggacaaataattatgagcatatcataaaagtactatgaaaacaagggaattaggacgacatacacaactaaaatttatcaatgattatctttgatgaggctagtagaattggagggacagggcacacaccctcactgtggctgaactccctgtgtctgtcctgtctgcagggcacccagttatcagcctcctgggagagcaggacacacactgagggtacctctgaggccccagctggggtacaaatgtctttgactgctctcctgtcgcagtcagaagatgagtcagcacagccactgcagaagccggcaccatctctgcctgatcccgaccactgaaaagccacctggtgctgcaggtcaatgctcagcagaaggtcctctggccacggcctgaggggtcagcatcagaccctggtccccctcagagtttctgcccaggggtcactagagtacatttgaaatgtttaggatgagtactggggaggctgcagt

SEQ ID NO: 1881029 - DNA, 4001 bp, Homo sapiens
tcctgttggagtcctgatcggaggagtgcgggccggagggtgatgggaccatctagcccctaaccatgggtaatttagtaaagtccagacctgtgcgaattttacgacctgtccccagtcagatgttttgtaagaggcagtcagaaccacactagctttctgaggggagagtaagttccccacagttactcatgacaggacccccctccatgtttgaagtcctagagaaagccaggaagctgtctagaaacagtgagaatggtgtttgacttggcacctagcagtgggagagcacctttcactttcttccctatttccccccatacactctgattccagaaggatggcaagctgttttaaatgatcattaaacataatgatgaaatcacatcgatagaacagagctggaaggaacaaaggggagaagagggaagcgactccacccccaacaccctcacccctaccaggccacacccttacccacaactccgtgagtggctgggtccagagagccttaactagtgacatctctgacccctgtggtccagcagagtgactcaaagatctatgaccctgtaatttattgtacaaagagtggcttcagtgagggaaacaggcacctgtcctcattacctgacatcaatcagggtgttccagaaaaactggggtgaaacgtcagggtatgcagagctggaatgaatggggactggctgtctcttgcccccattttcttgtcaggcggagagatgtgagtctggctgagatacggagtggagactgtggccaggagtggggcagaggagtgtgatcccggaccatatagggctgggggctgcaagtggggactgtggggaatgcaggaccaaggggcaaaatgtgtgttagtgtgtggagtgtgcatgtttgtacagatgcatgcatagctgaagttcaagctgttcacaatgtgtgtgaggtggaggaatctgttaccactttggtgaggaggaaggaacacagcagcttgtgggtttgacttgaagtcagagtaaagagggcaggaggagcaaaggacaccacttcttcagcggatgggagggctctgaagggaagagtcatggatcccaggtagatggcagctcttttacctctaagtcacagtgttcttgctctagactggccagcaaggtccatggaaaatggaatgaggtagctagggcagatgtacacctattttgcagatggggacattgaaactcagaggtcaagtgaggtgagcacatccactaacctgtgggtggcagaggggggacacctacctggtctcctgggttcagctgttgccctgcccagtgctgaactttagaggaaggagccatcattgatagaggatcagggccccttcctagcataccctgagtgtgtctgttttctcttgtaaggcccagaagagaagaccatcatgacagaaaggtctgcagctgttttcatccaggcctggtggcggggcatgctggtgcgacgcacactgctgcatgcagccctcagggcttggatcattcagtgctggtggaggcaggtgctggagaagctgctggcaaagaggcggaggatggtgttggagttctatgtgcagcaggaatgggcagcagtcaggctgcagtcctgggtccgcatgtggtgtgtccgccagcgttactgtcgtttgctcaacgctgtccgcatcatccaggtctattggcgctggcacagctgccattcccgtgtctttattgagggccactatgaactcaaagaaaaccaacttaatattcaacttgaaatctctttgggcttacaggcttgtaaggtgcaacaatgcataccccttccattaaaagaatgaccaggtctgctatatctgtgtccccagctctcttcatcagatgtattttcaggaggtcattgtttgagataatgatgggaaatactaggcatgtcacaagtcagctgtgaggaatcagcaggggttgtcttggtttccatgtggagaaggattctgagagccgtctgagatgagtaggacctgtgattgattagcaatgtctgccataggtagaagagttggggtttcagggtcactaagtcaaccaactctagggagactatgtaaatggaacaccctgtggttgtgcagcatggaagactgtgtcatcctttgctattcattcattcattcattcattcattcattcattcattcattcatttatagagactgggtcttgctctgttgctcaggctggagtatagtggttcaatcacagtttcctgcagcttccaactctttcctgctgccttagtctcctgagtagctgggaccacagatgcccaccaccacacctggttaatttttaaaaaatttcttgtagagatgggggtctaactatgttgcccaggctggtctcaaactcctggcttcaagcagtcctcctatcgtggtctctgacgttgctgggattacaggtgtgagccactgtgcccaaccttttaaaatacattttaacgatttattttaaacatggtgttaaaatatacataacataaaatttactattttaaccattttaggtgtatagttcagtggcattaagtacattcgcattgttgtgcaaccatcaccaccatccatctccagaacttctttcatcttgcaaaactgaaacattgtacccattaaacaattactccctagtcctccctcccctagcccctgacaaccaccattctactttctgtctctatgaatttgactactcgaagtacctcctatgagtgaaatcatacagtacttctcattttgtgactggcttattccacttagcataatgtcttcaagagtcatccatattgtagcatgtgtcacattttccttcctcaggctgaataaaattccattgtatgtatatgctacattttattcattcatctgtggatggacactaggatcctttcaccttttggcgatttgaataacgctgctatgaacatggatgtgcaaatatctcttcgagatcctactttcaattcttttgggtatatacccagaagtggaattgctggatcatatggtaattctatttttaatttttttgttttgtttttgttattttaagagacaagttctcactatgttgctcaggctggagtgcagttgctattcacaggcgcaatcccactactgatcagcacaggaattttgacctgctccattttcagtctgggatggttcactcctgctagggaaacctggtggtgccctgctcctaggaggtcaccatattgatgcgaaacttagtgtggacaacacattagcatagtgcactaccatactgttttccatagcagctgtaacattttacattgctaccagcagtgcacaagtgttccaatttctccacctcctcatcaatacttgttatctctgcttttctcataacagtccttccaatgggtatgaagtgacatctcattatttttgatgtgtatttccctaatgattagcggtgaaaaacatcttttcatgttcttgttggcagtttaatattttctttggaaaaatgtctattcaaattctttgcccatttttgaattgggtttttttggtcctgttagtgtgttgtaggattttaatactttatcagatatatgatttataaagatttttgtcccgttctatggattgcttttcactctgttgtttttgtcttttgatgcaaagaagttttaaatttcttttttctttttaagacagagtcactctctgtcacctggctggagtgtagtggcatgatctcggctcactgcaacctccacctcccgggttcaagcaattcttctgcctcagcctcccaagtacctgtgattacaggcatgccaccctacccggctaatttttgtatttttagtagagatggggtttcaccatgttggtctcgaacttctggcctcaagtgatctgcttgcctcagcttcccaaagtg

SEQ ID NO: 1881030 - DNA, 4001 bp, Homo sapiens
gaaaatttagtacttgggtatacatgcaaagttagggtttgatggtgacaatgagctccattattcaaaagttgtggaacaaattgtttttgagcacccatgtatgtgctgtgtgccagggatggttctgagtgctgtagttacacatcagtccacatggggctgaaattctggtgagggaagggtagggatacagactgccttccctccaggaacttaaaatttgatggcttacctagcaccacctcatacccccacccccaacgcatcttctggttattgtgaagactatgaatctttccttcttgggcagtctttgaaaccaatggtgtatcctcacctagtgaacagtttgcatatttgcatatttgggtttctttccttcacttccagctttcctggaaatgccccttctggtcatttcctctacaagttacacagagaaatttagatttcattgtgtcaaagcaaggatgtatacagaaaaaagggagaaggaggtagcatttgaggttaatggtggattttttcatgttttggtttgtgtttgaacaaaattactagtcagtgttggtttagaatactgtttttcaaacagtaagtttcccatgaaatcaccttagcatttaaaaaaatgaaataaaatagaatgtatgatagtgtattgcagggagtcatagtaaagttggtaatttttaaaactttagttttatatgtatggtgggttgcaacataaagtttacttctcactatgggtcgctgttataaaagattgaaaagcactgatttaaatcctgtttagtgctgcctggagtacgtaagggaatttatgaccatgaggacagaaaccggagaagaacaaaggagccgtgtggaagagaaggcctgccttgaaggaactgttcaaatccaatgatattttactcctctttaaaatgtcttgtatgaatatatttaagtggcattaatacacaccactaggaatggggtatacaatgaaaaggggatagcttctcttcaccaagtaagcctattcctacttcagggcttttgcccttctgtaacctctgcttggaagcaagtgtctggttccttctcatcattccagactcagttcaactctcaccagctcagagaagctgtcccccaccacccttcctaaagtaaagtaacagcactgcaccccaactccagcactcctggtgtattgttttcttagtgcttgtcactatctgacattatcttatttagtcctctatttttggtccctctgaaatgtaggcgggagttcttgcctgttttttaactctataacctattgcctggaacatgcctgggatggagtaggttctcaaatattgaatgaatgaatgaatgaatgtttatgacaacaacacaacccatacctaatccaactcccattttacagttgagaaaattgaagcccagagaggttaagtgatttgcctcagacccagtgagaaacttatgaacagggttttgttctttcttgtgacaccagactagttccccgcccccttttttaatgcttaaaataatttgaaataaaaggaaaggaaggagctcccacctccctgaaacttaaagggtttcctattgacaagtctcttattgcacttccttagaattaaggacataagtaaactgggaaatcatcaaaacccccttacttatgagtcttcttttgtagacagggttttgtattgttttgtttcaatgacatactattgggttctgcagagcagggtagtgacagaatccatgtctcctcactccacatccagtgctctttccttcctcttagttgtggtgatgcacgcagaaggatgactgaggtctcaaaaatgggatgacaatcagctatccctaattcagataagattgagaggcaaatttaaaaatgcacaatgtttaggtgggatttaaaacctagcactgaccttcactttgcgatgggtttagaaaactaatctctctcttggtatctgtggaggatgatgagcttggatgctgtcaggaactatctttggtgtcacagcatggaagggcctggggagtcctgatggaaacactctagtgactggatccttgctccatctcagagctgggggctcaagacagacctccagcacctggtccagccctccactgtgatgtcatcacctgggacagccatatccccagtagttcgcattgtgcctggcacaaataaatgcttgaaacatgcagagagggtgaggggctctacccaaaaaccagaactactcccagaagtgccccttccatgggcagcccctgctcatctggtgtcagtgtgcttctcacagtcctgccctgggcttgtattccgtcttgtgcgtgaacactcttaataaattcaagggccatagatggagtaaagaaaggttctggggttggtgcctttgatgtcagattaggagtcctgcttgcagaagttcatgtttctcttaaattcttatcttcttgcctactctaactctggtgcacaggactggacagttttccctcttatgagagcgggccacaaacagtcggctttctctcttctgcttctccaggaccttagtgcatcactgtagccctcttgctcctgttcaaaaggctctgtggacctgttgccaagtggggtgggagggggggcactgcctcagtgtactcttcctcctaaatggaatataattacacatctttttctctgtgtttgtccctgaggcttcctgtccttcatgggacgtgttcctccatgtctagcctgttccctgtctctggagactcagcctattttgacgcttttctttaaaaatagctttattggccaggcatggtggctcaggcctgtaatcccagcactttgggaggccaaggcaggcggatcacctgaggtcaggagttcgagaccagcctggccaacgtggtgaaaccccatctctactaaaaatacaaaaattagccgggcatggtggcgggcgcctgtaatcccagctactcgggaggctgaggcaggagaatcgcttaaacccaggaggcggaggttgcagtgagccaagatcacaccattgcactccagcctgggtgacaagagtgaagcttcgtctcaaaaattaaataaaataaaataaaaatagctttattaaggtataagtgacatacatcaactgtacatagttaaaatgtacaatttgatgagttttgacatatgtatggcatatgtatgtgttttgacacacctgtgaaaccatcatgaacatcaagataatgaacatatttagcatccccaaaagtatccttgcactcctttgtaataccaccatcttgtccctaggcaaccaactgatctgatttctatgttatagattagtttatgccttctaaaattaacataagtggaatcacagtatgtgtggatttttgtgtggcttctttaactcagaaagtgattattttgagattcatccatgttattgtatatatcagtggttcgtttgaactcttgctgagtagtgttccattttgtggatataccattttcatctgttgttatacatgtgcattgtttctaggttttggctattacaaataacattgttatggacacatgtatacactttatctatttatttttggggtgaagttttgctcttgtcacccaggctggagtgcaatgatgctatcttggctcactgccacctccgcctgctcagttcaagtgattctcctgcctcagcctcctgagtagctgggattacaggcagccaccatcatgcctggctaatttttgtatttttgtagagacggggtgtcaccatgttggtcaagctgatcttgaactcctgacctcaggtaatccgcccaccttcgcctcccaaagtgctgggattacaggtgtgagccactgtgccgggcctgaatatacactttcatttctcttgggtaaataactagaaataagaacggcttga

SEQ ID NO: 1881031 - DNA, 4001 bp, Homo sapiens
agaacaagggaaatgctagctgccatggggccctaatgtggtctgtattagggagtattgggagtccgtcccagtattgtggtctgtattgggaggattaagaagggcatgccctggagcctgggctattacactagggcttgccttcctgactaaaagggcacttcttcaactatcatggatctaccccatgaggtgattcactggggtcccaaaggtgcccttggaaaagcagctactcacacgtgagcacgccccaagggcaactggcacctggtcccgcccacacacacagagccagaatgccagtggaggtcctggatttggagcagaacgcccacctcttgcctaccaactaccttttacagcagctcccctggagtgcctttccacctgcctcggccgcagaagccctgtcccaggactgtctcccacacctggaccctcatggggctcctacaggtacagagaccaccgatgtctgcgggctgaccacaggccaaaggctcttccggaagtgtcctttaatactttggagaggctcgccggttcccccggtgagcacgggacctgactgcatcagctccaggatccaggagatgtggggaagtgagaaagatcctgtttggcctcgcctgctggaagccacagaagagctggacatgcccgcaaggcctgaagtgcgcgcgcaacctagcaggcggaggcaagcagctcttcgcctcaggccgcccactgaaccctgcccaccgacgtcgcgccctgtaggccctcccaggccctcctgattcgtggagagcgcgcgcgagcgctcctgccccacccccgagcccgccctcctgcggcactaccccgcccccccggcttacggggctgcagagtgtggcctgcaagttggaagcgcaggacgcgggcgtccaaaggccccgacgctcccaggctgaggaggcactttgtcgtctctcccacgctctggccgtcgtcctaggcctgacagtggccagctgccttgcacaagcacagtccctgccagacttggtctgccaccagcgccttccgctcttctgccctcgacggactcccccggtccccttgctgcacagcacccgaaaatgcccactgcccaggcccctctcagtcacgacaccctcacgtgcaggaggttggtccttcaggacccgccgcccctcacgcgggctctggggccgaatgctgacgcgagtcccgccagcatccgaacaacctgagcctctggcccggtccgcagactccctctctgcacagatcactcccgatcccgctcactcctgggacccctcaagctggggagcgcagccctgggcctctccgaaccttccccacgctccccggtctccatcacagcagcgccgcgcccgggcccctctgcgggccgtctgggtgtcactaccgctcctgggcagcccccacttctgcacaccgcttccctccgcactcacgtcccaggcccctcggttccctcgcctggacgcccctcgcccagcaccttcccgagacaccctcacagcacctccgccagcacttcccgcgcctcctcgcggtaaatatccctcctcgggcccccttcctcgctcctgcctccatgccatgccccctcggcccccgggctcccacactgcacccttccgaatccttccagtgccccccacgggcccccgcgaatccccccgctcccctcaccccacccatctgcctcagactcctccccacatctctcacaccccaggcctctcacctcactcattctgccaggcccccctgacacccctcacttctaaccccccgagcccctctgccgtccgctacaccccgagcccctcaccccactcaactgccccgggcccccgcgcgcgcggccgccccctcccgccctccactcaccctgtgtcggccccgctcccctctcccccaccaggcgagcaggcgagcgggcagagcccgcggcggaggccggtccccgggccgggacacacccacccgcccgcccttcttctttccctcccttcctttctccttccctccctctctcccgccctcccgccctcccgccctcgctcgctccttccccctcgcccgcccgctcccgcttccagcggcgccgggcctcccgctccgcctccccgtgcgcggctctcccgggcgcggctccggggttcatggtgacgaggcggcggccgctcgagcccagcggcggcggcggcgggagctggggcgcgggcccgggccgcctctcccagagcgcggggccgggcggcgggcgcgcccaggcagcggctgcgagcgcccccccgcgccgcgcccccgcgccccccgcgccgcgcccccgcgcgcttggcttgcggggggccgggcctgcgggcggccgccgcgccgcgcacccatggacggcccggccatcatcacccaggtgaccaaccccaaggaggacgagggccggttgccgggcgcgggcgagaaaggtgaggaggggcgcaggcggccgcgggctgggggcgagcgcacaccccgcgccgctggagttcactgccgggcgccggcatgggcctgggggaggggtgcacagggcccggagggtgcgtgggtgtggggtgcgcccggaggagagcgaggctgccagagtgcgtgtgccgactgagccagtgtgagtgtgcaggggctggcggagagactgggagcgagtgtgtgtgcatctaaccgggaggttgtgagtttgtgtgcgcgcacgcccgcagagaagttgtgagcctgtgtgtgcacctaacacagaggttctaagtgtgtgcacttgtatgtgtgtgtgcacacgcggacagagtgattgtaaggatatgtgtgcacctcacagagaggttgtgagattgtaagggtttgcgcacctaacggagatgttgtgagtgctttttttcctgacaggctgtgagtttgtgttgtgtgtattagaggtttgtatgggcctgactgaggggttgtggaatgtgtgtgcgtgagcatgagcctggagaggttctatgcctgttcactcctgacagagtttgtgagtgtgtatgattgtgtgactacaccacccaactggcggattgaatgtgttgtatacatctactgggagggcgtgtgtgtgtgtaaattgtatacaatgaggctgtgtgcatcagtgcacctaaccacgaacctgtgtgtacagatgtgtgtgccttcctgtgtatcagacaatgaggccatgtgtctgggtgtgtttagttggttgtgcaagtgctggagtctgggggggagaagaggcagttcggagccatccccgctttctcccttctccactctttgctgtctccgggccaccagcatgttgggaggacttacaaggcctggcccttccagggcccttttaggacccagctttaaagggcacttgtggatcccttatagtgccaggagtgtcccctcccagagagctggccaagggctcagccagcactgtgcttctgtgcctgatttgattttggcacattttgaccccagccccccattctgtttcctttttgtcctttctcttggtgtctgtgttcccacttagagacttggcgtgtccccctctcttgcatgcctggaactttctgtgcctctagtgtgttgggacttggacagactgttttgaagggtcaaggaatctggcttcttttgttctggtgactaaagcttgcctcattctcttcctgtcctgcgcctcgtgaacacctggactgaggtcaggtgcagcccaccaggacccctgacccctctccaggccggagctggccacagccggctttggggatgagtcagatttctttctaggggctcccacctttgctgtgccagtgggtgaggtgtgcagcccctgctagaaatctgcgtgggagtgaggggaatattctgcctctcctcaggcagaggccactgggcaagcccgtcagaaaaacggaaggaac

SEQ ID NO: 1881032 - DNA, 4001 bp, Homo sapiens
tcattatccgctatgatgtggaccgggccatctccgggggctccattcaggtgggtggacttcaggcaagagcagagcagcctagaagtctgtccacccccaagggcctgagcttgggtattttagaacaggaaaagaaccacccttacttagcagtgtgcaccagggaccggcacagacagaaaacacgtgatttagttgtgttgtccctgaaactattccctttcccaggcagaaaaggtttgtctctgagaagagctgccctgtggggtttccctctttgcctctgctgctgggaggctcacaactcagttttatgcagatttgcagtagtttctttcacactagtttctggcattattattgttgttatattttggtatgatcatggctcactgcaccgtcaaactcccaggttcaaaagaaactcctgcctcggcctccctagtagctgggactacaggcgtgcaccaccacacctggctaatttttttttttttttttccagtagagacaaggttgcccaggctggtcttgaattcctgggctcaagtgatcctcccacctaagcctcccaaagtgctggaattacaggcgtgattcaccacacccagccatttctgccattgttattatacttcccttttactccatgtttttgaagtcttccctcttttgatggttgtcaggtttatgatgtctgaactttttagtataaaccatctgaaatactaaaacaaatagaaggaaaagttgcagggagagttctggtgggctatgcatgagcagggaaggcttccgcaagaaaggggctggtctgagccctgaaaaagggcaaggttttggggaggttagcagtgggatggaaatgggattggaacagagcacagaaacccagaatttggggtaaaggggctgaatggggatagggccaattgtagctctgatggcctgggtgggtctcactctggccacagatcgagaacggctactttgtacactactttgcccccgagggcctaaccacaatgcccaagaatgtggtctttgtcattgacaagagcggctccatgagtggcaggaaaatccagcaggtaggtcctgtggcccagggcagggccctgaaaactcccaggcccttcacgctatcagctgtggtccggcaggcagacccccttgcttcacctttcggcaccatggggcgggtggctctcaggaaccaaggttggccagagcctagggcagcccctgttcctagagcagataccatgacctcacccctgagacaggagtccaaggatgccagccctagggcacacgagccctcagggagcccttctgaagcacctatgtttcctctccctgaccagacccgggaagccctaatcaagatcctggatgacctcagccccagagaccagttcaacctcatcgtcttcagtacagaagcaactcagtggaggccatcactggtgccagcctcagccgagaacgtgaacaaggccaggagctttgctgcgggcatccaggccctgggaggtaagtgtctctgtggccctgcagggtgggggcttccagggctcctggctggggaccaccttgagagtgcgtgttcctcagggaccaacatcaatgatgcaatgctgatggctgtgcagttgctggacagcagcaaccaggaggagcggctgcccgaagggagtgtctcactcatcatcctgctcaccgatggcgaccccactgtgggtgagggccctgcccgtgactccaggacgtgctgcacaggggaggcggctggggctgcacctgggcttgctgtgggatctgggcagggagagggggtcactgaggcccctcggctctgaggttccagaaatattcttcaagcaaatcactattttctcaccctcatcccaaacccctgggtccaggggagactaaccccaggagcatccagaataacgtgcgggaagctgtaagtggccggtacagcctcttctgcctgggcttcggtttcgacgtcagctatgccttcctggagaagctggcactggacaatggcggcctggcccggcgcatccatgaggactcagactctgccctgcagctccaggtgccagtgtgccccaggtgggctgcacagagaagtgggcagtcataaagcccagcctttatgacacccccaaccctgcaggacttctaccaggaagtggccaacccactgctgacagcagtgaccttcgagtacccaagcaatgccgtggaggaggtcactcagaacaacttccggctcctcttcaagggctcagagatggtggtggctgggaagctccaggaccgggggcctgatgtgctcacagccacagtcagtgggaagctggtgagtgtggccaaagccaccctggaggggaatggcagcctccacctctgcagccagaggggctggactcaaatcccagacctgcccagctccagctttcccctctgctgcctgtggatgacacaggggcatggcagggattcaatgagacaatggagtgattctcatgagaccagcacatacaggctctcggcagccggtctgtgcacctgcaagcacaggtgagggcagggattcctccctagttgtcatcccttcctgtcctggtaccacaaccctctcaggttgcagtcagacagggagggctgctcctatttcacaaatgagcagactgagctccaggcagggcaggcagctttccccgggccccactgcaaccaggccaagagcccagcttgccacgtggcaccctgtccttgcccagccttccctgcctccttccagggaccccctgtcatttccacaaagagaaactgagcacaagctctgcggcagggccttcttcaggccctgggatgcagcagtgaatgaggctgacccctccgtgccctcatgggagagacaacccaaggacatatcaccacacaaaccagctacaggctgggatctaaccctggactcaggagagcagcaccaggagccccagcctggcctggggatcagggagggcttcctggaggaggcccagcagagacaaaaggataagtaggaggtgggaagagtccagatggggcaatggaggaatatgttaggcccctgtggcatgagggcagcgtgtgtgaagagaataggagtgggcgttgggggcccatggccttgtttcaggacaagtccccaagtgtcatgactgttggtacggtctgcgtggccaccctgcctggcttcaaacccagctctgccacctcccagataggagacatggagaagtcacttaacctccatctactgcagtttcctcctatgtaaacatgggaataagtcgcatgcccccctcataaagtcactgtgattgatgtccagtgataagcactccatacatgtcagcaggtgatttagcttggaggccgtgggttcccaaagtacagaacccaaggtgactcaggggagttcacagacagacatggcttgttttagtggttatttacttattttaatgtgtattctgaaaaatatgacctgaacttcagacctaagatttttttttttattttttgagatggagtctcgctctgtctcccaggctggagtgcagtggttggatctcggctcattgcaagctccacctcccaggttcacaccattctcctgcctcagcctcccaagtagctgggactaccagcatccaccaccacacccggctaattttttgtatttttagtagaaagggagtttcaccttgttagccaggatggtctcggtctcctgacctcgtgatctgcccaccttggcctcccaaagtgctgggattacaggcgtgagccaccgcacctggcccagatctaagattttatggacataaagccaagtaaaaattgttagcttacttaaagttcatttaaggaaaaatatcaattaaatagctgtatgtgtggatggggcaaaattcatgcaggtagcctat

SEQ ID NO: 1881033 - DNA, 4001 bp, Homo sapiens
catacactgatttgttgaatttgcttgaaaagtagagccgaagatcctttgaaaatggaagaggttttcatgggggaagagatgagtgggggcgaatgagaaacatctcctttatatggcagatgcggcagtttcttgatgatggggagaagcagcttaacgtattaggcactagaccccagcgtccagtgaccaggggataatgctgacagggaacggagggcaggagtgaatatcgtgaacacaaactttgtctatttcaagagctttgccccttcctggactgacattaaatgcttatctgagcaggcaaatacagtgcacatgtttacattggggaggtagcggagactagtagtttaggaccagggttcaagactcagctatttgtgtgactttggaggaagtaatttaatcgctttgtgccccccctcagttttctcataagtaaaaaatggcttaataggatttaattaggtgctatacagaaagagtttagaccaatgcctgacacatggcattcacccaataagtgtcaataattatgattcgttttggcattattatgtcagtaataactattagctatgattctcctctaatttgttcctaaagtttcatgagactcgattttatattaaggaatcctgctaaaaagtagacatattctaataagaatttccttcagatggcaaaactggggcaaagagatgaaaatgacttgcccaagggctcagaggctgctcctaaatggggagagaggctatttaaggcaatggcggtggatttccccaaagacaagggtttcatacacgtagagtctggaacgggagtccaggctgtaccacttaactcgaggggtcatttgggaagttacctgatttctctgagccctggattgtgcacctgccaaatagatataataaatatacctacagttggtaaaactcaatagcatgacgcatgaaaactgcatgtggtctgggctcaataaaatcagcctccccattgattattatcattattattactattgttataacagatctttaggcggcgtcaggaagtgcctgtctgggatgctataatgcgtttggctcaccactatgccccagcgcctggcacctagtaaacactcaggaaacgtttgaggaatgaatatacgtcatttgaggcaagacagggcagtcggctgactgcctccgggcttagctcttcccctccttgcaaaagccggagccctaagcagcgtgtagcccgggagcccaggcattacttggcagcgggtgaaacccaccttgccccattcggagctcttggagagcgccccgcctggatgcgcatctctgtgtgagcggctctttcctaagcccttatttttctggtttgcggtttatttacttaagcatttacagctcccaggagcagaggggctgctagaggtacggtcaggactgaggtcgcggtttgtatttattttctgcctcccaatctcagagccggcaagtcacaacacggctcctttatttgtgcaccggagaggtctgcctttctttacctcctcacgggcgataaaagacaagcaactcgggctcagaaaagtgctctcacgcgacttgcctgtgtctccgcttgcgtggaccgtcgctcccaggcttggtttctcgtgcaaacccgagcagggcggagcagattaaataaagacacctcgcgcctttaatccttgaccgcaaacactggcgtttttgtgccccggatttctgaaattcttggctcggggaaccaaggcagggggagggtgggcttgtaaaaacttcccaaagcagaaatccgagctcctagcccctccccggccccagtgacacctggattccagggaaggggggcagccggaggagaggcgtccccaagggttgcgggcgcttcccaggggtgactttgaacggctggctccaagccctaccgaccccagccaaggaacaggctcagcagcctgaaagcctcgcaggacgcccctcccctgtccccgcacgcgtctatttagggcccagcccgggcgcccaggggattctgggacttgtagtccctccccgcagcctcaggcgccgccacgacccgctacttggactacattgcccagggagcttcccggcctatataagccacccggagccgctttaaagtgcagtaaccatgtggatgtgctgctgaagcgtttcctcaagctcgctggggtgggaggagaggaggaggaggaggtggtggtggaggaggaggcagggggtggagagagagaaagcgcacgccgagaggaggtgtgggtgttccgcttccatcctaacggaacgagctccctcttcgcggacatgggattacccagcggctgctaacccctctcctcgccctgctcccccaaaccggcgtggctccccgggcaccaaggtagcggctggggccgggcagagggcgcggggagttggcactggctccccgggcgcagaagtttttgccccgctctcggggagatcttgatggatgtgcatgcacttggcatgcatttgggggttcctttactgcgggcagttgttttggggggagctcatttgaagcttaaaaaacaaatatcctctactctagtgcgtggctttgggggctccccattctggtctgatgtggcattcccccaagttggaaactgttgctgcagctgcaggaaatagttctttttttttttttttttttgaagagaggttgtgggggtgtcatatgtgagtctgctcaaggaaataatctttctaaaaatgtatccctctcttgcgctccgtggttgggagaataatgcatgtgtaggggccccccgtggggagggtttttaaaaacggaagaaaaccggagaagcggtgagggatgaagtgtggacgaagctcatgtccaatgaggatgcgggcttcggatacttggccttctcgccgggaaacaagtgctttgggatctgccaaacacttcccttagttccagcctcccgcacgttcgaagtttgtgcgtgcctagtctcaattgtcagttacatcctggaaataagtaagcgtagttacctggaatcttcgcccaagcgatcccaccaacctgcctaccaagtttgggggcgggggggctgtccccagtgaaggaggctaaagaaggtggaaacttgtaatttggagcatttctgttagagctcatcttccgcggtctggtactcagtcttctttctttctaaatatttaggagctgactacagaggagcaggatttgcacccctcgctgggcttgctttggcaacagagtgcctgacccaggtcaggtgagtgtggaagcctgagtgctgtagtcaataatgagtttttgtcctaagcctattttaagttctatctaaaccgccaaggaggtggggagtaagaaagaaaaagaaactccgtggctcagtcttcaaaatttgcctctgcctttggtgagggcttttgggagcagaggtccagtggacagtccgtttcttggaagtagctgagaattgaaggagcctgaaagtttatgagagaggaggggaaaaggccattaaatggagcaataaaacggcggcccattgccggtctgaaaagcatgctgatgatttaaattctgaaggatacagtgcatttcatatgccaaaatgtgtaagcagtattaactgcctctctccttcaagaaatagtcactcttttctaattttgaacgtgtgcttaatcagagtaggttggattgcaagaaatgaaagtggttgctgcaagttgaaagaattagaactttaaaaagggaagtgagttattgaagcttaaggtggtagcatccagcccttgactcaagccacctgagtgtcaaggaatctggcaggtccctgttgttttggggcccgtggtggaatatgagctgagagcagcatttatctgtaaacacaacagttcctattttttccccaaaatggt

SEQ ID NO: 1881034 - DNA, 4001 bp, Homo sapiens; identical to SEQ ID NO: 315837

SEQ ID NO: 1881035 - DNA, 4001 bp, Homo sapiens
cttactagttatttaaactttgggcatgtcatttaacctctggaaaatagagatggcagcaattgagtaaaagaagaagaaaggcaagtcagggtgtaaagaaaaggatgggctggatgctgtggctcacgcctgtaataccaccactttgggaggctgcggtgggcggatcacagggtcagtagttcaagaccaacatggccaacatggtgaaaccttgtctctaataaaaatacaaaaattggccgggcacggtggcacgcgcctgtaatcccagctactcaggaggctaaagcaggagaattgcttgaacctgggaggcggaagttgcagtgagcccagattgtgccactgcactcaggcctgggtgacagagcgagactctgtctctgaaacaaaaaccaaaacaaagcacaaaggaaaaggatgagatgctaccggtatgagaagaatataaactgtggttctcaaccctgactgcaattagagttatctgaggatcttttaaaaatactgatgccaggattccactcccagaaattctgatttcactggggtgtggtgaggaatcaggtcagcaataccatttatatccccccaggatattcaaatgcgcagttgtggttaaaaacctcttgttgaagatagtgaggaaaacaaccaacgttccacaaatgctctctggttagagacactttcttagtaagggtgagaatgcttactgattgaacaagcaattattactcacttaccctgtgccaggctccagtgcaatggctaaaatttaaaatttaaattaaacttaaacttagtccctgatctcaggatagttgcagtctaatgaggaagtcacagccaaaaataaactatgcggttacaatatagtgtggtcaatatggtaatagcagttagttcaaaatggtaggagaagagtaaatggaatgacttcttctcctttcaaagaaaccatagaatcatgaaataatagagatgaaggaagctcaaggttcctaattttgtgcataaggaaacaagaaatcaagagattggaggtttctcagagtcacagagttaatgcaagagaacctaaaaaattctaatgatgtagcaagacatactttaactcaccaggggaagtgctaagaaactatggcttagcagcactggactctgaagctggagttctgggtcctgaaaaataagtagaatttggacataaaggcatggggaaggtttagattttcagtggaaggctcagcccatagctcaaaggagaacatgctcaccagggtaatgacctggagcttaaggatctcaggtggtggccaacagcttagggctccctcctccacatcaactctagttttgggcttacacctatttcttgctggatacgcaatttagagggatgctcccacctccagttccactcctctttgggggttatactatacaactgagacattgaacatgttaattttacctggtgtattgcttaatttcaatgtgacctagggtttgaacctcttatcttaaattctttagtgacgtaacagattaacacctcaaaatagatgaaatgtctctcaattatgactacatttggtcagtcttgactatattaagctgcagttcacatgtgctctgtttaccaaacttaaaatcattaaatctatattgaaatgtgttgaattggctctccattctccccatactctgaccttggtgttctcctagaggtttcaccttctctcacaccctacacatccttttacaccagtaaatactattgcttccccttcaaaatttatccaaaattcaaccactcctcgccatcctcactaccaccaccttggaccaaaccactgtcatgtctcacctggattatgggaacagcctcctaactggtcccccatgtttcagcctcgcctctgcagtctatccttagcacaatagcagagtgttccttttaaaagaaagtcagattgtgtcacttctgtattcaaaattattcactagcctttcctaggtccttcctatgattgacatgacatgatctggcccccatgaacctcaccttctcttctctggccacactggcttcctccttgtccttgctcatgttgagcaagcccctacctcactgctccctgcaactggaacactctccctccagataagcgcctggtgagccccttcactttctttaggtcttttcttgaaagctcctttcttagtgaatcttatctggccaccctatctaaaatttcaatactgattcctagacatttcatatactctatccctgctttataaaattgattctctaacattcatcagtcaacattatgtattttattttacattttatttatttgtaaaattaacatttataaacactatatatttaacttatttttgttattcctttttctttacccatatatctgtttcacgatgggagaaataattaccagttttgttcactgttgcatcccaataaactaagtacaacacctggcacacggtagactcaataaatacttgttgaatgaaaaagtgaggaaatgttaactgtggcataataaatattaatattataattgcatttacatattctcttcttgatagctataataatatattcaaaccatagggagaccaacctgcactatagaattttataaccttaagatgatttagacccaaattaagggacattctacagaatacttgatgagtacttttaaaagtgtctacatcatgaaagacagggaaagactgaggaagtgtcacatattggagtggattaagaaaacatacaattaaatgcaatgttggatgctgcttaagatcctggaagagaaaaaaagacaatgaaattccaaaaagatctattgtattagtactgtacccatgttaattccctggttttgataattgcactatggtgatgtaagatattaaaatgatctcatctaaatgtctaaatatcctttatactccaagcaaggcagtcatttaaatggtaaacatgttttttgaatgagtacgcaagaagtaattaccctgataatcaccaaacgataatgaggtaaccaagatagatgtgtgtggtgggcagttttcttctttttacctttcatccatcatttttctgtgctatggtagatttactccaaggaacctaacacaggttttcaaagcaaatattccttggtccataaaggggtttaatcagaagacacaaaatagttcaaagagttatctttatactctcccttcttttaaaaggttagaaataacaattgtcagtttagtaaaatcatcttgtaaataacatcccactaatttgagattacacagtgaaataattgtatgccattctaggtctcaggaaagcatgttctcattagagggagaaaaatggttaagaaaactgtcacagagggtttttgagaatcatattaactaacaagtcaccttagttcttctggagtggagcacagtggaaaataaaatcatagaaacagagttcttctgtctagaaggctgttgccccgttcctctccagcaggaggggatgtgtcctgtctgtgagaggcaactcctcctcaggagtagaaagtggaccccacctacactgggccacttacccatctgcttgctggaggcatttcagccaaggagaaagactttcccttggcctttttccacaaaggggcatagctgggtgggtacccagggatagggagaaacatttcaatcatctagagactagaagaactaaagattattgataagcattattcatttttctataagtcataataaagatgtttgtttggtaggaaatattcatttttctataagtcataataaagatgtttgtttggtaggaaattatcccaaaattttaaagattaataacagtcaacaaggcaatgtaattcaatttaaccaacacttactgaccatgtactaagaacccacttctattc

SEQ ID NO: 1881036 - DNA, 4001 bp, Homo sapiens
cgtctacaaggaaaattacaaaacactgctgaaagaaaacatagatgacatacaaatggaaacacatcccatgctcatggattcaatattgtgaaaatgaccatactgccaaaagcaatctataaattcattgcaattcccatcaaaacaccaccatcatttctcatagaactagaaaaaaatcctaaaattcatatggaaccaaaaaagagcccacagagccaaagcaagactaagcaaaaggaacaaaactagaggcatcacattacctgacttcaaactatactgtaaggccacagtcaccaaaacagcattatactggtataaaaattggcacatagaccagtggaacagaatagagaacccagaaattaagccagatacagtcaactgatcttgacaaagcaaataaaaacataaagtggagaaaggataccctactcaacaaacggtgctgggataattggctagctacatgtagaagaatgaaactagatatctatctctcacctcatacaaaaatcaactcaagatggatcaaagacttaaatttaagatctgaaaccataaaaattctagaagataacatcaaaaaacccttctagacattggcttagacaagacgtcatgaccaagaacccaaaagcaaatgcaccaaaaacaaagagaaatagatgggacttaattaaactaaaaagctcctgcacagcaaaagaaataatcagcagggttaacagacaaaaatctcagaaatcaccgctaaagaacttattcatgtaaccaagtaccacctgttccccaaaaacctattgaaatcaagaaaaagaaaaaagaaaagctcatctgcaaagcttgtgaacaactttccatgttttggcggggatccttttattccagtttcaggaaacaccccacagccaagcccagcactcctcctctctcttatgtaagcgataagcaccattaatagtcctgtcagtcttgattaattctgtgtacaatgatcaagagagtattttgactttggggcaaatcaaaccatggtggactatgacacagacataagggataaacatttactaaaagtaaaaaacacacagcctggagcttgtaaggattccatagaaataaaagcatatgaagaatgaattccaactatagattttttacaaagctacatgatgattaagtgcttttgggttattctattctataatatttaatggtttctaaatctaactacttcttcgtcacaatgttgtttttaaaaagttatccattaggtctttgtgtgaacaaatgtaggccattactccactgatcagtaactaatgcaaggaaaaagttcttttttatacttttacaacgtgaactccttttgatagtactgaaacgactggccatttgcaagaatgaaactaatttaaaaagcaaagacaaaggacattgttctcaaaggtatttaataggccctgaaagtttgacttagaaaaaaaagtgtttgaaatcacaatcaatgttgcaataaagtgggacgattccaagcagctaaaaaagactttctctccgatttcagtgagaattgtcttttctcatgatagtctgaatctagtgtgtgtgtactatttttatatgcaaattagtatacgattctcttgtttgattcaacaataggtgatgtaggtaagtcgacattattatatttcaagaaagaaggcaaatgagacccagagaagttaggaaatttgttcctggtcatgcagttagtaaacagggatgcttaaacctaaaccccagtcactcaccaaatgattctcctcttcatgtaacaggctcaaggcccccactagcaggcacagtggtaagttctcaccctaaactccggaaacgcccttttagggcaccatcccggttcagagctgtttaggcaaactgtgcttaaggagggacctcctcgtacacagctgttctgcttagacatggattttcctcctccagccctttctgccatgtcatcaatacaaggtcagaaagagacactgagtcagcaatgaatatgggaattatctgcacatttagcagtggaatcctagaggcacgggaagagagagcaggtaagtggtaggatccagttttaaacttaccttcttgttgcatacattgaaagtaaacatcagaaacgtcttccaccttaaaattttgcacaataatttattgtaccaaattggttcaattccattcctctgttcattcattccattccacacatctttattgagcacctccccttggcagtaactgtgtcggtgggaagtcagatgctgtccttgccctcagatagtgcacagtcttcagatgaaggggagaggagaaaagaagcaagtgctggttaggaggtgggatgaaagcttagattttgtgattcacaaaaagccatacacttcttgtctgcagccctaccgtgtgctttgaacataggagcagcagttgatggttttgcctccatttgactgttacagatcccagcccctgtgttgtttcctcaagcatttctggaagtccctgaaatgcatctcatgtgtggtcgaaagcaagcctggtcagccttcacacagcgtctgctgtttcttccttctcactagcctgcctcttcggggttctatcatgttccactagagaccgctgcaggtgtgctagagcttggaggtgggaagtggggagggcacctctccttctcatgttgccttccactgaaaggctccaaaggtttacagagtcttaagtgaaatagcttgttcaggttgagttccaggcttttcttacccttgacctaggttggagtcaatgggggatagatcagagaaaaacctcagtgacagccactatgtgattctcaggattgctctcctcttctgaccaccctatttctccttccacagacagttttctgtctatggccacatggccctttgtaggctggttatttcccactgtcaagattctgggcaagcccgcctctgagttccatggcatacctgaaccccagcggagactagggtttacacagagagaaggtgttgttctagtgtggagtttggggagagggcactagacataccccagaggcatcattcccctcttccttgtgtgtaaaggggagcctctgaggggtctcagccctgaacacagtctttttgagggagaggtttgaaactctgttttaaaaagaacaagactatttttctttctatggtgtattagttcattctcacactactataaagaaatacctgagactgagtaatttgtaaagaaaagaggtttaattggctcgtggttctgcaggctgtacaggaagcatggctggggaggccttgggaaacttataattatggtggaaggcacagcttacatggccagagcaggaggaagagagtggggagaggtgctacacacctcacagatctgtgagaattcacttatagtcaagagaccagcaaaggagaatctgtccccttgatccaatatcctcccaccaggcccctcctccaaccttggggattattacaattcgacatgagatttgggcagggacacaaatttaaaccatattatgtggttacagataaaagatggaacacaattatgttggatgcattagtggaaaggacaacacttattcatcctgaagtgtaatcaatggaggagtaagatgatatagagtcatttcctaagctggtaagaagatgggctcagaaaagcaggagggactagaggtcttaaatgaggggtatagagaggggtacagagaagagagacaatggattaacacagaaatgtatcgaagaccttccagttttgactgtgctaattccttgcttcctctccagttgggtgttggtaaatagcagctgtgcctagaggtacttgtttgggtagcaagatattgccaaccctgcaattataatttaaaaagtttttttttttaagagaagaccaca

SEQ ID NO: 1881037 - DNA, 4001 bp, Homo sapiens
tctgcaaaatgcacaaggaacttatattgttgattgccttctaggagggtacttagtggctggaagttgggggatgcaaagctacttgtcacatatatcctttagtagcattcagttttgaactattgactatattacctattcaaagagttttaattcctttatttttaagaaatgtaattctccaaaagaattggattctaattctcacctattttctcttccatttttcatatactcttacatatgaaaagttcttatctatgtccacctaggtagattgctccaagaaaagtcacttgaaccatacagttttcaaaatgtggactccttcaagctatacatgccttgaaaagttcaatgatcaacataattttaaaagactttgaaattgttccaaataatctatctttgccaaattcacaggctacaagcagaataaaggagaatttcccagctacctatctcatgtatgaaaatattgttcagatccactttgaaatgggcaaaacatcaaagaaacaggtgagtactcaattgcagcccaacaggaagccccattatgctatgttacatatttcatgtttcctgggatttgggggtgtcatttgaagccatgtaacttgatggtgatgcattgcctaggaccaatttttgcagcgtgaaaaggcagatgttgttataaaaaatatatacacaatttccatagcagatatcatctccaattgggatccttaccataacagataaaactggcgggaactagctctcaatcaataaaacgacaggaaataaaaagccaacatacaaatgatacagagggagactgagaaacagcccatcaccagcatgatactgaaggttaagactgagtttatctactgactgtttgcttcctttggcattaattttactgtaagcagaaatgccatgtctgtgaattataggatggaaaatacggcactgaagaaactagcttctgatgcttccagaagaaaataaaaataacagctcctttattagtaagcacagtaaagtttaaaaaaaaaagaaaagaaaaagctaggcattgctggcacatacctgtagtctcagctactcaggaggctaaggtggggaggtcgctcaagcccaggaattcaaagctgcaatgcattatgattacagctgttaatagccactgcacttcagcctgggcaatgtagtaagatcccatctctaaaaaataaaacaaaataagatctagagagctcagttctttcaaagctctttgagaacaaagtctgtggaaaaccgtgataactgcagccaactatcaagccactgcacaatcatccgggttttctagcactatggtgaccaaatataaactctttgctaaaaatataaaatcaatatgttttctgtttcatagcctattagaaaataggtaagaccctcgtaagcaaggcacaaaaccaagaagccatagaggaaaatattaacagattcaagtacatcaaaatattgacagtcaaaaaatccataaaacaaaataaagttcggaaggggagccaagatggccgaataggaacagctccggtctacagctcccagcgtgagtgaggcagaatacaggtgatttctgcatttccatctgaggcactgggttcatctcactaaggagtgccagacactgggcacaggtcagtgggtgcgcacaccgtgcacgagccaaagcagggcgaggcattgcctcacctgggaagcgcaaggggtcagggagttccctttccgagtcaaagaaaggggtgacggacgcacctggaaaatcgggtcactcccacccgaatactgcgcttttccgacgggcttaagaaacggcgcaccacgagattatatccctcacctggctcggagggtcctacgcccacggagtctcgctgattgctagcacagcagtctgagatcaaactgcaaggcggcagcgaggcggggggaggggcgcccgccattgcccaggcttgattaggtaaacaaagcagccaggaagctccaactgggcggagcccaccacagctcaaggaggcctgcctgcctctgtaggctccacctctgggggcagggcacagacaaacaaaaagacagcagtaacctctgcagacttaaatgtccctgtctgacagctttgaagagagcagtggttctcccagcacgcagctggagatctgagaacgggcagactgcctcctcaagtgggtccctgacccctgacccctgagcagcctaactgggaagcaccccccagcaggggcacactgacacctcacacagcagggtattccaacagacctgcagctgagggtcctgtctgttagaaggaaaactaacaaacagaaaggacatccacaccaaaaacccatctgtacatcaccatcatcaaagaccaaaagtagataaaaccacaaagatggggaaaaaacagaacagaaaaactggaaactctaaaaagcagagcacctctcctcctccaaaggaacgcagttcctcaccagcaacagaacaaagctggatggagaatgactttgacaagctgagagaagaaggcttcagacgatcaaattactctgagctacgggaggacattcaaaccaaaggcaaagaagttgaaaactttgaaaaaatttagaagaatgtataactagaataaccaatacagagaagtgcttaaaggagctgatggagctgaaaaccaaggctcgagaactacgtgaagaatgcagaagcctcaggagccgatgcgatcaactggaagaaagcgtatcagcgatggaagatgaaatgaatgaaatgaagtgagaagggaagtttagagaaaaaagaataaaaagaaatgagcaaagcctccaagaaatatgggactatgtgaaaagaccaaatctgcgtctgattggtgtacctgaaagtgatggggagaatggaaccaagttggaaaacactctgcaggatattatccaggagaacttccccaatctagcaaggcaggccaacattcagattcaggaaatacagagaacaccacaaagatactcctcgagaagagcaactccaagacacataattgtcagattcaccaaagttgaaatgaaggaaaaaatgttaagggcagccagacagaaaggtcgggttaccctcaaagggaagcccatcagactaacagtggatctctcggcagaaactctacaagccagaagagagtgggggccaatattcaacattcttaaagacaagaattttcaacccagaatttcatatccagccaaactaagcttcataagtgaaggagaaataaaatactttacagacaagcaaatgctgagagattttgtcaccaccaggcctgccctaaaagagctcctgaaggaagcgctaaacatggaaaggaacaaccaataccagccgctgcaaaatcatgccaaaatgtaaagaccatcaagactaggaagaaactgcatcaactaatgagcaaaataaccagctaacatcataatgacaggatcaaagtcacacataacaatattaactttaaatgtaaatggactaaatgctccaattaaaagacacagactggcaaattggataaagagtcaagacccatcagtgtgctgtattcaggaaacccatctcacgtgcagagacacacataggctcaaaataaaaggatggaggaagatctaccaaaaaaatggaaaacaaaaaaaggcaggggttgcaatcctagtctctgataaaacagactttaaaccaacaaagatcaaaagagacaaagaaggccattacataatggtaaagggatcaatgcaacaagaagagctaactatcctaaatatatatgcacccaatacaggagcacccagattcataaagcaagtcctgagtgacctacaaagagacttagactcccacgcattaataatgggagactttaataccccactgtcaacattagacagatcaacgag

SEQ ID NO: 1881038 - DNA, 4001 bp, Homo sapiens; identical to SEQ ID NO: 315850

SEQ ID NO: 1881039 - DNA, 4001 bp, Homo sapiens; identical to SEQ ID NO: 315860

SEQ ID NO: 1881040 - DNA, 4001 bp, Homo sapiens
tcctttcctgcctgtccaaggtcaagtgactcccaattgcctatgtggcatctaaggcacagggcctcaatctattctttcaaagcccaaaagataacacttactgggcacttactcaatgaaaggcactgtgcaagcatgttcacaacattctctgcacagtggctaataccccatttacaggtgaggcacgggaagcataagaagcaagcatcccaatgtcacagggctagaaagtgcctggtacacaatgccaggtagagctacctcttaaactctgcactatcatggctgaagaatgctgacgtttactgaaagtttaagcctttaacaaatagctcatttaatcctcacaataatgagaagacctgtcggcagcaatattctcattttataatgagaaaaaccacagggaaattagtaataatcacggtgtgtaaaaaaatggccttgggagattcgaacctagggagtcagatggaccctggacctccatgctaaccctaaaggtaccaggaaaaaaaaaaacaaaagccaaaataatccctaagtgaaaaacaatgattataaaacactaatagacactgtagcctacatacatataaaggctattttaaaaagttaaccactgaaggatgtttattctttcgtatcatatttcagtttttttttgttgttgttgttttatttttttgagacggagtctcgctatatcgcccaggctggagtgcaatggtgcgatctgggctcactacaacctccgcctcctgggttcaagcgattctcctgcctcagcctcccgagtagctgggattacaggcgcaccaccacgcccagctaatttattttttattttcattcatttatttatttttttgagatggagtcttgctctgtcgccaggctggagtgcagtggcacaatctgggcttactgcaacctccgcctcctgggttcaagcgattctcctgcttcagcctcccgcgtacctggaattacagccgtgcgccaccacgcccggctaaattttgtatttttagtagagatggggtttcgccatgttggccagtgtggtctggaactcttgacctcagttactccgcccgcctcggcctcctaaagtgctgggattacaggcgtgaaccaccgcgcccggcccactttcagtttttaaccactgtttctcaattggaagacacatcctttcctttccgttaccaattgctggtaaaatccgattcaaaattctagtggaaaaacaacagcaacaacaacacaaaaaacgctaaccctatgaacccccaatgtcaaaatgatctatcgccaaaaactcttcagcgtctagaaagtttagctattggatttacgcgttcctatctctccttccaaaaataacaactcgtagctctttcaagttattctacttagtctcatcttatcatttctgtaggaaagtgattaataccctttttttcatgacattgcctctaaggccccaagaaccacacaggagaggggagctgccgccttggagacttcgggtgggggcagagcgccgcgccgaggtggaggtaggagccccgagggcacagcgggaaggaaggcggaggaggctgccgggagctcggcctccgagcaatcccccgcctcgctgggcttccatgcttgctaaagggtcgagatgaacgggcaagggagagagagggcgaggaaaaataaaaaagagaggggcgagtgggacgaggggcccgggagcagccgcggccgcgttacctcagagcccagaggcctgggggaggggccctcggcgctgccgcggactccggggctcccggcgggcaggtcctgcagggccgcggagcgagaaggctgatgtctcgggtgtctcggggagttctcccgacgtcgcctgctgtttgtcagtcgccagctgtgacacggtagcgggccgggtcacgctgcccccggccgccaggcgggttgcgggaggggtcgcggtgccgcctctccaggtccggtctggcccacatcactggggccgggggtttattgttccggagagccacaggcacggtcggcctggacccgccgggcagtgttccgctctgcccgtcccggcctggggtcaagccaacagctgcaaggcacgccgactggcggcagatcggtggcccgtgtgtgtctctttaaggggccgggcctgcgaagctgaggggcgggtggggtgtgcgtcgctcccggtgtgagggtgagagggagagagcggctggcgggcgtccgagggagggagggagcgacgagcgaggtagcgacgcgggccgcccctgccgccgccgccgccgccgccgccgccgccgcggtcggacctgcggcctcctcccctcccctcccccgcgtcgccctgctgcggggagggggctcgcgtcgccgtctccagccgctcccgatgaagcagctgcagccgcagccgcctccgaagatgggggatttctacgacccggagcacccgacccctgagtaagtatcagctccgcggccccccgctgctgtcggccgccttatccccagccgagggcggcgcgtcctgacgggtggcggcgcgggccggcgcgaggagtaacaggcccacggtggcctcgcgcggtcggtgtcgggagcaggcccgcgccgccacttcgagccgcttggccggggccgcagcaggcccgcggttgggcccggcgttggcgccgctgctcgtgtcgcggcggcggttgggccgggccggtgggggaggggcggccacggtccctacggttaccgccgtgtccgcaccgacccggccatcccggggctcggcggtcctctcgggctcctcgtggctcgtccgggccccgctgctagccaaagggcagagtcggaggagctgccggtgccgggcccggcaagagggcgccggtgagggtaggccgcgaatccccgggctcgggtggaagctcgacccgtcgcccgacctccccgcgacggcggcgcctcggaccggaagggcctagcgcgggttgcctggcccccgggccgtggaggggcccgcgctgcactcctgagtttgattttttcctcctgggaactcgatcctggccttgcagtgcttccggattcacattgtgcacctttggcacttgggttttgtaatggcgaggtttgtgtggtcccgttgttgaggtgacaccgggtttgtttttccgcttgaaaatgaaagcctcctgagggacatacattttcttgcaggttgtgagattttcacactttcggacacaattttcttggtaacaggaatctcttaccctaaacggatgactttctatttcttgtgaagacttggttaaaaaccaagaatcgtttgaggattctctaaagaagacaatgttgtggaaaaccgacacacagttttgcccaatagtaatttttcagtctaggacacctttacatttctcttgaggtctgaatctgctgctgtatctgctatctcagaaagcctggagtcacttctttccctgaaccctcacgagaccattgttttgaaaagccgttcttaaacaccgtttgctggtgttagacctaggaatatactattgatttaaaacttatcggttgataggggtttcacatgaaactgtcaaacttttatgaccaggatgattccaagagctttgctgttttgacacattttaccttaggtttgctctggctcgtttttgaatcccttgccacatcttctcacattggtccagaaatgtctggatcttaattgatagttttgattgcaacacaaacggattctgttgaggtgttggtcatttctgcacaacaagataaatcattattttgcttttctaaaaacccaactcttacttgcaatagtaagttaacatggctttttcctttcatgggttcttggccattggttaacattaccttaattagattggtctttttgttttgctactggcagggtcagttag

SEQ ID NO: 1881041 - DNA, 4001 bp, Homo sapiens
cactgcagcctccctgggctcaagcaattcttccacctcagccccccaagtagctgggaccacaggatgtaccaccatgcccggctaatttttgtatttttttagtagagatagggtttcaccatgttggccaggctggtctggaactcctgacctcaggtgatccacccacctccgcctcccaaattgctgggattacagctgtgagccacccaccacgcctggcctttctttgattttaaataacattttgatatttcacaatgatgtgccttggaggggtgtgtgtgtgcgtgcgtgtgtgtgtgtgtatgtgtgttttactccaaccattatgctatgcatttgatgaacccttttaatctggagagtcacatcctttaatcctgaacatttcctcatattactgcctggtaattacatggttactgttttccttgtttactatttctggatcacttattcagtagatgtggacttctagaacagtctctagctttctcatcttctctctcctgttgtccatcctcttatctttctgttttactttctggaagatttttctcaattttatcttccaacctgttgagaatctcagtttttaacttccaagacttttttcttgttttatgtatgaagcttcctttttataacatcctgttcttgttttgtataggtcatattttcacttaatctctttgaggtttatattttttaaaaaaccactcttctgtttttgtttgttttttactgtttgttttcactgtatttttctctttgtttttgtctcttttattctattttatgtatgtatttatttatttcctagagacaaggtctccctatgttgcccagatagtttcaaactcctgggctcaagggatcctcctgacccggcctcccaaagtgctaggattacaagcatgagccaccacacctggcctctgtcttttattttagaggctatacttaaatatctggtagtctttggatatctgttcctatttaagagtcaagcactaacatggtgaaaccccatctctactaaaaatacaaaaaattagctgggcgtggtggcacatgcctgtagtcccagctactcgggaggctgaagcaggagaattgcttgaatctgggaggcggaggttgcagtgagccaagatcatgccactgcactccagccggggcaacagagcaagactcaggtgtcccgacctgacgagtgccattcaagttggatttagccatgaaataagttacaaaaaactttacatttatcagcactttgggaattttgaaactacagataagggattatagatatataatgctgaaatatttactatcatattggttctgatccacaatattggaaaatattaaaagtggaaaatatagggcctgaccctggtgttacaatcattggcttcacttgagttctcaagtgtacccactgtggcagcagcaatcctcaacacatttgctgttagccagatttttaatacagacctacatggccttaactcattcttgtttttcttggcacttattctcttttttaaaatttgtttaaattttactttaagttctgggatacatgtgcagaatgcgcgggtttgttacataggtatacacgtgccatggtggtttgctgcacctatcaacccatcatctaggttttaggccctgaatgcattaagtatttttcctaatgctctccctccccttgtcccccacccgccgacaggccacgggttgtgttgttcccctacctgtgtccatgtgttctcattgttcaactcccacttatgagtgagaacatgcggtgtttggttttctgttgctgtgttagtttgctgagaatgatggtttccagcttcatccatgtccctgcaaaggacatgaactcattcctttttatggctgcacagtattccatggtgtatatgttcttggcacttattctatcacctgggctttctgactcttttctgacatcttaccccattatggagacaaagctcaggattacaacatctacatgtggcttaagagtagtctcttgccccacttttctgccatgcagtaattggttaatatgtaataatgattaacaagtgcatagattgtgctcacaataaccttcccattcctggccttatgcctgatttttgtagctggcgggtaaagtcctctcaacatagcctcaaggaaccagacctagagactgcggtacaagacaggagtgagacaggaatccagacaaggattccaggcagcagcatcaacaaaggagattgctaatgactcagcctcagcctggaagcttttctatgcatgaaggaagggccagtcatgagacagggcagagaaaagcctgataacccctcccctcatcactaggactcccctccctctgccaaccctgggaatcacagcagggctgccctcacaggtcactgtcacttacagagtgtgccatattttgcagtgagctgggcttcccaaatggtgagaaccagtttctggttctagccacagtgaggtcccatatattttcagagcgcactgtcttttcaccttgcacaccctgaccctgcttccttgtctcttttttaaccctttgatccagactgatgtcctaaggcatgctgggtccttgctgctatgggggtctgtcagctcagcccccagacataaactggaatgaatgttccaacagtatcctgcctgtgcatgtgtgtatgagcacaaggaggctctgatttttacatttcctcctcattttcagcttatgtagcctacactagcaaaagagtcttggggagctgaggggtcataggaaatgacctgttagccacatttctgttctctgtgaagaggcctgttttcagtttagacatcatggggaaaccactcttcccatcaaagtgagctcccccaaggatgaaatggacaccatgctatctacttgatattatgaagactgaatgaaataaaaagaatccagcaaagtgcctgaaaaaatgtaggccgtccatattccaaactgggaaaaaatgcttaatgcaaagattaccacgtcacgtataaaaacaaaatactggaagcaacctaaatgtccacagtgagagaatgattttcatattatgcctctgttgaaattggtagcaatataataaatagtcattatgaaaagcatggagcaccgtaggaaaaatattataatgaaaacagggggcaaagcaagatgcaaaattgcatgtaaactatggaaagatatgcatgtgagaaaaggtagacaaataacaccaaaatgaaaactgttaacattatcagaaagccccataatcccttacccaaaaatctgggagccagatgtgctttgccattcagaattctttggatattagcatatcttaaatgttatatagcacctccagcgctctttagtctaatgcattagtacttcagcagtgagtatacaaatagttgtcctaagtggaataaataaagactctgaggtcgggtgcagtggcttactcctgtaatcccagcactttgggaggctgaagctggtggatcacctgaggtcaagagttcaagaccagcctggccaacatggtgaaacaccgtctctactaaaaaatataaaaattagccaggcacggtggcgtgtgcctgtagtcccagctactcaggaggctgaggccggagaatcgattgaacccggacggcggaggttgcagagagctgcgatcatgccactgcattccaacctggacgacagagtgagagattccgtcaaaaaaaaaaaaaaaaaagacttatggcactggggtttcagtccggactcgccacttgttggctgtgtaaatcttggaggaattgcttggctcctctgaggctcaacgccgatgtctacaatagagcgaggctaacaatttacgtctaccgatcccagcaagttgtgaaacgcgaatagtaaaatggattcattt

SEQ ID NO: 1881042 - DNA, 4001 bp, Homo sapiens; identical to SEQ ID NO: 315870

SEQ ID NO: 1881043 - DNA, 4001 bp, Homo sapiens
gctttttcatcctcagaggcttagggcttttgttctgtaggggaaataggagagaaggacctggatggggattcatgtcttttctagcgggaaggttttcataagattcttcttgccttaccttcaattgtatgtgtgtatgtgtgtgtgcacacatttgatgatgtccatagagaagaatatacaagtgggtggaaattctgcttgtgtctgtggttcacaggagttctgtagtctctatattctcaggctagccaacacttggacctcagcaactcattaaacattttagctgatttctccttaacagcttacatggcatccaatggcatctgtcctatgtaaacaagtgcttacaaccatctcttcttgaaagtgcctgtcttacatcagattttagattaagtcgtttgcccccagatcttagctttctgatgtgttcaagagaaaattttagattatctggctgttttttgttgttgtaagggtgaggccatgcacttttcagttttctacatcgtgagaaggtgaatttcttgatttttcaaaaagaatcacacttttaaaaaccctgaaaaataaagaaaagagactgagctaccagaacggcagtgactttgggtggctctcacttatgccaggcacagggtgaattcagggctctgggctatgaggggtcgactgcaaacccctgcagcagatgtgagctgcatgtgtgggcccctgtgtcagcctgtgctcatttgtcttcctacagtgatactgcatgtgatacacaacacccaaggacaatggaggtgggggcaaatgtcccttattcttcacacccttcgctgttggcatcaaagcagttactctaccttctccacaggctttggcacagcatgtcaggaagttctctggggtggccacacctatttcctctaagtgctttcaacaggtttttcatcatgataggtatcctttcttacctctgattgatgtagtcatgctgttttcctgggacagtgttaagctctgctggacaggggatgaatatttcttgggtaaactgactgctctcactttgcccatggtccattgctaatcctctctgctagtggtaatgtatggaagtgagaggcgtcagcaacattgaaagacatcacattctaggagtgcaatcattacagcaattcaagagaagtcctggttgtataatgtgtgattcgttcattatgctataacaatccaaatgctaaatttaacaagatcaataaaacgtataaccattcacattttcttgcatattctgggtaagacttgtagttgcagttattgtagcacagtaataaaggcactggaagccagtattcaaggttggtacgatgatgcagcgtcatgagcaaggtgcctcaactcagaactgggctctggaggaacgccaagagcctatctcgccagcgtgcccttttcctcacgggaattaggagggaagcaccaagatgtggggtcctccacgagtcctagagagaaatccagagagtgtatgggttcaccagtcagtgtgatgacgcacttccggggccgccttcgtttttgtcgcgcgaggttttggtttgtgaggatcggcgagtggcgcccaccatctctgcttgctgaaaagctgcagaggccgccaggagcccacggtgagcgggtctgaggaggacgggaaacagccccgagggaggcgggtgtggctactgctggtactggggtcctcatgccgatccccgagcttggctctgtagcgtcgagatgcggcgctggcagaggcctggaacgctggccgcaggctcccacccccctcgtttccctgtacccagggcagcctgtggcccactcagagtcggatactgacacacattcgcatgttaacttcgaagcccacaaaaagttttaactgtccacactccagaatcttctatcaacagaacatgcccctcggtcgctccagcccccttgtctttgacccggatgcggaaaccccaaccctacccctcagcttgtcagtttccacgttttcagttggtccctgaaaatcagttggtgatcagttattttcgcctgccatagtgtacaccagtcttgaaacttgttactgtcgtagagcaaccaaaaatttgagaataccgaattgtattccctacccgtccccaggatgtcccattttggaaaatatggagccctgcgatctggattggctcataagaatgttaaatctaaaaagactgatcgtatccgtcatgcacctaatgtgtgtccagtgtttaacatagtttcctatgtacaggattggagatgtcgaaagatttcttgacctcttaacattgttcattatattcttttctttagattctctgaacttttactccactgtcataatttaattgtcaaggttcataggataacattcgatgtccctgccattagtcaactatgttgggagtgtgatttgttctccaatgtggcttgttatttatgtttcatctccacttagctttccccataggaagacacttccatagggagtgttttgtgttttgtagggtgacctctgttgtagttctatttccagatgatttccctttcgcagattgtcagctgtgcagatcagacctttttgcttaagtccttttgtttgatacgctaatcctattaagtatccactgtaagggacatttactgccgatacaatgacagtatcatgattttagagaattagattccacaattacaagggttaactatttacttagtatgaatcactgcttttgttaccctttcttggacagaaaccatccatgaatttagcagcattacttgtgtaggtttacattgtgttttcttttaaagtacttctctttacactcataaatatttctccttactggactccctgttaacttccaagatgccttttctggcgtctcctgacagctgtttctctgacaccttcagcttcctctaccttcctgaatggctttctggattcactaagaagagtcattggagggaggggcagtgcactggctttatagtgttttgtctgatgctgttgcagtaccctaagacttacagcaaactgcagatatggagttggaacggaagttgtttttaaggtctatgagtatatgcacttttatgtgtttgtttatatgctttttgaatatctctgatccaactgttggcagctctttgtatttcaggtgttgtctttaatgcataaatattgatgattcactcttgaaaggcaaaagacttacttcctaatgatgaactaattaaatgacccagaatgagagttggaactagtttagaaatgaaattgttttgtttccttatactataacatttggaacttgaagtatttgggacatgttatgaagttgatggattcttttaatatggtaatgttttctttctcatcacccactccaaacacctttataaaactgaatgagtatcttgtatttaggggaaaaatagtagtagggaggcatcaaaatatttctgataactattttcaaagtctgttcaactttcattacttcagtcatagaaactcttgttctaatattaagtagcataggaggaaaaacatgctgaggtcttacagtgtttaatggatttcttttatataactcattcctatctgtactacataactcattcttatctgtactgtatggatttcagggatcttaactgtttagaattccaactttcttttctgcctataacactctgtccactgtctaccttagtttccttttctgtttcctgtcctgtgatgtattctatggattagctgaaattatagttttctcagtccactttttcatcactcattccgtggatgattctacctcctttttgcatttctctgtatgcctgctatctcgcctttgtgagattgataataagcaataactaatgaacggttattgatatagccttcaaaacagatgggtcagagg

SEQ ID NO: 1881044 - DNA, 4001 bp, Homo sapiens
aaaaaaaaaagttaagcaaagagtttgtaacattcgaggcaaagagaggatggagttattccttggactaagtcttcctctaaacaagtttgctggaaaaaaaacaaaacaaaacaaaacaaaacaaaaaaacacctttggccgggtgtggtggctcacacgagtaatcccagcactttgggagaccaaggcgggcagatcatttgaggtcaggagttggagaccagcgtggctgacatggtaaaacttcgcctctactaaaaatacaaaaattagccaggtgtggtggtgtgtgcctgtaattccagctacacaggaggctaaggcatgagaatcgcttgaactcgggaggtggaggttgcagcgagccgaggttgcaccactgcactccagcctgggtgacagagcaagacaagactctgtctcaaaaacaaaaacaaagacaaaagcctttaaatccagtgtataatacaagtttaatcaatttcccttttgtttccgaaactcccacctgagggcatatacaggttcagctagccaaagtgatgctgaccctggtgaccaagtcagtgagcggcacccacccaagtacaaggctcagtccacagtcatgataactatagccttatactcattataaggctatagctccaagaagctcagtgccaaaggtcaaggttaaatcagaaggtgggccaagcctcaccagacaatggctaccgtcctgcccagagacaaagcatttgcagtgacaggtaccactggagggataacagacatgagtaccagggacctgaaccctggggtcacacctgcaggcgaaggcttagggctcttagcttgctaatggaactgcagtgaggtgggtaggtgcgtgtgttatcagggcagtaactgggggcagagccaggaggacatggaggcgggggcccaccctgagtgtcactcacactggcagctctgaggttgggtggagctcaggccatagtgaccaggccagtaggagtcacagtgctgaccccatacacacactttgcagcaacactgcccagagaggaggccatggatctcattaatgtgagcatcacacaaatccccttccagacacccacagggtcacagtcacaggctagatcagaggtcagaggttaaggatggaattaggtcagaggtcaccatggagctgaaggataagagtcagtgttgggattaggggttgaaggactcatgtctgcaggaccgaggggaacagggatcctctcagggatgacagtagaagaagggccagcagaactcacagtggcgcccagctgtgttgtgctgacacacatcacacacacctccactcacataaccagacacacagctgtgtcaaagtgacaactgtagacatgcccatggcactcacattctgaggcagaaccagaaaggtagatatggggtgggcggacctgtggcaggtatggccaggcagagtagagcatggcattcatcccagcaggcatgggggtgcccaggctctgctgcatgtcatggatgatcctggtgcaggtcttggcagcactcacagtgtgcaccgactggtggggacagatgcaaagcccatgtacctgatagggaggagggcaaggcaggcctgctctggagtcccagcttgcccaccccaccagcaacagaatgcccctcccattgtcctcaccacattggctggggttccaggtgcagacctgcacttagaggtgtgcccaaggcacaggcaactgcctttggctacaagctcatagaaggcatagtagtagaaggggtgtcccttgaggcctcccaggggcctgtcacccagggtgtgcagtttggagaagtttacacagaggttagtcacatgcaggagctctggagacacagatggtcagaccttgggtgccttggtcctcactttctatgacgagggaggagggaaaggaatgggggagtctttcccctctccacatccttgtatccactcctcctgccctcatgctatggggttctgtcatccctgcttccctgggaatgctgtcttaagatgaccacagccttccccatggtgataattccacttctgtagtgaggatcccctttctccaatcctgattttactcctgaactgagacctgcacatcccactacttcctggacaccccaccatggtatcatcaggtatctgaaacctgcttccctaatgcagtaaaggattctgcttgtcatcccatagtccaaactaaaaatctactatcattcagctaaaccacataggtactacaatcgtgcacccatcagattacaatggagaggaaaaattcatattgtctagtgacatggtggctgtcataatgttgtatgtagcacaatacgttactcacgtttgtgatgatactgtgtaaacaaacctactgcattgctagtcatataaaagtacagcacatacaattatgtacagtaggctgggcacagtggctcacagctgtaatcctagcactttgggagaccaaggcaggtggatcacctgaggtcaggagttcgagactagcctagccaacatggcgaaaccccgtctctactaaacaaatacaaaaaatcagccaggcatggtggcgggtgcctgtaatcccagctactctggaggctgaggcaggggaatcacttgaacctgggggacggaggttgcagtgagccaagatcatgccactacactccaacctgggcaacagagtgagaccctgtctcaaaaaaaaaaaaattatgttcagtgtataatacttcatgataataaatgactactacttgtttatgcatttactatgccatactttttatcattattttagagtgtgtgtcttctagttttttttttttaatctttttaaaaacatttttcagatggagtgtagctccatcgcccaggctggagtgcagaggggcgatctcagctcactgcaacctccacctcccaggttcaagtgattctcgtgcttcaatctcccgagtagctgggattacaggtgtgcaccaccacgcctggctaatttttatatttttagtagagacgggatttcgccatgttggccaggttggtcttgaactcatgacctcaggtgatccgcccgctcggcctcctaaagtgctaggattacaggtgtcagccactgtgcccggccaatgtttattttttttttagagaaaagttctatgttgcccaggctggactggaattcccagacccaagcaatcctcccatctcagcctcttgagtagctgagactacaagcatgtaccactatgcccagctttccttctactttttaaaaaaagtaattgtaaaacatggtcgagcactgtagctcacgcctataattccagaactttgggagccaaggtgggcgctagcttgagttcaggaattcaagaccagcctggacaacatggtgaaaccctgtctccacaaaaaaatacaaaaattaggctgggcacggtggcttatgcctgtaatcccagcattttgggaggctaaggcgggtggatcacgaggtcaggagatcgagaccatcccggctaatatggtgaaaccccgtctctactgaaaatacaaaaaattagccaggcatggtagccagtgcctgtagtcccagctacttgggaggttgaggcaggagaatggcgtgaacccgggaggcagagcttgcagtgagccgagacagcgccactgcactccagcctgggcaacagagcgagactccatcaaaaaaaaaaaaaaaaagaaagaaaaaaaaaaaaagcccaggcacggtggctcaagcctgtaatcccagcactctgggaggctgaggcgggcagatcgcctgaggtcaggagttcgagaccagcctggccaacacagtgaaaccccgtctctactaaaaatacaaaaaattagctgggcgtggtggcgggtgcctgtaatcccagctactcaggaggctgaggca

SEQ ID NO: 1881045 - DNA, 4001 bp, Homo sapiens
ccaaaatgctgagacagggtaaataaagtataatccatctacgtggagcacacttatacaacactttcaattaaattacaaagaatgtttaataacatggagaaattcatctgaagtaatgagaaatagaaaaagcaagatacagcttggttatctttgtctttatatatacaagcacatatatacacatactcaaagcaagagaaaagacttgaaaaactcatgccaacatgttaacactagctatctctgggtggtgagcccaatatacttctgattttttccagattttttacaatgattgtgtaactttatcatttacagtatggtatatattccaaagaaggaaaatatgctgagcctcctgctgtggttgtgggtgtggggtaggatcagctttcagcttccctccttccggtggttagcaccaggttgaaagagagggggcacattagagcgtgggaacatgtcatggcccatcttcactgaatgagatcaggaagccttttctctccctttgtgggagaccgctgtaaacatggaatcttgtcactttttgttgtagctctgtaatgcaacttagacactaaattccccaaactgaatttctcccttcagtttggaatcaacagaaagtggtggctgtcagaagcaagcagctgctcagggagctcccatgagaagggcaggccgcctgctgaccgtggagagcacagcaagcccctatccacagagctttcttctctgttactctgatcatgccagaaacggggctactgggaaaaggaacaggaagggaagagaagctttacttgggtcctgctgtattagtaaaccctccttctgcgccactaactggctgctaggaaatgggaatggtgatatttcaagaatgagccatggctaatacttagaaactaggctaattatgtgacatgatggccctgggcacagaacaaggaagaagaggaaggtaaacttagtctgatttaatgaaaagtccaatttggagaccattttcagagatctatggccttcaaagatctgcagcctggcaggccactctcgcaccaggtcaggggagtgggcagcaggctctctggggcttcatgaataggtaaatgtcatctgcagcaagaaggtggggctctgatacatcctgatattctttgctcatactgtaattagcacattccttgtatatagtgatttttttaagagcacttaacatggccaatcaatcaatgttctgaatttccttgtttatcctaataattagcaactcccttccttccctcccttcctccctctcctccctccctacctttcctcccctctttccctgcctccctcccttccttctttccttcttccaagtgggacaaatgtggccttcaatgcccagcagctatcagttgttgcaatttctgagttagtgcagtctaaactaatgaagaaattgtgaagatctccccccagttttcatcactgtgcttacatatagctgtgcttcagtgcaagcaagcatgatctacctccagggatgtaccgaaggagtaggaagaaagctgactcagaaatccagggccttcttcaaggcagaggccctgcctaatactcccgcgtttgatggtccctgagtcagaacggtttgttagtggtttagagttgcagattttccactcacttataaaggcccctgctgtgcacagtcactatgatgaatgaataactcagttgcatacgcaagtctgttcccaagtaccatctgttgagtgaatgaatgagtgaacaaaagggaaacacattaccccaattgtgaatctgaataatgaacttggcaatgtgatgtgatctctgctccagcaggcctgggttccaagtccagcagggcccttgatgtcctttgtccttcattcctgtgcaccttgcgcctccaaatcacatttggtacgtctttcttgtagtgctgatggttatttatgagcatgtcctgggctgcctgttcttattgtaagctctccaattaattgcctagtgctgtgtacccaattatcatgtaaatacatgttgaatgaataaacaagtgtgactcattcagagctaaactacgcatgagagtagacatggccagcttcagccaagagtgaaaaccagattcccaactccctatagcccattccctggctccctggaaaagtggagggaaaacacttgggaatgagcaggattctaggagctgggaagcgcccctttccccactgggaaattccatgtgagcactcatcggggcattcccctgctctcattctcttgcttcagctgcttgggatctttcaatgcacccctccctgcaaaaagatggtggcactagctggaaagtatagcatccagtgccccacttcactcatttctttcttccctcctctcttgcctccactttgtcctactcacattatcccccacccctgctgctggtaggtttattcatccactgaaacaagcttgattgagttcaaggcaattaacattactgagcatctgttaggaactggagactgagagtggcctttaaggattttcaaggccaggagcagtggctcatgcctgtaatcccagcattttgggaggccgaggcaggaggattgcttgagctcaggagttcaagaccagcctgggcaacatagtgagacttcatctctaccaaaaatacaaaaaattagctgggtgtggtagtgcgcgcctgtggtcccagctgcttgcaggggtaaggtgggaatatcacttgagcccaggagactgaggctgcagtgagctgtgattgtgccactgcaccccagcctgggtgacagaacaagaccctgtctcaaaaaaaaatcatcctcctactcctcacaggagaaagacaggcaagcagcttacctaaatacacaataaaatgtaatagctgctagatacaattacaggcactacacaggatgcatcaggaaggaaaaaacaactaattctaattctgaccaggagataccttctcagtggagatggcatttgagttgagccaggaaggaggactagagttttgataacagtttgggaaatggcgtgagtaaagacgtggaagcacatgcaggcaacatttgaaagagcagagggagtggcaggggacagggagaagtcctggatggctatgcggaggaatttggacttgattgggaggaggagctcttcaaatatgactgcactctttcttttcctccctcacagctctgagagttgtcaggcattggtttggttcagtgatcgtaaacaggctggctccccaagggcagagattgctttgcccaacattatatccccagtgcctagctcagtgccaggcacatagcaagcactcaagaaataccaaagaaataagtgatacatttcacataataactctgtgctttctgattatatggtacgaagaagaattcagagactcgttctgagcaccaggagtgctgctgtcgatgaatggtgtctgggtggttgtaggcaagggcactggggatagttggctaggttttgccatccctgctctagatgatccatctgagatggcccctgctgcactgcaaccctcagagaagacagtccagaagagcttcaactgtcaagtttcattgttggaagctttcagacattaggatatattcatgtaactagcaggtcttggtgtgggtgcactgctgaggacctgcctgccagttctggggaaagcctcccatgtggacatcccctgagagctctcactaagaaatggctacaagcgggttagaaacaggcagatgaaataatagtgttagcagtcaggctataggggcccatagtgaggagacagtgcctagaagcggatggaaggttgatttcacgttctgctaattgggctgaatgccagttacacaagtgtgttttatattgtgaagattcatcattataccgctaggacttacacttttcaa

SEQ ID NO: 1881046 - DNA, 4001 bp, Homo sapiens
gtatcctggcactttgccctcagtcccacagcaggagttcctatcctgatgtgcttcaaaaccttccacaagtggactgataaccctggactagactccaaaatctttatctgaaaacagacaatctctagagaaaaagtctgggcagatgactgatgtgctaattctggaacactgaccatccaaggcattcaatatacattcagctccaaactggagctttttcatcagtgatatgagccgaattagtaacgtttggtgggaaaaaaaaagagcatgattcatcagtgtctcttggaattacacagccagggctgttcatggcctgagtggtcaaacctaacaaaatgaatgaaggaatcagcatgaatctctggcaagcccctcagcgtagtggtgattccacataaaagccttcttcggaaaaatcatagcaactagatacatgcgtgagtctttttcccattgcctgtccctctgctcaccattgcaggggctgaaagactgatgagattctcacaggcactagaagaccacagaaatgcctccaggaggcaggctgggatccagggtccaaccaatattcttgtgagagtgtgaagccaaggaacacgaaagaggggaacaccttggctaagaatgtattcgtgacagaggagaaggggaggaacaggaagcctccagctagtcgtttggaatctggcaaccatttctgtcagctttctcattcctagattgatgcagattgcttaattccttgaggtaagggatatactaaattgcctctttgttcaactcttagaataagaatttccctctcctctcccgtcccctcccctcccctcctctcctctcttttctttttctttgttttttttgtttttgagacggagtctcactctgtcacccaggctgcatgatctcagctcactgcaaccttcacctcccaggttcaagcaattatcctgcctcagcctcctgagtagctgggtctgcaggcacgtgccaccacgcccagctaatttttgtatttttagtagagacggggttttgccatggtggccaggctggtctcgaactcctgacctcaggtgatccacccgccttggcctcccaaagtgctgggattacaggggtgagccactgcacctggcccacagcaagaatttttttctgaatagcattttacgtgttaggcgtctggctgtttaggagatgaggaaactgaggccctcagttgccaaggtcacacagctggtaaacggacggagccagaatgcgagtacagctcctcctgcctccaaaggttctctgggccctgtaaaaccacgggctgcacaggaaaggcaggctatatattgttcttcccctggcccagcgccctgatccaatgcccggacacacatccacaccaagttggacgaaaaggtaagggagaaaccttccccaagagaagaagcggtaagctttggttctaaaggccctgggttgggtccgtcctttgccacttctcagctctatgcatttaggcaaatcacttatcttcttaaacctccgcatctgggcctacagggcctctatgggttttttttctatttatttatttatttattctttttttttttaactttacgttccgggatacacgtgcagaatgcgcagatttgttgcgtaggtacacatggcatctacggtttgattcagtctgaaatggcgctccaggcttcatttagaaggtgaagcactctgcaaactgcgaggccatacagagattccagaatatgattaaggccctaaccttgctaagctggattttctttatttcccaaaaagaagactaatactatccacttgtacaaccagaagggagctcacgtgtaaagcgcctcgtccccggccggcctcaagcggcgctagctctctggctggcgctggagtgtgccgcccctggcagccccgccgctgcagcggggagcctgggagagcggctctcggagtctcaggcagcaggaggagcgtgtgagctgtgggcgtccctttaagagcggctggccaggcacggcctccgcctctcagtacgcggagcgccggcggtcacctggggctcgcggagcggccagatcgcggcggagtcggcgcgcttccccgagggaaggtgggagaggggacccggacgcgaggtgccccgaagccctctcgagcgtaaccgtcccgcgcctctctgaggcggaggatgcgggagcgcatctgggcgccgccgctgctgctgctgctgccgctgctactgccgccgccactgtggggcggccccccggacagcccacgccgggagctggagctggagcccgggcctctgcagcccttcgacctgctctacgccagcggcgcggccgcctactacagcggagactacgagcgagcggtgcgcgacttggaagcggcgctgcgcagccaccggcgcctgcgggaaatccgcacgcgctgtgcccgccactgcgcggcgcgccacccgctcccgcccccgccccccggcgagggccccggcgctgagctgccccttttccgctccttgttggggcgggcgcgctgttatcgcagctgtgagacccagcgcctcgggggccccgcatcccgccaccgcgtcagcgaggatgtgcgcagcgacttccagcgcagagtgccctacaactacctgcagcgggcctacatcaaggtacccacagagcgctcctccactgcaaagcccctgcggctctcacacgctctcttgagccctccctgctgcccccgtcatctctgttcagtctttcgaattgggtctccttaaatatgtgtctcagtttgtgaatccagatatctggtggccctatctctgtatgcaacaattgattaacttggacaagtctttttctctctttctcagagccagcttctctctcaaaaagaggactgtcctgataaggtgatgtttaaagtacccattcagcactaattcatgaggcattgacaaagctgaatctagtacaatttatcttctcccttctcacttcccatttctcttctcccttctcacttcccatttctcttctcccttctcacttcccatttcttttgtctcctctctcttatccttcctatactgtagtctgcaccttttctctgaagtttaaaagaatcttcaaaatagtgaagttgaaagacctgttccaaaacaaatttctctctcttctccccttcacctacaaaaaagtaaagatcaaaggttaaagagaaggtatgcttggaggaggcgaagctgtttgaggcagtctcagtcaaagtatccaccctaagtgttgactttttctcctttgatagagggcttacgttttctggtggtatgcattggactgggttactaggcatcagtcctctctttctagttttatttttgtatgcctaacttgcctaaagttagcgtcaggaggtatagtatgcatattgacatattgttcacatccataactttgaagatctctctggatgcttcagcagagggaatttgaatgagttcttcaacctccactgccactcacccaattttccttcaaattgacactcttaacccttctttctcgttttctgtgttaatatatcaatgtatcttctacagctaccggaaaagtggaagctttggggttggttgttcatgctagccaatggaccaggctgctctgctctgctctgctctgctgtgctctgctttgctttcttttctcctctcctctcccctcctctcctctcctctcctctcccctcccctcccctcccctcccctcccctcccctctcctctcctctcttccttttcttttctttttttgacggagttttgctcttgtcacccaggctggagtgcagtggtgcaatctgggctcactgcaacctccgcctcccgggctcaaacgattctcctgcctcagcctcctgagtagctgggattacaggtgtgcaccaccatgc

SEQ ID NO: 1881047 - DNA, 4001 bp, Homo sapiens
ggtctcgaactcctgacctcaagagatccacctgccttggcctcccaaagcactgggattacaggcatgagccaccgtgcccagccgttaaaaaaattttgaaaaggtaaatcataagctggaaaaaagattgcaacgtatttaagagttaatacccttaatatattaaaaaatcaaatttgtaagaaaaaattcaatacatcaagagaaaatatataaagtacatgtaaaaggaagttccatattccaattatgaaaattgcaaatcacggttaaatttataatagccagtgttggttagcatgcacgaaaacagagaaacaggtgctgttgatggaagtgtgttttggtttaattttttggagggcagtcagaaagtaacaaaagtcttaaaaatgtccataaaatggaccttacagatgtccacctggtcgttccacctctagaaatttgtaagacaaataattcggccgggcacagtggctcacatctaaccccagcactttgggaggctgaggtgggcggatcacgagatcagtagatcaagaccatccttgctaacacggtgaaaccccgtctctactaaaaaatacaaaaaattagtcgggcgtggtggcacacacctgtagtcccagttacttgggaggctgaagcaggagaattgcttgaacccgggaggcagagactgcagtaagccgagatcacgccactgcactccagcctgggtgacagagcgagactccgtctcaaaataataataattcaacacagggtctcattctgttgctcaggctggagtgcagtggcatggtaacagctcactgcagcctcaacctcctgggctgaggtgatcctcccacctcagcctcctgagtagctaggactataggtgcacaccaccacacctggctaattaaaatttatttatttatttagtaaatagagatgaggtcttgctatgttgcccaggctggtctcgaactcctaagcagcatcattttttctaggtgttaaactgacaaccacccaaattcccagcataaggattctgcttaaaatatctagctctctgatgaaatatcttcaaagaatatttaatgaccttaaatctcagacaaaaaggtaaggagacaaaatgaggaacccatttccgtacaaccccaatttggaaaaacacatgtgcaagtatgcccatgttaaaaaatatagaagaaaaaaaggctttaaggaaaaaaaaaataatagtaatgatttagggtgggaatcgcgttaatattcccaataattttatatattttaaaaatctataattttatcaggggaaaacgttatgttgcggaaattaattgatcgattgagtgattggttaacggacagtgtccgatgactcatataatcccccggttcgagtccctttaggccgcagacgtttcgcgccttctcgggtgtccaagtcgcgcatccatacaatgaggggtaatatactagattacctgaggtcttcttacggtaaaaacaccggtgtcttaaggtttcccagtggaatttgggggccgggttgacttcggagctggagctcgcaaaggccggggctgctgcagattctgacgctttgtggacccctactaccgagcgcagccgcaccgcaggttttcttcgctgctggttagatccaaagcccatcccatcctagtaaactgggacagcgccgcttctcacatcactatgggggcttctgctccgtggcggggaaaggccagaactgctgccttaaatacgcttttgcatcatccggttgctaacctccggccacagcattccccactccaaaatgccacttttccaggtgtgtttgcctaaatttaccccatttacagacttctcaggtgcatcattgggaacagggcgctttgcagtttgcaaaccacctcagacaactccaggtttaaaggataaaggatgacattgtgagcaaagcggcatcaaaatttcagatatttaactttcacattctaaccatacacctttccaaggtcttgtaatactttcacattgtgaatatacatctttacaagacccagtagtacatgggtcaagtgtggcaaaacagacatcgcgagccagccaggagtcgaacctagaatcttctgatccgtagtcagacgcgttatccattgcgccactggccccgacttgctaaagccttctccgtgatagctgatcacccttatacagtttgaacgggcttccgggtaccaacgatccattttgcccttgcgccgcgctcccgctgctctgcctttccccaaaacgcgccccaccaatccgcagcggcttcgtcacggcgctcttcgtcgcactccaacccgccgcgtcggcggcatctctcgcgtgctcttgcttgcgcactaatttgtcctccaccgcctcccgttcaggccggctctcctgcggggcggggaaaggggtgggaagaggctgggagctgcggccgctgtgccagggtgaccggtagagttgtagccgaggtggcggcgcggggcggggcgggcggagagagaaggaaggaggtggttgtgcaggatggcgacggcggcctacgagcagctgaagctgtgagtcccacgggccagaggcctgaggcgcggcgggcggggcggcaggtgcgggccctggcctcggggagggcttctgagtcccggattgcagatagggtgtgggagctcctcgcatttaccggttttcctcagccggcgcggcctctcctaggcctcgcccgagtagccataggccgggaaccagcggctcgccggcctttctccaccgtgctcggccccagcgcccacggctgaagagagaagctgccgactggcccccaccgagccggggtcggcgttatgatgcggcccttcagggcacgcttgtccccactttctatgcagagctaccgactaaatttatctgtatgacttaacagagaaaaagagttttctcttacttaacggacctacagcagcaatttagagtctacgcacaaatcaacaaatctttgttttgcttacagcctatctgggtaccgaagcctgcctgccccctcttcagtgtgcagaaaaaatttaaagtacagtcagtagtcttaaggtcctgaaggagtttactttggtttaaattttaaacagctccagcctaaagcaggttcttaagtcagtgtcgacagccagaggctaatctcggtaattttggtactgcaaattgacttttcggtaaatccaagttcttgagtctttgatacagaggctgtggttgttaagagttataaaataggtgtttttaagggttttggtttgtcttggattaaaaacaacatgtgtttatttcccttagtgttacccattagcatccacacttttcttgtctgtgaataattttgttgtactcacttcgtgtttaatgctttacccctaggctgtttgaaaatctggtggccacagcctgggaatatctggtaggagaaacaaatgtaattttttagaagcttatctatccctgtatatgagctaaaataccttggcagttaggcatagataccgcatttcttttgcagggaaatgacaccaaaatgtggtttgggcacttaagctcctcagacctcaacctcactagtaactttctgaaaggttcagtggaaagttagaggtgcaaaattcagagaggtcatctattccacattgtatgtgttgcaaaaaagatgattgctttttctacagtgcaccccctgtgggtgccatttctgtttactgtaatgttctttgaaaaccctagctgcacacttccctccacattttcctctccacctttccctattttctcccagttcccctttgcaaagtgctcacctcgtctttggtgaaagagttgaaggaagtgtcttccactgcgtttctggccaggccactgtcacatgtgctctgctagctaattaggttattgtgtatctgata

SEQ ID NO: 1881048 - DNA, 4001 bp, Homo sapiens
ttcaagaagcaatgttataccaacgtcagaacaaaggaacactttatgctgatccttgcagtttccattattagagacccaaaggaatcagaccaggagatcgttttgctttaaactagtagaatctgacctaaggcaaatatcacttgagaaaaaggagaaaacacatttcttccttcaacagcgtcatccccattcttggcagagagagatgtgaatgaccaacagccatgccattgcatagtttcatctttcatgtaactttttcatatttgaagccaaacatttggagccaaagcctgataacccagcgagtcaagtgctcatgtcactattgcttgtgtctccatgggacaggcttgattgaaaattgctaagacaatatttttaaaatgttctcaccacaaaaaataactatgtgaggtaatggatatgttagcttgatttagccattccacgatgtatacatatatcgaaacaccatgttatagaccataaacatatgcaatttttatttgtcaacttaaatccaaataaactaggaagtgtaatggcttcagaaatgtgtaattcacccaagctacaacatgaaacatcttgggtatccgtcacattgtttttggttataattgacaaaatccccactaatgaaaagctatatgttgaagaaatatctcaaaatgaggaaatgtaccaccctacatagaaaataagaaaatcaattgtctcatgtagcaagcagtccagaggttagttcactgtctccatgacataacttagtacctgggctctgtttaactctaagcagcatcatggaaagcttattggcttggttcgcttgtctccttaaggttctaagatggtaccaggagttccaacacaacaacagccagattaagaaggaaccccttgagaatggctgatttcaaagatggggcaggaaaaatacaagatgggtatgtagcacgttattgtgccagatgtaaaatgtgtttaaagaatgatgggccatgtcaaaaggacatagcaaccagtttgaaggagctttctttggccataatttgggacaatttgagcattaaaataaataaggatggtaatcaattataaactatttaataaaatagaaatcaataactccaagctgatgtaaatatgtgaattaataaatggggagaagatagtgcttttccttatagtagaatgctaataaacactaaagaaatgattgaattagaaaaaccaacatttggcaactatcataataataattagttcgatcagtaaacgtcaatgaatactaagaatgagtgagtggaattttgatgaagaacaggacattgacatagtctcaaagtccctaaacatacttattaaatacaaaggacaaaggaatgactttacaatggaaaaatctggctgatactggcattatcaaatgttcaaaattcatgtcaacagtaatggaacaaatcaaaatcctgtatcatctgattggatgcaacagaaagaaaacaacatcacttctgtggtattccttccaaaaaatgcataagctgaatctaatttcgaggaaatatctgacaaacctaatttaatggatatttaactcaacaactttaaataacctttaatcttctaagatgtcaaggtcatgaacattcaggaaagaacaaagaacacttccaaattgaagaatagacaagataactaaatagaatgagtgatcttagactgaatgtttttgttataaaagacattattgggacagctggtgacacttgaattggatctgaggattacatggtagaaacacatcagcgttaacttcctgattttgatggttgtattgtggctatgtgggagaatgtccttatttgtaggaattacacacgaaaatattcaagagtgataaagcattgtgtcagcaacaccctctaatagctctttgttctcttcttgtaacttttttcgtaagtttgacattctatcaaaagaaaagaaaacaacagcagggctatttactgcacagtatctcctttcattaaggaaaaacacttttctaagaccctcctaaggcggaagccccactggctggtaatagaggcgcatggcctttctccagctgcagaccaggttggcaaagccaatttacataaaggggagtgggctcttctctcagtccagtcgtttctctccatcctccctttgtctccatccccaaagtcatatctcactttgaacattttctgctcagactgacaagtctccctgacaggaactcaccctctccacccactgcttccttgccactaggaagaaggaagtggggtgtggtggcaatgtgtaggctgccagcagtgtctacctcagtctgaaatttttatatttgaccttggccattttggaacacagtgccatcagcaaagacgaaccatcccagaaccccaggttgtttgttctttcatttagttgccaggatttgtactaagagttggggaaataaagataatacgattattctttagaagttcataggggaaggctttcatgaataaataattatagcacaataaaggccttggaagaattactgtaagcctgggatattatgaacttacagataaagggcacctaaaacaccccaagggaagggtgagggaggaaagtcttcctagagagtgggaggggtggggatggcagcccctcttcctgctgacatgggagatagaatcaggcaagagttaacatggatctttccaattctggtacagaatcccactcagctattgcagccccccagcagaggcagcaattaaacacagtgtggggaattgcaggcaaaaagcacagcgtgagtgatggtacagaggtgaggaaagcaggggcacacactgtgactgtaaactgcccatttggcttctgaaaggataacaggaaggaaggagggttggggcaggaaaaataagaaactcgactgcaaggtaaaacagtttcaatttttttctgtgtgtgcaacagggagcccctgattgttcttgaagaggagagtgcaagatgagggtgtgtttctgagcaattcatctggaagtggtgggtggagagggtgagttcccgtcggggagacttgtcagtctgagcagaaaatgttcaaggtgagatatgactttggggatggagtgaaagcgaggatggagagaaaggactggactgagtgacccatcagatatgaaggcaagtggcagagatgattcaggtgctccaaatgcaagggtgggtgtcattaatagacatgagaaaggcaggggcaggtgctgggtggtgccccatggggactgttgtgggagataatgcccatccatgatggtgtgacccagtggaccaagtcaatcatgcattgtgctggggtttcaacagagaagagatgacgtatctcatgatctccctgtccagccatcaccaccccctccttaaagctgtttgaaggctcccccttgctcctagaacagagaccagtcttttgaattgccccagaactggagcaggctggccatgcctgcctctcatgccccaggcccaccctcctcaccatgctctgtgctcctgccacaccagttttctttcagttccatccatgggccatgttcaccactgtatctccaacaccagcaaataggtgttgaataaactggtggggcttccaccacagggcctttgcacatgcattcatgtatccatctttaaccattgtccttcctctctttgccaacttagaggcaacctatcctttttttttttttttggaaacagggtctcactctgtcacccaggctggagtgctgtggcatgatcacagctcactgcagccttgacttactgggctcaggttatcctctagagtaactgatactacaggtgtgccaccatgccagatagtttttgtattttttgtaggggtggagttttgccatgttgcccaggccggtctcgaactcctaggc

SEQ ID NO: 1881049 - DNA, 4001 bp, Homo sapiens
tttccttggcagtgccgtgggcccatgtgagagatttctggtcatgaatttacagtgagatctgtcagcgtagctgtgttttgcttttttccccaaccatagcacaggtgcaggcatagagtaaacagagagctggagtaatcagaattgaggatttttttcagacaagttagaggaagaaagtgtgtgttgggagggagttgtaggtgtctacaaggaagtgttacaacaatggaccatgacttctaagccccgtaaagacggaagaaaggacctgaggggagtgaagaacagtgagtaacgatgaaggcactggattgtagaaccaggtggagtccacgaattttcggaattggagtgctagaggtagtgagccagaaaaacaagagaagcacaagtctgcaacgtataatagcacgccaactctgcttcatgcaaagatgtttaaatccagcagtacagaatggcttggtaaaaactcaaggcatgttaaaatatcattcacatgaactcaagtggtaatagtcaaagttgtgaataaaaaaatcctttcacacattttataaaaacaggtaacaacaattgaatgtatgttatcattgctctggggcaagaaaagagcagtcgtctgtttatgactaaaattgtcagtgctcaaaatgttccaagagtcagtatttaattaataagttgccacactcatttcacagatgccacatatgagagaattaagtatagaatgaagaattaatgaacccctatttaggaaaacatgggaattaatacacacacccacacccaaccaaccacacacacgtacacaccctggtaatcaaaactataaactgaagaaattaagaagattgaagagcagtaactaaaaatatgcttgtgtcagagtatccaaagaacacagcttacatagagcacaggactttcctgtggtttaaatcttgagtacaaaaaaatgtttgacacccagtaagtataaaacaaatatttgtttgattgaattaaatgaatgaataaataaatgaatgatgatgatttgtcatctctctatcatgacatttgtgtataacaaaatcttttccattttgtcccatgcaggttcaatttctggttggtaattggcaatgatggaatgactgtccggagtaaagaagcctctctttgttcttgtgccatgatttcccagccaggcagtgcttgcagttcactggactgatcattttctttcacactctgtgcctttgcaaatattattcttttgtctgaaaattgcctgctcccaacccttcattatcatccccactaactctcacccaccctccccagcttgttgacttggaaactccttctttttttaccagctgcaattcaagcaacacctcctctggggagccttttcaactctgccttagtcttttttggccctagtttttgcatctctccagattcactgggctttctctgctttctgggtcacttgttcagtgaagaacccctaccccatcatcaccacaactcttaaccctaccacccttagccctttccagatgagggctgtgctctagcatggctccttcatactcaccatgatgggactgcaaagaccctggtgtctggggcctgaacccactgggcccctgaagttcagcttcctgcagcattcccagaatctgaggaagcaccgtgaaccgaggtctgggctctgacttccctgatcctggagccaggtcatccaatctgtaaatgtaaaggatggaattatttttaccaatgaggaacaggtagactcttacgcctttctccccatgccctatccccaccctttacagactgtgaaagcacacagatttctacttacagactgttctgaagcacatcgatttccacacgactgactggagacatctagtgtgatcgagacctcagctgtgtgttataatcaatgtgccacctttgcttccccctctgctctcattcttgctgctcaataacaccggaactctgctccaggttctcatttctatgcaagtgtagaaatcctctacaatctcctagcaacacaggcataccgctaccctagcttgaaataacctgagtcatgattgttagtttactttaacagagattcttgattgcagaggaactttttttcagtggtctcattacttagcaccatgttgggaacatagcaggtgactcaatcaacagtttttaattaattaatggctttaacattaaataattatagaacacatttaaaacaaaaagagctcttagacatttttgctttaattctctgtgtgatatggagaaactgcctgaggccaggagaattaaggtactttccagagtcatgcagctattgagtagccagactggagatggcatattggtttcctgatcacacagcactattctcttttagaaaactgttatttccatttatgtgagtggaaaacaacatcaggatcaatctggcaaacccctgggaactgtgtttctccaggccatctttaagcctttagattaaaatataaaattgggtaacactaacaatagaagacagtgttcctttgcttctgtccccatcctctacaaagtccctgctgccttttttcctggatgtctccaggtggtgtctcacaggtgattgcaaacacagtcctgccagctcccatatggcacctgtcatgacattccttttcttcttcaatttctagctcagtgcccacagccagagcttcccaggctgcctgtccacgggtgtggcacatctgcagagcctcaggtggctcctgctactgctcaccccacaagccctgactgctaatatctgcccagggccctgtttccttccctagtattcctgtgggctggttagcttgttactcaagagccaccgtgtggagtccatgctcctatagtagcctaaaatgaggaaactgcccttcattaacccaactctagcttgttccaaaacatggagcacagaacattgctgcctgtaacccctggaatggcacaagattatctatttatttatcctttaatcacagctggaggcctcagatatgaatattcaggattggtgaaagaactcaacaatttgactgagtgtcataattgtggcacagggaggaaggaaggacagcataccaagcccttaatcacacgctacccagataccagcataaggcccgacattctagaacaggggccagctcatggcctacttttctttggccggtaagctaagaatggtttttacatctttaaattgttgtgaaaacaaaacaaaaaacaaagaaaatgccagagacctatgtgacatgcaagcctagaatacttactgtcaggcctctgagcccaagctaagccatcatatcccctgtgacctgcaggtaaacatccagatggccggtttctgccttaactgatgacattccgccacaaaagaagtgaaaatggcctattcctgccttaactgatgacattatcttgtgaaattccttctcctggctcatcctggctcaaaagctcccctactgagcaccttgtgaccccccattcctgcccccccagagaacaacccccctttttcctttacctacccaaatcctataaaacagccccacccctatctcccttcgctgactctcttttcggactcagcccgcctgcacccaggtgattaaaagctttattgctcacacaaagcctgttgggtggtctcttcacacggacgcacataaaacttactatcaaattctttagaaaaagagcttgtgttctcattgttcagttcccacctacgagtgagaacatatggtgtttggttttttgcccttgcgatagtttgctgagaatgatggtttccagcttcatccatgtccctacaaaggacatgaacccatcattttttatggctgcatagtattccatagtgtatatgtgacacaggaaggggaacatcacacaatggggcctgt

SEQ ID NO: 1881050 - DNA, 4001 bp, Homo sapiens
gtgagccactaagccctgccaagatgtctttcagtaggtgaatagataaacaaactctggtacatctagacaatggaacattaagtagctctaaccagaaatgagctatcaagcatgagaagatatggaggaaacttaaatgcatattactaagtgaaaaacaccatctgaaaaggctatgtattgtatgattccaactatatgacattctgagaaaggcaaaactatggagacaataaaaaggttagtggttgtcaggtcttggggattagggggaggataaacaggcatagcacagagaatttttagggcagtgaaaataatctgtataattcaataatgttcaataattcaaggcatgtcatgcatttctccaatcccatagaatgtacaacaccctcatatgcaactgtgaactttgggtaacaacagtgtgtcaatgcaggtccgtcgacgggaactactgttccactatggtaggggatgttgataatggacgaggctatgcatgtgtatgggaagggagtatatggaaaatctctgtacctttctctcaattttgctgtgagcttaaaaatgctctggccgggcgtggtggctcacacctgtaatcccagcactttgggaggccgaggctgatggataaactgaggtagggagtttgagaccagcctgaccaacacagagaaaccctgtctctactaaaagtacaaaattagccaagcgtggtggtgcatgcctgtaatcccagctactcaggaggctgaggcaggggaatcgcttgaacccgggaggcagaggttgcagtgagctaagatcgtgccattgcacaccagcctgggcaacaagagcaaaactccatctcagaaaaaaaaaaaaaagtaaaaggacatgattagagaaaattgaaacagcccaagtcaccaaattcctaaagaagtgatatctggttctatagttgcctatcagtgtgttaatgtgtaggtgtggaggcctggctacacccaacacctacctgggaaccaaacaattcctaccaactaattcctccttttaattcctagagttgttgcttttctttcccacacctttatttactctccctccctcctggaggaggagttgagacatctgcagatacaccttcctgggaaggtaaccggctaggtcgtgggagtttgaagtccagcccaagccctcatccttatctcattgtcaattgtcttataaggaaatagtccaggcacaacaatgtctcctcttcctccaggtcatgagttatttccttatagaccttttctaaccagtcttacccttaaaaaaggagctgaagaacaaacctgtgccattcttgatgtgagatggggaagatttggaggtactgacctgtggagtttccattaatatgtagccgtgcacagtggctcacgcctgtaatgccagtactttgggaggccgaggtgagtggatcacctgaggtcaggagttcgagaccagcctggccaacatggtgaaaccccgtctctactaaacacaaaaaattagccgggcatggtggctcatgcctgtaatcccagctactttggaggctgaggcaggaaaatcacttgaaccccagaggtggaggttgcagtgagctgagattgagccattgtactccagcctgggtgacagagtgagaccccatctcaaagaaagaaaaaacaaagtaattactctcctcatatagttgagcataaattcagctagcatggacttggggttctgctgacaggcctccataatatatgcacaatatgtccatccagaatgcataaatatggagtgcatacctatagaattacctgcctaacacgtcttttctaagaatgtatttcttccccaccccgactctcacaactcccactcaggtacatttttaccacaggagtcactttacacataccttagggccctgttccccggtcattgttcattcacccacaggttagcactggacttaagctgggccacagtcctgctttgtggctcatagcctagggatgacgagcaagctgaactaatctctcttcactggctccacatttattaatagatatgaactcacatgctcctggcaagcatgtcctccactaagagaagaaagccactctgaaatgagagagtgaagccaacattcagaggggaacatgagatgagaagaatcctgacaaccttctagtgtctggctttcagcattcagaacccagctgcatctctgctcttcctgtgtcttgattattcaattattcctagaattctatttaaaaaacaaaaaacagatcaaaagaaaatactggaatcggttgggtgccatggctcgtgcctgtaatcccagcactttgggaggccaaggcgggcagatcacctgaggtcagtagttccagaccagcctgaccaacatggagaaaccccatctctagtaaaaatacaaaattagctggacgtggtggcaggcgcctgtaatcccaggtactagggaggctgaggcaggagaatcgcttgaatccgggaggcggaggttgcagtgagccaagatagcgccattgcactccagcctgggcaacaagagcgaaactccgtctcaaagagaaaaaaaaaagaaaatactagaatccttccaatcagttgcccttcttacataaggtagtttatgttgggtttctaacatctacaacaaaaagttcctaaaaattatagaatgtgacgctcttcagtgctcagattgtgtactaatgagacatcacctgattcctgggagaaggaagtgagataatgaacgcaggattgctttgtcacctatacaacatgattcatcgacgatccttctgaagcccttacattcaactgactgaaaataaaaatttctgcttaaagaccaaagggtttgccatgctttataattttcttactttttcatactttctgtaatatcactttttttgaaatcttgagagttacccagtctcctttagattaatagaaacttgactacagaatcaatgcatgttatataggcacaagaataccatttgtagaatagcctactgtggcactttcccacccctaatgcctggactctgagggatctgtgaagtgggcaagacattctagggttatttttagcattttaaaatctctagctggccgcagtggctcacgcctgtaatcctggcactttgggaggccgaggtgggtggatcacaaggtcagtagttcaagaccagcctggctgacatggtgaaaccccgtctctactaaaaatacaaaaaattagctggccgtggtggcagtcacctgtaatcccagctactcgggaggctgagacagagaactgcttgaaccctggaggtggaggttgcagtgagccgagatcgcgccattgcactccagcctgggcgacaaagcaagactccatctcaaaaacaaacaaacaaacaaaaaaactctaacgacaattgtacttgcaccatatatctatttacacaagttaaccgtaacatcatatttctttgctttgtgctaaaattagatcaattcagtcttccagctgactagctcatgttgcccaagttctaattggctgttgatgatacccctggcattgctctggtgaaacttgtggatcagactgttatcaggtggtaatatccaaacaatacccatagtagaattgacctgcagggaagcacaggggtgaacagctgaaattaaggaacctgtggcagtgaatattgcctatccattgctatgtttacatatctctgtgaatgagataaatatgtttctatttgctaggaaaagatgttcaaaacatgagaaaaaaggggagaacaggctgggtacagtggctcatgcctgtaatcccagcactttgggaggccgaggggggccagatcacgaggtcaggaattcgagaccaacctggccaacatggtgaaaccccgtctctattaaaaata

SEQ ID NO: 1881051 - DNA, 4001 bp, Homo sapiens
ctgatgaataataaaatgaataaataaataaacaacgtatattttcacaagctttgtaaattttttcaaattagactttttctgttccacatactgtctcagattcaattgaaagagatcttagcagattgtacttcaggttgtaatgaattcatattttctcaacttctttaaaaatattctcatgtatagttgttcccagcagactattcataggagatgattctttagtgacttcaaactcaacattaactcctcaaggaaataacagcattgctgccaactcatctaaacatactggatatttgctttgttctttagttgtctgttgttgctactgccaataccctcaactcttcaagcaactgttcatgtggaaaagataatggtctttacagtataaatgtgtaaaatccatacatagctctctggcagtacaaaaccaggtggcaagctagagatatctagcctattggcagtagttagctgacacttgcactggatgataatgattctgagagatgtacatttctgtcagagtaggccctctgtaacatgactgttaattaaaagtatatatacagatacatgcatatattaaaaatatatgtaaaacatatacataaagtatatatacatatatacatatattaaagtgtgtatacacatatatatgtacacatataaaagtgtatatatttatatatgacagtatatgttaattttggtgggattttgttctgtatttgagttccagtaaacttagatatatctaaaaatgtaagccataaaacttctcttcacgggacaggattatgtgctggagctagctcacaccctaactagcatcaattgttcaaattctaaaattttgagttaaaattcaattgcatacacttgtttgtaatacacttgttagatgaattttactggaaaagtaatggagacacaaaattcatttcttcctaattagttgctacattttgctgttatctgtgttcttagagttatttatgtctattgtaccttttaggtggaaaaatataaaagagtgtgcaattgtgactctctccaaatctgtattcaacgactacatattgtaacttaaaatcgcctatgatgggtaatttaaacacagaagtcagcaaatgctacaaatcaggatttggtttatggctttgttgattgtctaggctaagacatttacggagtgaaatgcaataatgaagaagagatgtaaatacgtgttgggtcagtagccattgctttgtgaatagcacatatacactcacaaataatttttgaaaactattatccaaatgaggataaaagtcactcaagtcagagtgaagttctgttgtccatcttcgttttttaatttcctctttcttgttaatacgtatgttagaaaatatcaggaggcctgttgatcatgccctgtcctaccagtggcctctgagctgcctgcttggcactgctaagctgcccctggattggttacaatgtgggcttttgtctggattacaggcggaggaagaatggggaagcagcaaagcaagagccttgctggagttggccactcctctgtgcaacagcctaaatagcgcagcacccaggacgcactaggccctccataaatgtcagcttaacagaaagtgacaattaatccaaacctgaggcgagtgagaggcgcagctgcaggatcagtgggtcctagggcttcctgaaacgcagtcttgaggctcctgtaggaaattttctccctctccccgcaggcatggcttttgtacgagacggaatgaatgtcaagctcaggttcaactcgcgctttggaacccaggaggtatcctcagcgaggcctgatggaggacaggaggggctggccgagggtggagagcgaagggatcgccggagcggagcgagggtctcatcccccctgcaggaccctggcagacccacacgttccctcctttcgcacaagtcggttgctgccctctaccctttggcagggcataagaatgacttccgccgcggagatccagcgcttccttccattttgcctcctggcccctcctggagaccgcagccggtttcttggcagcttcgcgccccagagcaggaagggaccgggacgcggtcacatttcagctttggtggctgcgcccgcgcccccgtactccgggcaggagatctgggctgcgggcgccaggcagagctggcatcttccgggacctggatggttgttgcgtaggggctcccaagctaagctggtgtaggagctctcaaaactccctttctggcatcccacggaaaaacacatgaatcagaaattcctctgcctggtccttctgtaggggccgaatggctgggaactcccaggtactcgcgtggggatcataacccagagactgcggggcgaccctcggagagaagccccctgcagctgcacttggcttccttttgagccctactgcctgtcagggaccccgaagactgcgaggccaggggtacagacctggggtgtgctggcgtcccctttccatcccaaagtgctattttattttcctttcgcttcactctgggtctcaagccctttcagtttctcagcagagcaggccatttcgtctgttcccaaatatcttttaaaagttcatttgtctcgcaatctccccacaatgcagaatcttgtacttatcctttggtactattaaaataagataacattcaccattaaattggtccaaaatatctttaatgttaatatttaggtcgagaagcgttgatggctcttgcacagtcttgtgtacaagggagggaaaagtagtacaacttctctggagaataatttgacaaaatatgtaaataactttaaaaatacttttgaacttgatccatctttttctaggatctttcaaaaaattatatgaagtcttgataacctacaaagatcttcatcacattattatttgtaaaagaaaaaaatgaaaacaactttatccacaacaagaaacattagataagttatgatatgttcatcttatagactataagttgtcattaaaaagattgactgatgctgtcaaagtacaagaaataaaaaacatgtaaaaacagaaacaaaaacaaccacaaaaacaaaaaaacaagaaacaaacaacaacaaaacctctgcttgtcaaaatattcaaaccatttaaaaacaagctggtaaatggtgaaattatgtatggcaagagtatcacagatttaaaaataaaacataaaaggaaaaataaaaaaaacacagcctccaagaaaagtaaattaggtatttgtacttagattgttaatatagaaagcccttttatcaatgctaataacactcccaaatattgtgtacattattaaaaccattctggacgacaatttgtcaaagtaagtttattcacaatacctagttagtcattattgtctagcaggcactaggaaggtttctctataggagcagggtaaggggagaagggttttgctatcagccccgtagggaattatatgaatgtagggtattgacaagtgggtggtttagctccctccttcacatgacttgatttgattagtgggagtgagcagacatgagaatatgtcaattcaagttgaggctttaagaagtgtgctgtcttctgcttgctctagtgtgcttagggtacccctcgtgagaagaagatgattctgtagctattgttcaaaattttagcctgggcccttgaataaaaaacaaaccagactgatgacagcaaacttgaaactcagacctagcaaagcccagaggaacaagtgctgatcaacagaactgcaattaaaaagtaaatctttgtcatcgtagcccctaagttttgaaggtcacttgttatgcatgggtattgcacaaaacctacttaatacgcatgcacaaggtagaactgtcctatccaaatgccctgcgcccccttcatcccctgccctaaaaacactggaaaaagtga

SEQ ID NO: 1881052 - DNA, 4001 bp, Homo sapiens
ggcagttatttctattattattttagtataattatcactgaatcagaaagaatgtgaccctgggggtgtgtgcacaccatgattttggccatgaccttcagtcagcaacattagtttctctcagaggaggttctactgtgccccggataagggaattggagctcagtgacacgtagaaaactgacagcattgaagatctctaaaggatactcaaaacattcttgccagccctgcctgaggctgcattactgcctaccaggtttgtttctgctctcaggcacttattacatttctctgttttcatgccagccttcctagcttactttgtgttccttctgcattagtcatcataacgccccagttcagtgacagataaggtggataagtcccatttggtccctgcccctacaattggaagaagacaggaattaggagatggactgaagcagaggttaagtgttaaacacagcaagcccaccccacagacacacaattaggtgactctaaaaccaacttaattggttagtgaccagtagtagttttcatgaaatagaatagaaaatatcaatataaaccccatacagtaagcagtttatttcattaaaaacttttattggccaggtgcggaggctcatgcctataatcccagcactttgggatgctgaggcgggtggatcacgaggtcaggagatcgagaccatcctggctaacacagtgaaaccctgtctccactaaaaatacaaaaacaaaattagctgggtgtggtggtgggcgcctgtagtcccagctacacgggaggctgaggcaggagaatggcctgaatccgggaggcggagcttgcagtgagccaagatctcaccacggcactacagcctgggtgaaagagtgagactccatctcaaaaagaaaaaaacttttcagttgtgtgtgtctgtatgaatatttgtttgtgttggtgggtggatgtgtgtgcattttgcaatataaaatatatttcttttgttctcatgtggactcgaaggtctctaaggtctcttttaactagaaaaatttaataaatctccaaactctgtagaactgggattcaaaatggcagtagttgccaatgttctggttttatggggttggtccatattttttttcccaatagaaaataaattaggattttccttcatcagtaaataaaaatgttaaaagaataaaactagaatctacactcaatcacccaggaagatgagaggtctgctgggactgagattacagagagaaatgaacacagagatcagagcttgaagccagctgtggagcccagggccagtggcccgcttctgcacacagcatccatccatgggaactgagtcaactcataaggatctaaagagagcggggacattgccggggaggaggagatgggggttcctctcccagcatacacacacgcatggctcccacactcacataaatgcacatcgagaagccagaagatgttgcaagatgtgtctgtgcgtctctcaagcttctacaggctaatgaaagcatgttagagacagagaacaggcctgagtttcaagccttctgaagtctgtttttcactctgtctctctttggcacagaataagtcatttcattctcccctctatccagacagtgagttaatttacactgacaactataaccaagttgatgaacacaccaaacattggtcagtgcagattctccctatttgaaaactgaaataggaaacttttatagttagaaagtgctttgcaaacataaactcagaaaaagaggaactaatcggaggatcttacctttcggttctctaagcggtcacagcctaatgctgccaaatggctccagatgctcatgttgaggtccaggctctctctccatcttcagtctcctccactcaccaggctcctattaacacattttctgctcttcagatagtgaaatgtggacagctaggtttaagccaccagattccatcgtgctacaccgagaccacagccaatccactttggccttcctcacaagtctccaaatcatgaccatatatgtataaaacgcccagtctcttcctttgctgctaaagattgttagtctccatcattaaggaactttctatctcagcctccagaggggtaccatcacacatagttctgaggatacctcaccatgtatgaacacaaagccaagaaggggatctcatcttctttttatcctaattggtcttgtgccataggttggtactaaggcaactatttgcttttagtttagttgttattctaggttattttccatataaataatatattaatcatttgaacatgtgccctaggagagttttgcaactggaacaattcttgaatcaaagaaataaatactataaacaaagcatagtttttcaagtagctttccaaggcttgttgcaattaatcacaggcttaagaatgctactccattatcattctatcaaatgcaagccacatgggctttgtggccatcatctcaaataaatacatctcactctcctttgtaagtcttcagtatagacaaaggcctctgcttcaggaattttgattagcaatatgttaatcataatttccaaataaaaagtctagacaccgtttcaagattaaatttggtctggtctgattttgtgaattcttataaaatgtcttatccaatcaaattttagcaatcattctgcattttgatgttaaaataaaattaaattaaaattttaacgaaaataattctgaccctctgaaacaatttcaaacttattttaaattccccaagtgcattcagtagcaagtagaaatagtcaccgtttagccaccccattacagtccatcacctcagcattgcccctaatgtggcaagattttaaaagtataatattcttcacctttacagctaaaacaacagcacattcacacacatcattgtatcgaatgtgggctagcatgcacacatgtgtccccattaatgtatcaattcttcagcctgtgactcattttttggtgacacatgtttttattgtattattgacctgagtcattcagttactatatatcaaatactggacttctctgttaattcactgatttgtggaaacaatggatcagaatatttgaagctgaggctgtctcagaaaaagagacatatggtccacgaaagaagcaggcatgcctctgcaggagtgaaggcacaacagaaggcatgccccgggcaccaggtcccgagcatcagggaaggcccagcgcagctgtcaattaaaggagggagattccagtgatcctcgccaccatcattacatttgttgagttcttctgcatgcaagtatcatgccaagtattttctgtgcacaatctcattcaacgctcatacaagccctttgacacagaagcatttactaaccctgtaacagagatgaggaaatgggctaggagaggccacttagaactgttagaatcttgacccaaacccaagtccgtctgactccagagacagtgctctgggttttcaacctgttcccagacaaaacataatccccactagaccttcaggaagctttgtaccttctgagtggtgttccagccgataccccggcatcagtctttacaacactttcacctgtcccagaatgaagcatgtcttgtgggtatgaaaactaggaaaatatctgcaaggggatgggcaatccagaggcatctcttcatttttctcccgtaaataattctcataactaatgcaatttagcctcccagactcctcatactttccctccaacgtattcttttctgattatttattattatcataattaacatttttagacatgtcactgtgcaaaatatggaggaagacagactcccccacccttttggcttatgatccaaatatttagattataaacacaatgtttttggcaggttaactctgtattaagaaatagagcatttgcaggaaatgtcagatgcttattttacgat

SEQ ID NO: 1881053 - DNA, 4001 bp, Homo sapiens
agtgcaggttctcttgggtgtcgactctgcctggtggtggctgcctgatccctgcattgagaagaacgctgaagctgaggccaagctgagccagagagagtgctaggatcgattagctatgcctgcctcaggtgccagattggagggcgctcctgctatgctatgtttgccatttctgtcctaaatggtttttaggtatcattattatcatttcttctttacccaaagccaaaagcaccctgagaagaggccaatgggcaggtctgcacccaggaggctttggtgctaatcccacagccctcttcttcctttttcttggttttgtttattttttttttcctttttcttcctttttatttacttatttattttttttctgggtagcacaaccaggtgaaggagactcaggtgagacttcaggatgaggatcaacaatgtcaaactctgaaagacagaaggaactggaagccaatgtcaagttggcagaagtcagaggcagcagaaagaaagcagacagctgagcccagaggcagagggaaggcgcctttcagtgggcagaggtcagacacacctgagggctgggggtggaagtgagcatgaggaaactcggcaagggaagcaaacccttcctctgcgcacctgcaaagagccccagctctgctgttggcgcagccctctccagctgcacggctcaggggagctactgctctcagagcttcagtttcctcacctgcaaaacagaggttgttgtgaaggctaaatggcactacgtcatagcagtgtctcatggcacccccctcccaccagcctttgggtcccaaggtcgttcttgcaggcccagcccattggctccatctgggagacccagggccagagaagcagagtgggcccgtgaaagacaggaagggtggtccgggccatcagacattgacagcctctcttgtgcctgctcccaggctctgacccattcatcatatccctgattctaagttgcctgggatttagacctgtttctgctccaggatgtccagtccctctagaagcagcttggagtggtctgggagcgggggacactcgtggctgctcctttgtagcagttctagaacttgcaagcatgggacaaagatgatcatgatcatttcgctcatccctcggggctctagccccttcccggagagtgctgtcaggctcagggccctgcattccagtcccgacgggccacttcctggctcagagacctccagcaccactctgggcctcagtttccttatctgtcagctccctcccagctgggtggtcataggtctaaataagatcacgtgaatatatgaaagttctctgtaaactgcaaagtattagctgtacgttaacctctgtcctctctgaaattcacaactcacagaattactgggggtcttttctaacaggacagtgacaggggagcagatggccccggttctctgagtcacactgcacggtcgtcccacccccacaactgcctcattttcagctgcgtcctcttccctccactccagttcagagagcctttcagttaccctaatcacactacacattacttgcaggcctcggagcctgtgctcaagccattccttctgccgggaatgacctttgcctccctgcttggcaaacttctatgcatccttcaagactcaatgccgatgacagttcctgcctgataccttcccaaggcaaagggtgtgcctccctcaatgggctccccagcctctattttcgaaccagaggagtgagaacaaaccgagttggcatgacggacgcacccctgccccgcacacagtaggtgcttagctgatgtgtggatttgaacctgttgccttcccctcactcacccaggactggtcttgacattcagagctcaactcacatccggggctgtgtccaagccctctattctgtttggctcagatggccccacgctccctggggcagagccgtcccgaggcagcctctgccttcatgatgctgtgtctctatgtgttggggtgtgtggcagtggaggggctgtggtcacagaggagccaaccaggagagctgaaggccgcccgtagccatggagacagggcccccgggccagccaggcccgggctggtcagtgaatgaataaacgtggcccatttttctgcttttgtccggagcctccctggggcttcctgctgtcagccccagctgtggggaaggcggaatttgcctgatatcgcggagccgccgcctggcagcgccgagcctggcctgggccgcttcacgccaagattcatgcccggctaacaagccccactttgttcctgtgggaaagtccagcctctcaggaaagagccctctctccggccggcccctggtctggggactcagcgaggcaaacaaagcctccatccgctggcaaggattctcaggccccgaagtccacctccgttccccggccaggggaggagctgctctgggaggcggaactcaagcgcatccctttgtcccactcatcccggaggcctgagatgccacctgtctggcaggtctcccccactgcccctgcctcgcctctggctacaaagtgtgggctctgtcagagcagctggcctgggctggggcacccaaggccttggggagctcggcctggcccctgctccctggagttgaggcccaatgtacctgcagatacgccccagggactgggtggagtcctgatggcactgctgtccagacggtgaccttggcctcatcacagcacctcagcaggctcaggacaaggacactaagcccggctgccccctcgagtgttggagttatcttctctaaccacaatgacaaggagtggccttatttagcactgggcctgtgctgggctctccaccgagggcattgcatgggtgaaccattggagaggttctcccatttgtgagctcggctcagacgtctataggggaggacagaaaggtcacaggaaggacggatgctgctctggggttggagcagaaggcactccgccccacctagcaaatccccagcaacgcagctttggcagctgttatcctgtagaaacgtgggtccagccctgtctgatcttctgattgtctttcaagggagttgaacatttctattttgatgtgaaatttcccaatttgtaaaaatgtaaaacgaagcaatatatcgtggctgaaagccctcagagtccaagttttgttatctgtaagggaggtgtcagaaacaggtggcctagggactagatgcggccagcaaataggttttatctggtccccagataattttacaataatttattatggagtctatgtcatgcattccaaagaggaatataaaatgtacatgaaaggcataaagaatcatgaaatacatatccctgaacccacctcccagctgagaaaatagaccaaccccaagactgcccctgccagcccctccccccgcaccccagagaggtaaccactgtgctgaattttgtgtctactctccccatgctttatatgtagttttatatgtagttttgtatcagttagtgcattcaaggccacacaacacagctctcgctgactcccatcttttgggtccttccagcagcagagcctgagacaagggtatgagggcaggagattccagaaaacaccagctgggcagtgggaagtgagacaaggataggaaggaggcccatgaaaggtgtattatcaagtggtccctgagtggcaactggagctcagtactgctgggggcatctgggagactgggtagagcatgcacctcaaagctatcctgcctaatggaccagggagctggggtatttataccccactcccatcagtcactggttcagggctgctcccaggaagagctaattctccagcatttctggcctgctatttggaagggcagagtggctctagggccagagagagacctcaggaaagggatgcagggcaggcagtggtagtcaggcagatgtgcactgaaggggt

SEQ ID NO: 1881054 - DNA, 4001 bp, Homo sapiens
agccccatccaggagcatgcagagagggacctggagcagatacctcaggtgttggggtggggtgtccagctcacaggcccagcctgggcctcctaacaccaaatgcagccaccaccacccccagcctgctcctcccttcaactctggctccagcctggacattggacaaactccgattgccacctgagtagctggaaaggacccagcccttctctcaagcagttcatgaggaggggggcgggtggagtgtgcacgcacacatttgcttattcattcgacacgcatttgttagtgcctgctttatgcacggtgctaggtgctggggactcggatcttattttgctgcatcagtcctgagaaggactacctgcagggatgtgtgagggcggtgggggcacacagcaggcagatgccaactctgtgtggggtgctcagagctgagcattgcaggatgcgtaggagtttgccaggtacagaatgggcagaggcgtggagatgagaagggtcttggagggtgctaggaagggctggtggccagggtggctggagtgcagggagtggacggggagtgatgggcaatgaatctgaagggggcagggaccggaatgtcaggccatggaactgggacttgatgccgtggcaatggggagtcatggtggggtttacacaggggagaggccaaaagctcagtgtcctctctgctagctcagccccaaacatcttcctctcacctcctgacgcagcagataaggacagcaaggctcagaaaggccaggtttcctgtccctccccgatcctcagcccctcatcacccgtggctggactccctgtgtggcctgggccaaatattcagctcttctgggcctcagtttctgtgtctgtaaaacggggatcatcatggaaggaaggaagagtttagtgaggtaagaaggctacacaagtagcccgcctgtctccctcaggggaggcaagacagactggttccagaccatttgctaccccaggaaatggctgggcaaggtctctctgagagctggaatgaccaggctgaacacagggctgtaggtcaggcatctgctagaacccaggtactagagatcagaatgccctatacacacacacacacacacacatacacacacacccagaacagtggcagacaccccctcccctcctcagatgcgtttcaccaggttcccccacactcacagccacgcgcctacagagatgcaaactcacacacagctcccggtgtcctgcaggcctcagggtagccctggtcccagtgtgctagggacagtcccacctcatatccactgccttggcctaattagcagtgcccctttcttattcatgtccatgtccacaataaactgtctgataaaccactacatagcggacacactggtgttgcctttcctctccagagaggttctcaaccatgcatgtgtgtatgtgtacacacgtgtgtacatgcaagtgtgcgtgtgcatgtgttcatgtgcgtgtctgcgtgcatgtgtgtctgcttgtgtgcatgttagtgtgtgtgcgtgtgtgtgtgccagagacgcctttggcagtctgggcaagcctgtaggctcttaaatgccgattagatttaaattatagttatcagaatactaaaaggggtctgtgacgtggcgctacctgggcttccttcttaacccagtgaatgacacggtctagcagcgggtctaatacccactgcaatttcaaagtactaaggaaggaaagcgagattgcgccatctctgaaatcagtagtgctactatagctcattgcgttcataattaaaggacatgctatgttccaattagagtacaaaagatgttatttctgcccatccacgttcacgcacccccacctcgatttctctccaggtcctgaaagctgctgtgcgacgcggtcctcggacctggccacctgcctcgccccggccgggcctggcctgcactggcccgcaccggcccgcaccggtcagcaccgcctcgcaccggtcagtaccgcctctccgctgtccgctcctgcgcagccgtccgcagttccgcatgccaccgccaggtgtcgctgcacacacgccgtggccccgaggctcctctgcaagccgctccgcgaggctctagggggccccccagggtcctgtttcccgcggcccgcaacttatctgtgcacagagcacccccacgctgcgctaggaacttccgctgctcccccaccacctcactccttcgtgcctttgagcatgctgcctgcagtgcctgccctgatctccggctgggtgattcctgctgcacgtcaaaacccactggaggcaacacctcctccaggaagccttccctgatgccactataatggcccctcttgagtttccacagccccctgtgtctgcctcatcattgcagtgactgccaacatggttgtgtctgtttctgtgtctgactccccactagaatgtgagctttgggagtatggggagggccacgcagtgggctgttatgttttgttttttaagtagacttaattttttagaacagttttaggttcccaggaaaactgagcagaaagtacagagagttcccacacactccctgcccctacacgtgcacaacctcccctctatcaacatccccagcagaggggtgcatgagggacctgcactgccacatcagtgtcacccacagcccatggtttacgtgagggctcattcttgaagctgtacattccatgtgtttggacaaatgtacaacgacccttatccaccattattgtatcacacagaatagtgtcaccgcccaaaaaattctctaaactccacccgtaatcccctgtgctcccttccccctaacccctggcaaccacagatctttttactgttcccatagttttgccttttccagaatgttgtattgttggaatcatacagtgtgtagccttttcagattggcttcagattggctgggccacatggcaaaaccccgcctctacaaaaaatacaaaaatcagttgggcgtggtggtgcatgcctgtagtcccagctactcaagaggctgaggtgggagaatcacatgagcctggtaggttgaggctgcagtgaatcgtgattgcttcactgcactccagcctgggtgacagagaaagaccctgtctgaaaaaaaaaaaaaaaaaaaaaaaaaaaaaaaaaaacagccaaactgttttccaaagtggttgtgccattttgcattcccaccagcaatgaatgtgagttcctggtgctccacatcctcgccagcatttggtgtgttagtgctttggatatgagccactccagtaggtgcgtggcagtatctcatggttggtttaacttgcagctccctaatgatatacctatgtggagcatctttcaggtgcttatttgccatctgtgtatcttcttgaatgaggtgtctgtttagatcttctgcccactttttaattgggttgttttcctattattgagtgttaagagttatttgtagattttggataatagtcatttatcagctatgtcctttgcaaatattttctcccagtctgtggcttttcttctcattctcctgagcaatgaggtttcccttacagagttgaatccctgtgtggccctaggcaagtcatacactctctctgaacctcagtttccacctctatagatggggctgggagccctccctccaggttgtaggtgggaacaggatctgagcaacgcagagcctgccagcacagagcctggacacggcaggggctgccggtagatgctggtggaactgagtcacctccattcccttgggggtgcattttgcccacagttccatcattaaagcccctagctatcaacgatggttccatccatggcagagcaggccaggccaagccagcccacaaatctgtttgcaggaagattcctgtggttggaatcccttggtcttaggaatgggtcagaggagcagaccccagggagc

SEQ ID NO: 1881055 - DNA, 4001 bp, Homo sapiens
tgatgctataaaaaagacatagtaagtgtcggtgaggatgtagagaagctgaaatacttacacactgctgatgggagtgtaaatattatagccacttcagaagacagtctggcagtttctgaaaatgttaaatatagatttaccatttgatccagcaattccactcctaggtatatgcccaagagaaataaacacatatgtccacacaaaagcttgtacatgcatgaataacacaacagcattattcacaataataaaaggtgaaaacagcccaaatgtccatcaactgatgcatgaatacacagaagcagtacatctgtacaatggaatattgcttagaaataaaaaggaataaagtactgatacctgctacaacacgaacaaaccttgaaaacgttatgctaagtgaaagaagccagtcacaaaagatcacatattgtatgattccatttacatgtaatgtctagaatagaagaatttagagagacagaaagtaggttagtggttgcctggggctgggagctgggtggggagaaatgaagagtgactggtaatggatatggggtttattttgggggggaatataaatgttctgaaattgactctggtgatggctgcaaaactctgtgaatatattacaagccccttaattgtacacataaagaaacttcagtgaattctaatttcctctgtgagcaaaaccagtgcaacactaaatttatcagcaagaaaaagagaattcaaaataatatacttaaatagacatatttgggtatattttgtactgttttcatattgataaatttttgatttctgtatttatatagacatgagatttgtgggactgagagattgttagttactcacagtaacaatctcctcagctgccctttttcccaatgcttccctttggagtgatgtgaacagagctggaggccactctacatgtaatggggttggtactgtcgtgaggaagccccaaaaatatgaacctgggagcgtgtataaaatttccccttctgaggatgagaagcaaactgaatctacctaatgtaaacaaattctccttgagaaaaaaaggaggattctgggttgctgctctttgaaatataaatacatgtctccatgaggaaagaagacacaaccgtctctgagtttacaacctctggaatgtctcaaaggctttgggtctcatcccccacttgaaatgaaaacacaaacctcctggaaggaaaatctcttaccatctagtcagtcatcatttcacttccaagacctgtctttcaaccgggtcccagtaaaatttgctcggaaagctcagctctaaccgtgcggaaatatacaagtattcactttctgacacacattggaaacatcgcttttactcaaatacttgtttaaaaggaacatcgatagtgtattcttctttctaaatcaaagtatcattttgaaaaacatttgtctatttagatcagagtcagagatcccaatatatatattatgttatatatatattatattttgtgggaaatttatgaatttgtaaatcatcttgatgtcttcatttattcatttgccgttcctgtaactttcactctacctcacagggctgaggggccgtatatttagtattcagtgctcctgaaaataggcatctgactagtatgtaataaaataccctcagtcctctaataactgaaagttgagattgcctttcatggcagattgtgttttccagaactgcaataatatttcctgtcccacattctcctccagaacctggccacatctgcatcaagaagcagagcctactccccctctttttgaacctacctgggcctttgtgtttgtcttgacagttagagtatggtggaagtgatgctttgagacttcggaggctggagaatgaatggtaatacagcttcagccaggctctctctcacttaggaaacgagcctttggagccctgggccatccgtaagatgttcagctacgctgctgttgctatgctgaagagaccacacagagacaaagaagcattcctagggtccctagaagttccaaattccagctgtttgagtggtcccagcccacatgccagccacgtgagcatcaagcattcagaatatttgagtgtcaaccattgtctgacagcaagtgtgtgagacactctgagtgaataccgcctaagtgagctcaggcaacttcccaaacttgtgggagttaataataaaatgattggtggtattttacaccaccaagtttgggagtggtttgttatggggcaataggcaaccaaaacactctttgattgttaaactagcaaaagcaatccatgaaaggatgagattatctgtagaagtaacatcagatgatatctattaagtgtgcattggaggagacttgggaacaccaaattcaataaaggcaaaatctcaggaaggaaggaacagaagtgactgtcatcatgaaagctgattctctcaatggtaatgtaccagatctgcagaaagactaaagagtgaggaacatgaaatctacataaaagagagttaccaacaagattatattggtttctataccacattgtttaataaagaaagacattgaatctggtgaattatgggaacaggaatgatttgtggaacttttactatgacctgggttgtgtgtcctctaacactaacttctcttccttattctgaccccctgcccaccgaggaagctgattaatgctcggctccccctttaaacctgcccacaaggaaaaaatgtgatgatcacatcagcgcacagtactgtggtgacccaagtggcagttatcattctgttgagtgacacattgtacatcgggtttatacatcagtgccttctaagattcgttaacgtaaatcagtctcctataacgttatcatctcagagtgcattgataaaaattgattttctagatgtgcacatctgacaggtggaaaagcagcctgataactcctgaaaggctttgtcactctggcatctgaggtggtatcacacacagccctaattattcagcttacatctgtttaacagaattgctatttgtaatgattattactgtttagcaacattgtacacaagacattttacttgattaaattaaaatattgaatttatagaatcaacgaaagttttggacccttacattgactagatcctaatcttggttctataataaatgaaactatttctaatttatttttgtttttctatacttttgtcaccttagtcaatggtaacaacaacaacaactaacattaatgtcactgagtgctaggcacactgttcatgaggatgtttttaaaatgtttaatcaatatataatgatatcatcagtgattttttaaaatgtcaggtttttaaggtataatttacgtggagtaaaatgcacccttttaaagtgtacagttctatgagttttgatgaatatgtgccatcatgtaactagtacccaatcaaaatacagaatattttcatcactccgaaaagtttacttgtacccctttgtggtcagtctcctacctccacccctagactctggcaacactgaactgtttttggtccttctagttttaccttttccagaatgccatataagtagaatcctaaaatatgtaacctttgagcctggcttctttcactgagcaagatgcttttgaagttcattgatgttgttgtgtctattggttgtttgttcgtttttattgctgagaggtattccatagtatagctacatcacattttgcttggtcattcaacagttgatgaacatttgggttatttccagttcttggcaataataaataaaactgctaaaaaattgtgtacaggtttttgggtggcatatgccttcatttctctcgggtaaatactcccaagagaaatgggtaaatactcctaaatatttacccaagagaaatgggtaaatatttacccatttcctaagtatttacccaaagagaaatggg

SEQ ID NO: 1881056 - DNA, 4001 bp, Homo sapiens
accactctcagcccttagaggccactctcagctccttcccctggggctgtctccatctcaacaacagacagcttcctgcacattccttctctctcttgctttactctctgacttcctcttctgctaccagccagagaaaactcccttcttttaaagggctcatgtgtttaggttaggtccacctggaaagctttcctgtcttcaggtcaactaattactaacctcagttactctggaaaatcctttttttgccacgtgaggtaacataatttcaggagtaacaccagggggcaacgttcattgggaccatcttagaattctatcacagtgatcttacagaaatttgcttacaacacttttatggtcttcttcatttttgccttttagtgtaggtgatttttgtatatgtcttggctctctctactagaatgataacaacttaagagcagaaaagatgtttttgttctccaaaaattactttgggatagagctgagacacacaaaaaaagagggtgctgaatttcttatgtcaaatcaggcagcaaagatgtaagttacaatatagctagagaattcagattccatctatggaaatcaaataatacaaagttgaaaatgtaggtaaagatgaaacttgacagacacatgataaattgagttgtgaaactaaattgtatcccagttgagatctacaagcttggagtgtgccagggatgaagcaactaaaaccagattataggaggagacttggaaggtattatttggtggcttaggaagtaccattctttaagtaacacctagatagtgtccccaggccacagtccctaccccaacctgagttggtaaccttctgatgatcccaagttttacacaagtaaccacagcaggcccttgatgatggttacttgggtaaccatcctcttagttgggtaactaagtgtccaactccaggaagtatagatttaagtggaattgatttttgcatgtgtaagctattttatagtcattgtgttgcttcatatatgctttatctgctttaagatgtttgaaatggataagagaatctgctttattaaatttgtctaatttattaaatttattagattttcacaaagattgcaaatatcttgcatgttagacttgtaagtttgcttaataggtgtttgaattatttgggagaactggttttcaaattggtaataattgtttgaaatgtctaaaaatatctagttaataaagtttctatatactgttaacatttgagagatctgatccataaaatttataaactaattgagcattaattaaataacaaatgaagttaagtgcttaaaattcttacaccattattagatttgcaaatatagcaacaagatttgtgagttaaaagtaaaggcttataaaaactaagttataaaatttataccttttgtcagttcaacattaacacaatcataagaaactatcagcattaacttctgtgcaagaaaaaaagtcacattttgggaactaaaaacccaattaccattattaaacactgaagagcaatataactgaaatggagatgaatcatcatagctatcatttattagttccaaccacataacagttctgtgataagctctgcatttgtgagtttgttcatttgtttgtttttgaaggtcagagataatataactaaagtatcttgcctcttaagtatatgttaaactgaactgacaatctttttaaatctaaaaatattacttcacataccaatcacagttcctttgctcacaggtaacagaaaatcggtctaactgtttaaatcataataacagcaacaacagtaataatataaagattttgtggttcaagtaatttaagaaacccagaaatggaaggaggtgtactacttacttggatctcccttcaaaaaagaacaaactatccacgtgtgcaggatgccggtaactgacagccgccagccagtgggcattaagggtcctctacagtgttgagttggaacaacagtgttgagctttctcgacagccctggcgaataagtacagtgggagtactagtgtctgggcatttccgcccattgtcatactcttccaacaagcagcttttgctctagatctccctttggtgctggcagagactttatgaaatctgcatcacagtttgaggcccttcctgcccaatcctgcggggtttccctttgttttcacaggtgtcaggcctggatcaaggtctgaagggttttgctgcccatatatttcctgtgccttgcttttatctttcacaaacattacctcaataaagcttggacactggtaattccatctccatatctgcttaccagatgacccttcaggtaagcttgctccagcagtttaatgatgtcccaggaccgacttcctttctgtgtctcagccttccccagtggcagaatagccctaaaactattttgatagcttcaccatatcaacatagttaccagaacaactggggtggttgcttcctgattcacaaccagtggatgaagggagcatctttttttagcatccatgaaagacagaataattttattctccagatgctccccatcaaacatcttctctctttttgacaaagtttggatcataatgccatcccaaccactgtaactagggcccatccctggagctgctgtgagattagtcccaaccaatctgcatgtccccatcagaaagggaacagagagaatgaatgctggggaggcaatcactaaatttccatgactacgaacataagcatcctcaaacaatatcacaccacggaattagtctcatgaagacaccgctgctactaacaatgtgtatagaaattggagcataaaccactaagaatacaggctgtagaggccagaaaccattggaactgcaccgctgcagtttctggaagctgaatgtcctgttgcttctgttcccggtgttgccagagtagactctgtagagttcttccttcttcaagtcactgtatttaattcaaacacgagctggtgcatcctgcaggcagagcctacagcttgagccaatgtactggtttcaggagaagcaagggagaaactgtctatttcatcccagagtgggagaatgtcacctgtggcatcacatgcagaagattccagattctggattcttttgcgtttgctttagttctgctaaagtctcctgtgtatgatcctcagaaagacatatgagggttttcctcagaacctaaattctgtgagtaaagaatgcactagtgctgaaacatttggggcaagaacaagcatcagtcacaaccgtcaacaatcactctcagttttaacttctttggggaagctggttaccgtacttaaaacacttgtattccattttgttttgttagtaagacaaaaatgtattgcctttattaataccaaacccgtagactttatacagaatagttgcactattacctcactatgcctataaacattcatcctggaaagattaaatttagaccagcaaatgtttattcagctcataataaatgcaagaccttgtgctaggcgctgggagatgacaaatttgtcttaaattgtcactgtggtgactacttagtcattattttaattccttcatcatggaaaaattgggtattaactattcatgatctacttttatatttcactgtcaattttccattatttccaattctacagaacagctgcataatcttcacaatacatttttagaggttaatcttactataatttctcttttgttcatatcacaaatatcattttggaatccaaggcaatagattatttgaatagaaaatgcagctattaaagatgtaaattattcttatactcaagttattactattatttttgtgacaaaggaatgttagaaattcacaaatgtttgtgtatgttttaaggggatatactgtttatgcttgcgtttgatgctaacatatttagtaagtgtcaacagcagagaagcctt

SEQ ID NO: 1881057 - DNA, 4001 bp, Homo sapiens
tattcatcacaatgactatatatatttatttttaatatatattttaatataaatatataataaaaatatatgaatataaatatataatataaatatatatattatataaatatatataatataaatatacataaatatatataatataaatacatataatataaatatatataaatatatataatataaatatatataaatatatataatataaatatatatataaatatatataatataaatatataaaaatatatataatataaatatataaaaatatatataatataaatatataaaaatatatataatataaatatataaaaatatataatataaatatataaaatatatataatataaatatataaaaatatatataatataaatatataaaaatatatataatataaatatataaaaatatatataatataaatatatatataaatatataatataaatatatataatataaatatataatataaatagatatttatatttattcatcacaatgactatatatatatatatatatatatatatataaaatatatacatttgaaatatagtggtagaaccctgtgggagacacagaagagattggtccatggacaataagcttatcgatgggtttgaagatcatctcgcaaaacctctctgtctccccaaaagagcctcctggtctatgggtggggatccactgcattaatctgtgcagtattcattatcatataggaaggattcatttgacagacaacagaggctggagaatcacacccagacagatgcgttgtgctggaacctcctctgctcaaagctcaaagcagacccacagaggacggccccacagggacctgaatgtggattctgcaggtacctttgagagggcgtttaacttacaggagggctttgaagactaattttgctgcctcgtggtttgggtttgtttgtgccaacattttttgagaatcagcagtggaaatgtaagaaatgcagtcctgattttaggaacatcagttttcttgctaaaactgcctggagcttgaaaactgaggcccatggctaggatgtggcaaccatgcagtgcatgttttgttttccagctgagcctagggtgcagctgatcataggagggacttgtgtggacagagctgagggcgccctggggagcacagtctgcaaggagaaaagagacatttgtttaatcttgtctggggacggaggctggaggggggaagctccaaaatggcagaaaggaagatatggaaaaagaaataaccagggggtctgattccagcccagcccagggactaataataaaaactcccacttgttcatttggtcagggccaggcactgtgcagcctcttgctcggtcctcccaacaactctgtcgcaggtacttttactatccttcccattttagagaagaagaaactgaggcttggatggtaattttcccagagtcacaaaaccagatctgttgttctttgaaagctgacttaaaggccctccagggctaacttttagtggcatgtttccgtatctgtgggcacatgacatagctccagtgagtgaaacctgaaggggacactttttttggcacctcaacattatcaactttgggagttgagtgaatcaaccaacctcaagggtggggcattattgtccttgaggaactaaagtgcacaccagctatggaaacttgagactccgtctcttcgtctgtaaaatgggatgacaatgcctcctatatcagaactgacagaaaacacagagttaacagtagcctaacaggagaagtatatttctctctcacataaacagtctctggaaattatagtccagagtttgtatggcggctccgtggtcatcaagtacccaagatttctatatttttgttctgctattgtcaccacatttcttccatctcatagtcctaaatagctgctctagctccagccactgcttctgctttcatccatccggaaggcggaaggggcaaagaaaggcacaagcccctttaaggtcacgcccttcctggaagttgtacgcgacccttcagttgacatcccattggtcaaattcagtcacgtgccaaatctagccatcagggaagctgcgagaaatgttttttctgggagaccacaagtttagctaaaagccaggagttccattcctaaaaaacaaggggagaagggctgctgaggctgcagggaagctggaatgagttaaacatatgtaagttacccagcagggggctttcctggcacttcgcggacagtagataaacactagtcataaatctttctttccttcctctgcaagttttctgccaaaactttccaatttggtcatatctacatttacatatggatagcaagctgatcaggcacttatcttttggtgctcttattattttctaatattttgtaatagaaattttttcatgtagcattaattttttttttttttttttgagacggagtcttgctctcttgccccagctggagtcagtggaacgatctcagctcactgcaacttctgtctcctgggttcgagcaattctcctgcctcagcctcccgagtagctgggactacaggcacacgccaccacgcccggctaattttttgtgtgttttttgtagagacggggtttcaccatattggccaggctggtctcgaactcctggactagtgatccgcccacctcagcctcccaaagtgctgggattacaggcgtgagccaccgcaccgggcccatgtaccattacttttttaaaattccttgctgtctccaaagatttcttagtaagggagtggtctttacttctaaagttgcaatacttggctttctcccctttcccgtaatataattaatgctcatcacagagggcaaataaaaatgacatcagtattgtaataaagtgtgataactgagaaagcaaaacaccatactcatcttttcttggccttgggataactactgatgctcacagcacttcccaaaaggcaaaatagggtctgccacacacaggctattagagtttgggcaagtcagtttcctgctgtaaacctttatttactcatctagcagatggggctgtgaggattaaatggaatgattgatggaaggaaaacgctcagcagacggcctggcacattataagccctctacaaagggcagaacttattgatttgtttatttttctatccaaaaggatattaggcttggtgggagatttttatcaaggcttcaagctcatgacattttgcttttgttataataaaacataagctcttaaaaagctttattcattatatccccaaactggaaacagtccagtccatcaacaaaagaataaagaaactctggcctattcatggaaaagaatactgctcagcgatcaaaaggaatgaacatgggtgaatctcaaaaccattatgccgagtgaaagaagccagacgcgaaagagcacatactgtataaatccacataaagttctataacaggcaaaacgaatctatgacagacttttaagaaccaggatagtggttgtgtctggagggtggagggagtggattactgagaaggaatctgaaggaactgtctggggtgatgataatgttctgtacctcgacagagtttgagatgcatttgtcagaactcatcttatggcacacttaagatttgtgcactttatcatatgtaaattttacctcaaaaggcaaaaagaggcagaggactttgagtagacatttctccaaagaagacacacaagtggccaaaaggcacataagaaggtgctcaacatcagtaatcattagggaaatgcacatcaacaccacaatgagataccacctgctatagttgggcttgtttgacccttccaaatctcatgctgaaatttcactcctccaaatctcatgttgaaatttcactcctccaaatctcatgttgaaatgtgacccctccaaatctcatgttgaaatttg

SEQ ID NO: 1881058 - DNA, 4001 bp, Homo sapiens
gaaagggctgccaatggaacagcaagccaaggccgatggtaatgagtcaggggtttccgtttctcatctcttcctctgaagggctcacctctccaggagggagggctcacctctcgcccaggcaactgtgctggcctccagctgggtcccccgactccaggctgtcccccttggatccgtcttctctgttcagagtctcttatctctgtgctgatagtagacctggtctactccccattttgtgttgcttccaagctcttgagggagggctctttcatgcagaggactgggtagttgctctgtgaaatgtgtggaacaaatgaataaatgaatgagaagagaaggggataattttgctgggcaacaccctccatcagtggttcttggtctggggccacatctgagctatctgtggatgttttcaataatatccaagtcaggactccactgcagaccaattgcttcaggaactagagtgaggcgaggacagctgtgtgtttgaaacactccagctgattcgaatgtgcatctctgtgtggaacagctgccctagattggtgggtctcaaacttgattgcacattggaatcatctggaaagtgttcaaacactttttttttttttttgccccaccccagtttctgattcagtaggcctggggcagggcccaggaatttacatttctgaccagtttccctgcaattactcatgttgtgggtctggggcccacattttaagaacaaacacccaagatttttcaacagctgtaatgctttgtgttaacagtactcagtctttagctgcatattaaaatcataatgggagctttcacaacatactgttgccagagtctcactgtagctcattataactgaaatatgtgggaggagccttgggcatcttttgtttgtgaagtttccccaggtgattctcaagcacagtgaggtataagaaatgctgctctagatttttgccactgaaagcatggtcctgcgactggcagcactggcactatcattgtttgggagcttgttaaagacgtagaatctcaggccttaccctggacctactgaatctgcattttaacaagacacgtgggcaacaaagtttgagaagcactgctctagagagctctcttcatctcctatgctcaaagaatgatttgtttcttatctccaatattacagtgcaaattccctcaggataggcttcttgattaatttatcctcaagcctacagcacctaacacagtgccttttttcatacagaggtgctcaataaatatttttgaatgaatagattttcctgtgagtgttatctccaaggtacttacacacttttcttcttcccaccatctgctcctactaccttccaggtaacatatacctcacattgtcatatcactttaatcacctcctggtagactttgaatgttttcactctctgaatcttatgttggaatgtgatcctcagaattggaggtagggcctagtcgggggtgtttgggtcatgagggaggatccctcatgaatggcctggtcccttcctcatgggaatgagtgagttcttgctgttagtttacaatttaaaggagcctggcacctccttctctctctcactcctcctcttgctatgtgacatgcctgccccccccttgccttctaccatgagtaaaagcttcctgaagcctcactagaagccaactatagccactgccaggcagaaatgtgagccaaataaacctcttttctttacaaattactcagcctcaggtattcatttatagcaatgcaaaacaatctaacacacccccaaacctaacatcattaaaaatatatctcatgggtagtaatcattttagacttgcttggtatttcaaggaaaaacaatctggactccttaggctccatttttctagaactcgttgctacccaaaggtttgctgtgtgggcccaaggctttggtttcatctgctctcacataatggaagttaacattcttctcagaatttccatcaccatggttactggcactgagtggcttcccttagaatctcagaaacattcctgtaattatttttttctggtaatgtatagaaattaaaacaaaaattaaagatgccctatcactgggcactgttcatttgcctcaccacggtagaaatgttttacctttagagccattttaatgctcttgagaaatggtcaagttgaacatctttgggaatgagtcaatctcaggaggcttctagaagccaagtgtggtcagcagaagaatgcccctccaagtcccaattagtcctaattattctacatcttaatcatcccccgcttcccaacatgtgaatattaccttatctggcaaaagggtctttgcagatgtgattaaggttaaggaccttgagattgggagcttatcctagattatcccagtgggcccaatgtcatcaaaggagttcttaaaagctgagaatcttttctggctatggcaaaccagagagatggcagtgtcagaagagcttgacctgccaggaatggggaaaagggaccaggagctaagaaatgagcatagtctctagaagctagaaaaggcaaggagacagattctgtcctagggcttccacagaggcaccagccctgctgacactttgattttagcctaatgacacctgcgttggacttttgatctacagaactgtcagacaacaaatttgtgttgtttgagccaccaagtttgtggtgatttgttatagcagaaatagaaaactaatgcagagagcaaggcacctttttgtttctaggtatgtttggaggtaaagaccaggttacaagcatccagtgacaagtctgttttgttacattcttttgcatcacatagatcgtctcagttatcagaaaatgattttgtattttggcataaactctgtttctaaaatttccatccttcccctcccttgatgtgaagtaaacttcagaggatccggtgtcgggatggaagggtaatgaatgtggcaagttgtgtttgagtttgaagagtatagatgtgcccccaaatatctactctcacccaatgtttgaaatttcattattagagacccatggcttgcatcttcttcagttttcctctattacaggcacttatacctccagagaggtaactgctataagcccttgtaggagaatttggttactttaccactccctgtgggatggatatgagatattatatgggaaaggcaaaggaaggagcaaccttcctgccatcatgaatttttttttttttttgagacagagtcttgctctgtcacccaggctggagtgcagtggcgcaatcttggctcactgcaacctccgccttccgggttcaatcgattctcctgcttcagcctgccgagtagccgggactacaggtgcacgctgccatgccaggctaacttttgtatttttagtagagacgggttttcaccatattggtcaggctggtctcaaactcctgacctcaggtgatccacccacctcggactcccaaagtactgggattacaggcgtgaaccaccatgcctggccaccatcatgattttgtcaagaactatttatctaagatagtcaaggaaagttaaatgagatgctgaaggaaaattgtgtgtgtgtgtttatttagtgcctattcagtgccaggtgttttatttaggctactgcatctagcctttcaacagttctgtaaaatgtcaggtgaggggttttcttttacactacttacaagctaataaattaacctattaatgtttaaaatgtattttccagcgagtattagtctcttatttctgatgctagccaaagacctgagactcctaggtcagagacaaagaactttattactcaccatcacagcaaagagcatcagcatcagctccctttgctactaagattcaaagggcaagctgacacagatccagaggtatactatacgcacagtgggtttgtgtcatagccaaggaacatt

SEQ ID NO: 1881059 - DNA, 4001 bp, Homo sapiens
tctgatttagtgcagtccacattctattgttgcatcttacatgatgcctgcaaatacttttatgctttcattatattagagattgcagacttttaaaaaatttacctctagtgttcccataagatggtcacactgtagaacggaattcacttttttgtttaattttagctgtcagtggagaaccaggcaattgacacactactgaaaagaaaagagaattagaacaacttgcctggagttaaagtcccttagttaatggataagtcaccaacacacagttctttaataggcagaaatttcaagtcacactgcagaccatttatatttctatcctgtgttgtatccatatttcatgtaaaatatgaagctaagttggcagagattcgtgtatccacactgaaggtccatgtttggcaaaagactataccgatggcatgcatgctttaattgatgccatgaaatagccctttacaattggtactgttattctagggctgctttttctctttatacaaggtgggaccatgctttccaaataaaactcagcattcactgacttatagaattgtagttttgagaaccacgctcaaacattgtcaaaaaattctagggcatgtaccttttaaaatgatctgttgtgttcttttcactttccattctcttttggtgcatgctgctgctactgtttgctgttaaatggttgctggtttcacttcagatgggtgcaggtttgagttaacgaaggtaaaagctaggtcatttgagaacaatatgacttttctgaaagctaaatcatagagaaactgccagatataaaaacagataaactatacatttaaaaactcattttaataaaaacatattatgataaaaagataattccagtctgtttgattctagagtctattctcttaattatattgttaagcaacaaaatggggaaggaagcaaacttaagttgaactttctgagcctgagtttcattttctatgaaataaggatagtaatatctcattgaattgctgtggggactaaattagataatgtatgtaaaatgcaaaagacaatctataaatgtttacttctctcctgccgtccatctagctcaaacttgcactagaggtgattaggtatttagagttcaaataactgagttgtgatgtcagcaaaatcaaaattaagcagactgaatttccagatgtgtccaaatgtcaatgaaaccaatatttaagcagagatctactggactgcgctgtaactccataagccttgaataattgaggattgactgtaaactgaggatctgtgttctgcattatgaccttgcattaacagagactaaacaattgaaggtttggaggtaagtgaaatagcctggtgcctgtaatatttcaggaggaaatgcaacaatataacaagcaacacaagtactgatattaattgagaaaggtctcatttatctctctggaaaatttctcccttcaaatgccacttatcacgagagtgtggattctctgatgtattttagtgatcactcagttatcttcagtacttgctctccaccctggtcttataatacagacttttctgcgttttcagttgttccaggctctagtcacatctcagttatgtgcaataatagtcattgtggagttgctgcaaatcaaaatttcccaggtaataccaagtctcatttaacttccagagccatccatcaccaaacattttattggagaaccaaaaagggtggagtaggggagctgagtgaatttctgagtctgctggagttgataactgtaagtgtcatggccccagtattactagccatagatagagataatttaaaaaatcatccctgtaaccctaggtactgattatctattgctacatagcaagccgccttgaaacacatggcttaaaataacaatttatttttatatctcacagttctgtggcttaactggtctcagcttggcatctctcttgtagttgaagtcaaatagaggctagggctacattcgtctaaaggttcagttgagttggaatgtggcatggctggcagttgatgatgactgtttcctaggagttctgctggagctacatgcctgaacaccaaccaataaccttttcatgtggctgagacctttcatatggccacagtcctcagagacagcatcccaagagtgatccttttaagaggctcaggtagaaattgcaaggtgtttttacagtcttttcagaggttggagtgtcacttctgtcatattctgctggttcaacaagccagtaaagccaagcccagagtaaggtaataagactccacttcttgatgaggaaatgtcaaagtcatattgcggaacagcgtattagataggagatactatggtgatcatctttggaaggtgcaatctgccacatccagttcttctgttccagatgccaacagagctcacctgtatccagaacactcctgggctctggctggtttaaatactttctgcatttactggtcaactcagaataatttataattagtaagatgtatagaagaaatcagaaagtatcaattttcataacatatcatgattctttcacaaatcagacattcttgcattcttattcttgttgccagtgttttgctccatatgacattcacaattctgtattcatgtgtactttggccactgaaatcctgttgtcctctttacctctgcgttgacctttttgtgtttcagatgcttgacttgctcttgatccctggtacccaagactttcatcacctctgctttcaaagtttggcctccaggcctttgaactacctctaataactgtttttttttttttttttttttttgagaggagtctcgctctgtctcccaggctggagtgcagtggtgcaatcttggctcactgcaaactctgctcccgggttcacgtcattctcccacctcagcctcctgagtagctgggactacgggtgcccgccaccacgcctggctaattttttgtatttttagtagagacggagtttcaccattcacaggatggtctcgatctcctgacctcatgatgtgcccgcctcggcctcccaaagtgctgggattacaggcatgagccaccgcgcccggcaataactgttagcttagcttccgtagctgctgcctttaccacttgacgtacagataattgatgcgaatgcagaggaaacctgaatgtttggctttcctatcttgaccccacttctacccagtcctttttaggttttaattttattaacttgctcccattggtgtctccttcccatcaggatggaggtatatttatgcctaaaatctgaatttttccccttcacggtgaaaaacaaagattccctgccacatgcctttcgtataagagccctaagacttagtgttttcagtcttcaacatctcctatattattaggctattattctctctgaaggctatttctgtactttaattcaggaggtatatttgctctagtctcagtcatttagtatgtttttgcagggattcagcaaaagcctcttctattcatttaacatattgaaggaaatacttttaaaaaggaagataggggaaaacccaagagtttgaataagtgttttaatggactgaaaataactgatacaaatggaacataattggattaaatgataagaatccctaacctgtatcgatcactcatgggtctctaattttggcaagcgatgatagttaaaatgcattggtaattggtaataggagactagattatttttcctaggaactgaaaatcgtgtagaatatatcttttccaattttggaaaattggaaacatttcaagttgtgggtaacagttttcttgacgttatttcaactcctaaattcaatctgaaagttttttattaatcatttatcatgtcttaggccactgtaggtgtgtgtgactatgtgggtaagggacatcgttaatagattgacaatccttgccctcaatga

SEQ ID NO: 1881060 - DNA, 4001 bp, Homo sapiens
acacaccctactaatactaccaaggcagtattttctatgccatttcctctactttacaattttctcagcggaagagacatcagcaccagaaaataacattcaagccatttcttactagaatccaattacctgaagaactcctctttccacagcaagtagcagctatcccccggtctacaatgacacagcagggctgcaaaagatttgtagggctcatctgctgccaggcacttgatccctgccctcctagaaggaggatgccaggtcaggaggaggacctccagcttagagcggggttaagcagggcactccattctgcaaatgagccaaactttgctcccattgttatctttaggttgatgtcaccaccctccaaggagtctcagaagccacttggcagctcctaaagaaatgtttctcttagacccatatcatccaaataagcctcagttagactgcgagggcaagcaaaggtctcatcactgctctactgaggtgctgtgcttgcccagagcatcacaccgcatgtaccagacgacttttctctgcacacaccgctgaacactgaaaccaggacagacttctgcacataccctccagttcggaaagtcactatcgcccatggattcccttaaatcttaagccttcttcacatctgccacccccacccccacacaaaccagggaagggggttggggagcggaggggttaaagtgacagccacgacagcaactccttggttttgttcaaaaggtatcacagcgccaacactgtggacctaccttgctctctcctttctcgccgttgggtctcgtctcgggatcgtcgctgtcctcagcgcctgcactctcgccgggcagttcatcctgagccagctgctgaggcggcggctggggctggggcggctgtggcggcgcctggcaggctccgccagccccctgggagcgggggatgggctccgggcgcggagaaactccctcaacatccatctccatcttcccattcactggagggcaagacaaaagcggagtggagacttggcagcggcgcccggcagctactcagctgcccgtggcacgcatggctcgccgaggaggggccgcctcccgcgcgccctcccttctgccacccttcgcccccgctccccgcagctccgctcgcctgcttggctccggccctggcggcgtctgggccggggtgcgcgaggagcgggtggccgcgtgtccttggagcgctggccttcaggcgcccccggcagtcccgctaagcagagcgcatcccggcggcggcggcggcggcggcggcggcgcctcccagccgcgctcccagcctcagggccgcttgggtacttgctctccagcccggcccacgctcctagccgctttccagcgtctcttggggccccttggcgtttctcctccctaccaaccttctgaacaaagttgctggaagaaccaacctggtcgccgggctttgcccggcgaagctggcaagaatagggactctcaggtgcaagtgaaatctaccttccccgcccgctgaccaagcgccgaccctcagccttaccccctccccaacgcaaaggagccaaggaaaggagggatctccgacctgtgcgaggtggtggcggcgaggactagaaagagaggagcgtgcggagggctggtgcgcccacccccaaccccaggtgacccccgcctccgcgctggccctggtcccctccctctcccggccgagcgcgcctccggggtcagtccctccgggctgcgcgtgtgtgtatcccagagctccgctccggggtctgttctgccgctggcggctccgcgccgcacagccctgcactaaagaactggagtagagaaggagaagccaacggcaaattccgggcaggaagtcgacctacccttgcctctggccaggtcgcaggttagaaccgggaaggggtggggcccctcggggacagcgaggacgcgagtctcgcggcgcgccggagtttggcgtaaaggtcggcaacagagggtcgatggggtaggaggaaggagaagcgagaagtcgctgccaggcatttactgcaatgtgcccggggcgggcgccagctgggcgccgtctctttttggtggtgagttctgtgctggaagagcgtcctcagcagggcagggctccaccaggaggcttcggtggtgaccccagggcaggcagtgcgttgcgtctataaatttaaatagagatggcgagggtagccttggaaattcttaaatcagggttcaccactagtcaggtgaacaggatgacttctcaatttaacaccacttgatcctgggtagtagcttacaacttcatgggaactgccactgcaactctgcacgtccaggagggactttcaagcagctctggagagaaatggcgggttatcaagaacctgttcaatattaaatagagcccattattctgggctttgaattccataatgctcccaaatggatcagcagattaatgaactattcatgcgtttcttggcagaggatggcttttttcccctagcatgtatcacagatcacacttgcttgatgaaactggaaaattgcattgctcatcccatgaatgctttgcattaacttaaacacaacttttacatatcaagacacactgtcccattgatgcagttacacaagaacacatcattaggttgtatccctcaatgctatcttttaatctgactctgcatgtgtgacagaaattaattgccactttcatcagtgtagacaaccaatctgggtaatgcaatgtgaacaagtttttgaaaaagaagaaaaagtttagggaccaaattacccattctctttttcttcagattttctaaaaatcagatttcaagttcgttttctaaattgggaattgttgaaaatagagtgagctcctccccagtacctggtaataaaccaacaatcattatagaacgtttataatggtaaattagattatatgtgtaatgtgcttagcagagtgtctttgtgcatatcgagcacctaacattgttataccgagaacagtaagatgatatatgttcacactgagtgttcatctgaagaccttgatttacaaaatagaagctaccggtttaaatcacctttatttaaatttcctaaaagatatttggtatctttagagaatgaagccccttctgaagacaggaagaaagtcaataatattttgtgcaataaaggtttgaatttgtcaggtttttgtttttttttttttccctacagtgtagcaataaaaatcacatgtcagttcagacagcagcaggaatagctgactggtaagttattattcttccatgcttgctacttccaaaatacgtttgtgaacttctttcaaggcttaaatgaagattaaatcaaaataaagatacaatacttcaattaaatttgtcctaaatttagacatgtccttttaaagattcttattgttaaatgcaaatatttctcctttcttctgcccctctatttttgggggacagttttttttaagcatctgtcacaagtaaatatggactcggaaaatatattacatttcaaaactgttgattgcacctaattatgcatgtaaattgctacttcaagcatgaagacagcttgcaacattttgaaaattttgccctactagtcatctgaggtatttgtgttactattttgcagttgccttaaatgactcttcatttctcaattaactttccattaatgataggtctatgaataattttgacctttggctttctcttcccaaatgatttaaattagtaaattagcactttcaacaacatcacccttcttcctatttataccagacctcttgaatttttgagtcactgaaattggagtttacaaaaaggtgtcctgggagagtagtcactcttaactccttgctactaagtatgatccatgaaccagaagcttcccaacatctgggagtttgttagaagtgcaaagtcttgggcccta

SEQ ID NO: 1881061 - DNA, 4001 bp, Homo sapiens
tgtggctccagtctcctccaggctcaagtacagtccacagggagccctgctctgccagctctttcccgtctctggggaggcccagcgctagcagggtgggagacagactgggaggacaggcagctgtgcatgcccataaagagaagggctctgtcttccacagaacattcgtgctaccaaacgccttttccacttccatgacagagatggctaatccatcccagtactcaatttcagaagccatctggccaccactacacagcccagattctcccccttctcccctagaccacctcccgtgcctcctctccaggcctctgcctccatcccgacagtcattccccacacagcagccagagggatcttttgagaaggtggaggcagcctctcctcctccacagcctcccactgtccccagcatagagtctacactctgcatagagtctacacgatgctctgtgacccctcccctccctcttctcctcgtcctggattctccagcagctttcactctctcacccgcacttccccagcccgggctccttctgcagggcctctgccctcactgatcccccttctgaaaccctcttctcccagctctcgcctttgactaccttcttattctgtcccccaaacccactcatcctctgagggccacagtgggcacctgggaagtggcagagccaggattggaaccctggcctacttctagactcttctgtgttgtcagccatgagcacatggtcctatgatttaaacatgtttggggccaggcgtggtggctcacacctgtaatctcagcattttgggaggctgaggtgggtggatcacttgaactcaggagttcgagaccagcctgggcaacatggcgaaaccccatctctacaggaaaaaaaaaaaaaattgctgggtgtggtggtgcatgtctgtagtcccagctcctcaggacactgggtggaaggatttcttgagcctgaggggcaaaggctgcagtaagccataatcatgccgctgcactccagcctgggcgacaaagcgagaggctgtctcaaaaaaccaaagcaaacaaaacccacaaaacaaaacaaaacatctttggccctccgttgccatactcgatgattccagaagcctcttacttccattccctccttgggcctcagcctgttctgtatgacctgcccagagtcactcagtgagagtctctggagccagagggctccctgacatgaagggatggacctgctggcaccttgcctggcaggcctcatcctggccttggaccatagcccttgatttcccccacccagctacagctcctccgtcctccacagaatgagcccaaactcccacctcttcatggacctgaaggtccctggggtcttaagcctgggttttagtcctataccccaccgccaccccccttcaagcctggaggaggggctgggctgggtcaggggttctgactcacctgggcaccccatctgctgacacggaggtcatccctagagagccaggagaagacactcaacagcccagggaaatcaggtgtgctgcatctgatgtcctcgggcctcagaggcaggcagaggagaaggggaaaggactcagataaacccaggtggactgggttccctgctccaaagccacgggtgagggctacaccctcgcctcttgcatccccttccccacgatcctcagcatctctgccctgggatgatctctcgcctgccttacactccagggcttgtgggctgcacgccatgagcccacctgggagcctgagggatgggagccagggctttgcaggagcaggaatccttagctgcatgcccacgtggccaccatggcactcttggccccctgctcaaaatttctgatctttcgaaggccacctctgccaggaagggcctggagcccaggtggtttgagcaggggatggggagggggagaagacatctcgggcaggcatttgctcaaccagagcaatggcaagaagtagtgatggggctgggggttgccctggttctatctttgccaaaccaacctatggttttttgattggcagagctggcagtgggaggttcctgacagtgaagacagtccaacctttgaggcggggagggcaaaagaggccaggagttctcatggcacctcgtgggcggatgtgccaggggcttaattgcctcattagcatctgcctgctgcctgggcctgtctggtcccctccctgcctgcccacacggccccgtttttcaggaatccttcctatgaggcattgatggtgacagtgagggtgaccatgacgaagctgggaaatggcttgggagccggctggcctggcccaggtgcagggttgctggcttgaggcctcatagcccagcaccattccacgtggttcagctggccagctgcctgccgggacctggatgcggactgttcccaggtaggcaacagcaggaaatagtctaaggactccccttcctgccctggccccacccagcctgactccggccacaggcgcacatgcttcaagacttggatgactcccttcctgaaaagatcaggccctcgaggagggaggagttcaatggctctctcagggctcctagtgggccctccaaggtggggacaggatggacaagggcctactctgcctgggcccctgcccacctccctgcccctccccgtggcttacgtagtctcccagcagaggacagcactgccctgacacccatctccaacaggacaaccctctagcctgagccctaggagcagctgagcccagggctggtgggctgaagagtgttgggaggcatttggctggagctggagacctccccagagaccctgaagcatcagccagcccacagccccaaggcccggcccaagaactcagtctgaggggtagctggattccccaggccatgggcactacccagacttggagctcccaggaacaacaaaaaggcccaaggagctggagcccatggagctggggaaacacagctctgctgcctgcaacacacttggggggcctctgcagtgccccagcccctgggccttaatctctccatctataaagcagggcagtaccttctgcctcccctgactcccagggactatggggcagccagggaagttccacattgggcccatcagagggaaaggaaaggcctctttgtcctaagtggctgggtatgggccctcgactacccctatgcactttgggcagcaggagtggccttggcctgacccacctgtgccagagaaggtcaagtgctgaccacctggcaggccctttgccaggcatagcaggacagccctatgtggccctcaggtgaccaaggtgtgagtatgccatgtgtgttgggacagggcagggataagattgggttggggtggagataggggagcctgaccaagacacttggctccaattttgaccaccactggcctcccctctccaagcctcagtttcttcctctataaggagtccccagatcccgggctgtggagaaccgcctgagctccacctcctatcaggtcagcgttggcattagattctcatagcagcgcgaaccctattgtggacagcgaatgagagggatctaggttgcatgcgccatatgagaatctaatgcctatgatctgaggtggaacagtttcatcccgaaaccatgcctccagcccaagtccatggaaaaattgtcttccacgaaactggtccccggtgccaaaaaggttgaggaccgctggtctataaaatggggcttcagtctaccaggcaagagtgttgcaaggcagcagatgagctatgtaaagagcctggtcctgccttctgctcaacctctttgtgcccagaaagtagagagaggacctaggggtagtcaaggactccgtgtgggaagccccctggagcaaagggatgagagggggcctgtgagcagctgtgccaggcagtgtgggcagacggggctctaagcagagaggctggcccc

SEQ ID NO: 1881062 - DNA, 4001 bp, Homo sapiens
attttatatcaagcgggtacctatttctaaactttttagaaaaattgcatatgttttaaagttaaatttttgcccttgggaaagggtttgttctgtttcaaacaggcagtgtatactcttttcatacatgtttttgtttgtctttctggtttctcggcatcctttgagaatttgaccctgactctgaccctgtgtgttctggagggacgtcaatcatggaatccagagtccctgaccacagcttaggtaaaggactgaagatttgacttgatgacaatcagaatctccctccagaattttgaatcttggggagtcacatacatgaggtggctgaggatgaaagacctgattgcagaatcatggagagactacttgtgagttcctgccatcaagacccctcaggatgcttatccatgtcttttccaaaacctaaaccttaagctctaccttcaattccacaaattgtctagtatcttcttacttgtctgttgatttatctgcctattgcttaagttactgcaatgcatagctgttgcttgcaatcaaagaactctagcgttactcaattactgagtagggatgtaatcctgagcaagcaagttccttcccctctttgaacatcaatattcttatctgcataatgagcatgataaattaggttggatgtctctgtacgtaaatagatgtgagaatataaaggagatgatcaacacatttttttgaaagaatcagtatgttaagctttgtgctaagcccagggaaccacaaagataagtgagacagtgtgttaagattccattctgttgttctgggcatctaactttttatataattaggatagcagccagtaattgaaaactttctctattgaaataagaaattttaccctacagttggacagaaatggtgggagaccacaaaagggctcataaagggagatgtcttgactgtgagtatctgctgcaagcaagccccttggcacctatgagcaccctctgacatccctgatgaaaggatgagcacattgttgctggcttgctgactctatagtcagtgattctttttcccaagaacagctcctagcacatatctcaaagccttgagccttgactgatcaatgcttggctaagccagggcagtcactggtggtttggcacagttttattcttggcactgacaccaatgataccttgcagatttcaaagctcttacacacagctagatacttagcctgaattcagaaaataaagtaagaaatgctccctcatcaccttttctattcttctatgcagaccccaggtaataaccactgtgagtgtatagttgaaaatgtggtttatggcccagaatcacctcacctgacatccagttctttatgcaccgtcagccttaagagggggaatatataagactgagcttttcttctgaattaaaaagaaaaattaagctatattgaacatcatattttacataccttttcttcttttaactcacaagaacccagtaatgtaagcattattactacagtgtttcagttggggaaactgaggcctaggatgtacaaagaggcaatacaaagattcaaatccagattccctgatgccagcctcttggcttatcttaaccatcacacactctgcctcttgcctctcttcttggtaatgggaagggggtaaggagatagctaaataatctgatacaatattaataactgttcttttgtgctgtttggcatcattatgcaggatctgtaactcatgaccctgataacattctcacctgagtataggcatagaaataatgtcccccttagccttccattttctataccttccgatattcagctgtcagttacctacaataacattttgaattccagatggtctcactctaatatttggggaatgttggagccgaatttctcttggatccgattttctctcttcctcctttcatgctagggtagaaactccatttaatattgaactgtgcaggacctaaatagaatatcaaaccagacactcaggctaaatcttatgcattataaagttgaacatattttgagcaactaattctctgctagtcagttgtactggcagaaaatattcaatcacacctccaggctagaataaaatgagtgtacaactgaagaaagtccacgagagttattatgatactagctattgagttttcttgaagccttctaatttcctcctattataataattaccacttagaaccaactatgtgccaggcactgtgcaaaattctatacaaataccattgtacatattcaaaagaacaacaagagataaataatagatacctctattaccctgagaaaattaggacatagaaatttgcccaaacaaatggtgcaatcaggacttaaacccaggtgactccaaagcctatatttctaagcactgatctagatgacttctactctcccaagaaaggaagcattactagtttcataaatcattccacctatgtgctcagtgtcatgcactttacaaatattcagataaattccacctccctcactcccacttatcagtcaatagaggaaatgtataaaaatatccagccacatttgtcaaacatgatctgtttttcaccaacacagtagagactcagtagatttccactgatatcagctgagaaaataatcaattctgctgcaaactcaccttgcacataatgtcattcatttgcccttgtaaatgatttaatagactttctggggactgaactattcatcctataaaaggccaacattaagaaatgtgagaaagtgctagaaaggttagacttttcaaaagtaagtagaatctccttatgcctgtgtgaagtggatgatttaattaatagagcaggaatactgggagcttaagttagacctagaatcctcaggggcatgaattcttgagtcagcaagagagagtcagtgcctcaaggctgagatatcagtcaaacctctgtcctccacttttctggggtataaagtgtttgtttgttttttttttctcttttccctatgcaacaacgcagcagcagatccaaaataactatccctagtgtagagacccatcagcgatgctaactccactcatgacgtagctgctcgatatttggtcaaaattagctctttttcatagaatgtagcttagattttcctcctatgcattcgctaaaagcaaaagtaaccaccttaacacctgtcatataaagaagacattttatttgcctcaaacaaaataatacttataatagaaaaaaacaatcataacaaaaataaagcagccaaaacccaataagagcaaaaccactatgtgctttagccatgctgggtcctgactaggattgctttaagcaagtgttggtatctcaccttacatcatcccctttttcctgttagttgctgtgttgctgagtctattattcaactatcaaaaagccaaaaagagaagttatgaggcagtttctgattacacaaatatctaatgtccgcattgtctctgtttattcagattgccaatgactttagaatttagaagctatcattcaaaatgacctaggattagggcctagaagaccatcatttccaaagtatccctaagaagggtacactggataagctacagaagtctgagggtgcaaggaaaactaaaaagctaaattccagaaaatggtaagaccttcctaacagaggaaaacaattactttaaccctggtagtattgggggaggaaggaaaatctagtaaaatgctaatgaagataaactaggctaactttcaataaatttttaatgactggatgcaagcatcatgagagattataatcccaagaagcctcaaacacagagaaactttgcaccgattctccatttctttcccagaggctttttctgggtgctcgagtgtgttattctgatgaataacagcagtgcaggagaactaagagaaagtcatccaggtgatctcaggttttcaacaag

SEQ ID NO: 1881063 - DNA, 4001 bp, Homo sapiens
acctattgtgagagtctacaattatttggtgttacaccgtcttcactgcgtaactttactccacaaacaaaaaggaattggtgccaaaatagcactcagaacaggttctgcagcctgttaagcagttccttcaaatattagagcttcctgagttaagcaaagggtttgctttgaatcccctcaccttgtaaaagaaaaaaaagaaaccgcccaactgattgaggtggcagaaacacctgcacatctgcaaagcactgtcctcaccaaggcggtgacccgtcacccctggggaacagcaggggtagcattcaccccgctgtgcaaacgaggaaaccaagactcagagctttgaggtgacttgcccagggcacaacagtccacacttgagtgccgccctctgactccaaggccagtgcttccccacaacccccaccattacatcccacctccaatctcaccaccgtggaagaaaagcactagcaggacggtgcacccagcattcttactcaacctcttgctttccagaggccccagccgacaagtgatcgcccacaagccttactcacctctctctaagtttagaagcgctcatctggcttttcgcttgcttctgcagcaactcccacgactgttgtacaagctcaggaggcgaataaatgttcaaactgtatgctgatgttccaaatgggaatttatttcaaagaggaaaagttaatattttactttaaaaaaatcaaaataatacaaataaaaataattcttggtttatggtctgtgggaagggaataaaaggacaagtagcaaggccaatgtgcatgtttagaaaacctaatcacaccagctcactcaagcagagaagctactgcatgtgcatgcattgtgtggaattaagactgggtttcttagagaaggaggagagaaagggggagagtaggagggagaggggaaaaggaggagggagaggaagagaaagaagagataaagtgggactaagagaaagagggaagagaggaagaacaaagacacagttcctttaaacatcagggcttcctgagtgcaaggctgcattaacagcttattaacaaccagccagggctgtgtggacaaagaaacttcaggatgacattatcgaagccaacatccattcaagattggagaggaagacaggaatgcccaagagtgaatctgaagttagacgttaagtgaggtgcccaatcacggctcttgggcactgctagacagcactgaaagagctgcattctccttcctcccttctccactactgagaaggcctgacaaagcaaatgcctcacatgggcaaggctggccgtcgccatggttcccttactgataccaggtgggatccccaaacattccctcaactccagttcacagcagacacgagccttgactcttatgttccacaacttaattccagttacgacactggtcttcccgggggaaggccactcggtcatgcccaccttagcctaaacatgtggactgacttgactgtaggcaacggatgggacacatcgctaaggggagggaaaggcaaagaacgaggtggccccaaagagcagcaccacagacttgccaattcagccatctgagcgcttgtgggaaacatgcaggaagccgtctgcagagacagttggggtaatgcccacactctggaaaacccctaccacagagggtgctaggagccgagcgtctccccaagtaaaattctggccgccacacatgcaggcactaactactgatcaggtgcggcaggcagacagaaacccaactgctctccctcacatagaagctgtggtctgtgaatgccaccgtcatccagggactcttagaaatgtagaatcttgggcagcaccccagccctaatctatcaggatctgcattttaacaagatccccaggctacttagtaaacggctgatgggaaatggcttagaatccccttcccaggcgtcacagcacactgcaggccccctactcacccctccaccctcagacagccatgcccctacctccccaggcacctggcacaagtgggtacagagatcaacacacttgtcctggaacttaactgtctcagctctgtcacttagttgggatacgaccttgattatcactaactgcccacagccctcttatcaatagctacagaagaggagcaaaggcccaatatggccaaagtggtcaggagatggtttctttttgagaaagcaccactgattgggcttgggagaggatgggtaccaggctctggacaaatgctggtcacctgatgcttcccccaccaaagacaagaacttacttctctctcaaagaaatcacaagcattattaaccgcctgcctgggtcattcaaatagaaacagatattgcgcacccactatgggctgggcactctcacctgtgccaggcaacaaggtgtagtgcaaagatctgggctttggcctcggacctgaatttggataccagctctgtgatccaggccaagactgaatttctcaggctcctcacatgtaaaatgcctaccttgctgggttactgccaagactgaacatgaggtctcacatgagctgtagctggcaaagggcccggcacgtagctaagcattcaattactacagcagccagcactcactgtcacacccctgatgtacaccaggcaccgtgttaaatgctcatgcagattaatgtgatttcacttcattttcacagcaagcctacttatgagggagaaaactaaagctcagagaaattaagtaactttcctaaagcacacagcaagcacgtggccgactcacagccaacgccacaggactcaggggctgctttttcatccggttccacagcctctcagccagtgcagcttccctcgctctactgcctaggatgagagaggtttccatattcattcattttccttcagaatacactgggtgaacttggtagaggggtgaggacaatttcaagtcaacaatgggcagaaatataatttatcaaagaaaatggttggaggacacccttgagaaaatgtattatttcaaacatgttcctgtatcagctttcttaaacccactcctttatggatcgtttaatgataccactgtaacttgagggtctctaaagtggggtgtatgtacccctagggtgagcgagctatttgctggagaaaaaaattctccttgtgaaaaaacttttactttgtgtataattagcataagagcacacgtatttaagttctcatgcacttatagttgtgtgttcagaaatcatcttgagagagtgcacagaaaagggttgagacgcctcaactaagctacccaccttaatctgaatccacctacaaatgtcactggcatttggggggccgaggcaggtggatcacctgagatgaggagtataaggccaaacaggccaacatggcaaaatctcatctctacttaaaatttaaaaaaaaaaaaattagccagtcatggtattgggcgcctgtagtcccagctactcagaaggctgaggcacgagaatcacttgaacctgggaggtggaggttgcagtgagctgagatcaggccactgcattccagcctgggcgacagagtgacactcagtctcaaaaaaaaaaaaaaaaaaaaaaaccaaaaccaaaaaaaaatgtcactggcaaatgagcactttttaatacagtgatcctgagagggactggctggccactaatcaccatctttgacagagtttgcttctttaatcactgtacattccggtggccatttgcccttactttacaaaaatgaacaaagcaaaattaaggtgctgaaagcaaacgatgagtatcggtctcaagcttcctatagaaagatggaaaaacaacagaaaagccaagaacagtcacaaggaccatcactgagtggacaaagccaactgcacattcaactgtgaaggaaatgaaacaaagttcaggacgatgccaaaaatacataatcaatgatt

SEQ ID NO: 1881064 - DNA, 4001 bp, Homo sapiens
cgtggcccatttattagcatggctgccggagaaacaaattaaaaggcaagcccctcaaagataacagaaattgagtgcgaggggcaaaacgccctgaaagtttgagccggcgacagagaggccatgcttcttcatctgctgccaacctccaaacactgaactctggaggaggctggacgggagccagcctctgacggcgtgtgctctcctcggtaaatatgggaactgccaagagccaagcccgtggaaaagcacttacagattagaagcaaacacatggcaagcaggaccctctgcaatcgtaaaatgcatcgtggaggaagacgaaaggaaacaaaccattctctttgggactgtccatctggaagcgtggagccaggagcattattagaaataaatatatccagcccagcaacatctgggagtcactggatgttttcatcctcctggaaccttcggaagagctctgtccacaaatacaggcttctgaagctgcaacagaaccctggtgctgggacaccggttctgcccttcaccccctgtggattggtttagcccattttccagggaaggctggggagtggaaagggcttaatactccagaagctttgtgagtgggggtgtgagcctgggagggaagactggaggcctcgcaggctgtgggatgcgtggccagatggagcattgtcctttgcgggcaaatggcttctactagacttttctaggtgtgaccctggaaccatttttatcctggggtgctgactaatagaacagattcctgggtcctacttcagacctccaggatcagcctctctgcagggaagtgcaggaatcttacatttaatatcgcttcttaggtgattcctctgcacactacgggagtgcttctcaaactagagcatgcatgcaccaacataaccctgagagcttactaaacacagattgctgggccccacaccgacaagcacccctgattcagtaggtccaaagtggcgcccgaagatctgcatttctaacaagtttccctgatgctggtgccgctagtccagggaccacactttgagtagcactgcaagtctgcaaacccactgaactacggggtttgctctcaggctgagcaaagttccatttgtcaacaaacatgtacatagcccccagttgagtgcgagagccctctattcctgggcatcgtggcgtctgggagccaaaccttctctcttaggcccccaagggaacctgaagatgtttgagttaataatgactccaggacgagtttgtgctaggactttccttgtagaagagaagggcctaaatagcagctctcaactttgagcaagattttagaaacactccattgctggggaaaaaatgttaaactaactaatgtagtctctttgggtgtgggaactgggcatcatctggatttttaaagctgctctggggagtccaatgtgcagccaggctagaaaacctagcacaaatgttaactctgactaccatcagtagcacccagggagtggctagaaagcattacattgggccccactcctccctcgcaattctgacttccatgattcagggtggagcttgggcactggcattataacagaagctctccaaatgttccacagtgcacctagcggcagggatccaggcctgctggcctagtggaaagggactcaggagcactaaatcctgggaaggcttaaggggcggaatgaaaccagagactggggctgattcatttggatcaccacagtaaatgacaatggtaaagcaagtcacaattgtgtaaagcagttttgtgaagtgcaatcagaacagatttcttgttcttaccccataaacaactcaaactctcttccttgctggcctgagcaggaattcgttggaagggaagatagaagcttcctctgcagacttcagacgtgcctcctctgggatgcacacagcaaggggtgcccttgccaggcataaagccctgtgcaactgggtttctacagctctgcagcggcctaggaggaaggtttgctagaattactgccccatgtgactttcttttaaaaattaacttgcagatccctgggtgctatatcagctttctcaacctggacattggaccctggagcctgcattttgaacagacgttctgggcaattccaatgtgcattataagcagggaaccatttacatgaaggttccacctacctgagcaaaggtggaagttgggagagatagggccagagaacagagtggatagttctttgccatctttggtttccccgaggtctctgctgggcaaagggtctctcagaaaaccctccctgaaagataagagcctatttaccaaaatttacatctaggtccaataaatggagctgactttacccatgcagggctgggtgtcagactcagctgtctctgttacgatgcacttttaaggcttttctaacaggatgagctagattactggcaaagaaatgaatttctcctatctccacataattctaaatctcctcactagagaattagactatctgtcccatttccaacaatgacacatgttgaatggcccaacattggccaatggtcctggcctgccatgtcttctcacaacaaatgttcccttgtaacttgctcactctggggttagtaggaatttcaaattgggagagaaagagagagaactgttttaagtgggctgaccttggccttcccaaattacctctgaagttccaggatttgtgaatgacccagaggtccatgatccacagtcatgcgccatttgaatgaagcatgaatttggatggtgtgcatctggaactatggaggggaactgggtctcgtagctggggagcaccagtaccttagctttgtggaacttgcgacacggtggaagttctgtttcttggcaaaaaatggtcatgtggttgaagagaaactttcagcggatatagaaataaccatcaacttgtggtaggagaatggcactgggtgctcatggagctttacaagacatgtgaagtgggaggaaaccgggaatctgtgttagcatttccagtgctccaaattcgggatccctggaggtttcagaatcagtcctcccaaatatttatggaaataataacaaatgcttgtatttattgagtgataattacatgccaggcaaggggccaagaacttagcacacatcatctcctgtgaccctcacagcaatactccaagtgcgtacttttatgatcaccattttctagagaagggaactgagcacagagtggttgtccagtttcaacaagaacccacagccagacagcggcagagctgggattcaaactgacaaacactctctcctcgcccaaacttagttcgtctcctctgagccctctattcgactaggcctcaaatatggccccagtcctgcacagcaaaaatcatgtcaagtcagtttagcaaaatgtcttcacctttgatctctgatcacccttgaaatctgatcaatttcctcatcccccacctttaatgtataagtccttgacctgcctttagcaagaatcctgttaggtcagtttagcaagaattccccaaccctgggtgtctcctcttcgcaatttttcatccactgactctccttactctgctcactgactataatcccccacctgtcctttctgtattcagagttgatccccatctccctcccctattgcagtacccctactgtgatagtcttaaataaaccctgccttaccttttaaataagtctcagaatcattctttcatgaacagaacacaggcagttggactctggtacctgccttcttaatccatacagtatcctgccagaccagcgctgtccaatacaactataatggaagccacatgtgtaactttaaattatctaatagccacattaaaaagggaaaaagaaataggtgaaatatttttttttaagttttttacctagtatatctgaaatgccatttcaacatatcattgatagt

SEQ ID NO: 1881065 - DNA, 4001 bp, Homo sapiens
cagggagccctctcagccagtgcatatgtgaagcccagaaatgcagggcagtgaaagccctcacaggcagctccggttctgtggggcctgggagctgatggacagatactgcccagtgaatggctccaggcatcttgtacccatctcagaggtcctagcagaatctttgtctcagacaacatacccttaaattgactctccctgctttcctgtcctctttccctgctccctcgctccgagtcctgagaccagctctgccacaggttgggttctctgcaaggagactctgagatggaatatggggtgcaaggtgtttatcagggaatcaatgcctgtgaaaggaatggggaggaagtagatttgggcagagggagaagctgagatgtgatgcagggatgcaggatcagccaagccttgggcagcccatcaggttgctgggagcatgtcctgagtctcccatgggatgaatggccaggcttctgtgcccccatgcagatgaggatgtgggcagcctaggagggcgtgttccatgctgtctctgtagttgaggcaaatcctgaaggagccaacaggggggcaatcagtccctcctggaaggggggcctgcatggggagctccacattcaccataagctccccaagaaacaggctgccctcacatcctttctggggctctgcttttgggagagcccagataaagacactgggtgaggtactgccagggtcagcgtcccagggcacagagaggatagagaagggcagagaacagatttggggcttgagggcagcacatccattcaacaagcacagctgacatccagtgctggaggcccagaggtgcccagtgtgtgcaagactgccctcctgcctcctcactgagtggacaccctccccctcttccagcactcagaggaccccgcccaggaaagccttcctgcttttactagggaggaacagaaactgcttgatctccccgacaagcgccacctgagctagaggggagtaaaatctaccctcatttggggaccgtctcatttacatcttttacaacgttaaacagaagaaagcatcacttagcaggtgcccaccctgatatccagcaccaccctttgcatttgctgtgattacctcctttaacacaggtggaaaatgtgactcagagaggttaagtaacttacccaaagtcacacagccaaaacccaacagagccaggatttagagacattctgattgacttcatattccatgtagatggcactatgaggcactgtctcagaaagttttctgcacacgtattcccccatcctactccccaaggcaaagcagaaggctgggctctgggtttttctggcttgggatgccttaatcagacctccagcccaagccagttttcagcggcttctcccgcgttcccagcctgtcttcaatcacgccgcagcagcccctaccttgttcatcaccggctttccttctcgtgcctcctctaattttgctccatatcctttatgatgaaccattgcatggagggtgatttacaacctccactctcatctgcctagggtttaaaaaaaaaaaaatagaagaattaaattggatcaagcgctccaagatcctgtctctgacttcagcctctctcgtttacccagtgatgcatcacgctgtgttctaatggcttcctaatgggcaacttaatctgtcattaaacccactcaccaagcgccccttgccagactcctcggccattggtctgcttgctgagccacggcgtctgtggggtggccccgtcctcagattggcaggggttctaaaaggaagcgtatcctttcgtctggggtcccaggctcaaatgccgacggggccagagaggtaagaaaggtgagcagggctgggggctgggactctgcggccgtctaacgggcagcccctgctcggcccccctcatcgctgacttatggggatctgggcccagaacttcccatttcttgacacaagtcggagatgtagaagtgtatgtataatcttccccttttaaaaatgtcagcatctatttaaaaacattttttttaaacactgggcaggccaaataaaacatggcagccggcagctttggtccccactgtcaactccttctcagagagaccccgagatacccccctgtgctgctcccagtcccggagatttcctacagctctgctcagcacgggtaagagaataataaatcggtcacttcactatccaattagcagctgttgctccccgctggaggaagaaaacaaacaggaagaccctgccctgttttgtttaggatcaaactcgcctctgtaccacctaccggagggactctggggtttgagttctggggacaagcgcgtgcccctgcctccgaatgagctccttttacgtgtgagtcctgggcacaaaaccacagccaccacaagccgcggatgcttccccagcgggccccgcgaagggaaactccgtgcaggggcaaagctgagttttgcaaccagtgagcgggagcccggggggcgtggccaggctgaggggatgcgttgtcctggtaacccgtaacttccagaaccatccatcctctggggacttcctctatggggctgaagggctttctttcagtctctcctcaagccctgtcaacatcacagcaacatattcccttaaattcctgaaaaggtgccacacttgagaggcagtgtagagtgtgaaccctggagccagaccacacaggattaggtgaaaggcacttagcttccgcgggagctggagcaagacatttaacccctccagcctcagttttcttatctgtcaagtggagatcatagttgtgctgaccctgaaggtgaagattaaatcagttaacatacgtagcacatcccctgtagttcctagggcagggtaagtgctatgtaagtgtcaggaatggtaataataatttgggggagcatccgctgtcctcttagctctgagagatagaggctcatcaatctatgggatctcacattaagacatagttgagctgtctctgggatgccaaactcctagagtttatcacttcccccctctccatgtattgtatcctctcccctccatcaactctttggaactgtggaaagttctacccctttccaaacccaactccaacgatactccttcataccacacacaatgttcttcaccctcctctgaactcattttatgctctattggcacacacacaagagcacttatcaccatttgccttagacagtagctatgtgtggatacgatttatctcactggagaccgtgacctcatcttattttttatatcccccgtcgcactgtgtcttcgacataataggtgttaagtcaatatttgctaaagatatgttaagtgaataaatgaattagattccctgaaacaaccagggagattcacctggaggaagtctgaagtttgagagcttagaactctcagaatggacttgaacttggccaaggaaatctcaggggctatcaataataagcaataattataataaataagaaaatactagcatttattgtgtgtctgctgactgccagatgctgctctaaactattgacacggactattttctggaattttcacacctgtctggtgaggtttgttctacttttgtcatctcacaatcccagccaaggatgctgcagtttaggggagtggagtaatgttcctaagacacagctggccagtggcagagtacggatttgaaccaggtaatttggttcccatggaagcaaatatttgagcgcatacacttaattagggaagtggccctagggagcactggtagggggatgaggaagtgaaacggagggaaggaagtagagtgagagtttgttcacaagcaggtcatctctgtgtgcaatgaagctcattcccactggggactacggggagactgcagaatagaacctgcctcagagccatcatcccagaggctagggagcatgggcatttaccca

SEQ ID NO: 1881066 - DNA, 4001 bp, Homo sapiens
gtgcacacataataaaagcacattcacacatagaaaagcatgcacatgcacaatgcacaagcattcatacacatgcaacctcccatcaacacacacaaacaactgcagggtatattaggtacatgggtcttcatttctttaaaaaaaagttcattatttttgtctaacttgaacattaggcttttatgctttgaagcctaaatattatactaaaaatatattttccaaatacagatagatagatgacagatagatagatagatagatagatagatagatagatagatagatagatagagatagataatagtgttaccagaaacaaaggaaataggaaaaaacatttttgatagtgttaccaccataggaagttaacatgaattgatggccatttaatgaaactaatttagcacaggaattttttttttcacttctctagatttgttaattttgggggttacaactcttgatttgatctggctttccagcgttatcattgttgtttttaaatctacttttttgaaaagatttttggaatttactttctctttgttgcctgtaactggacctgtatcataaactcgcaatgaagctttctgcctcactgaatcactttcacagactctgtattaaaacccagttgggctctttctttccttcttcctttcctttactctttctacatgaggacaaagaactcctttgaaggaagcctacagggctcaacatctcatgaaagaagatcgattatgttttttttttttttctccacaagtcccataaggcatgaagtcgccagaccaatatcattattttgggtcagctagctacaaatttgaaattgaggttggtcagagtacgacttcaaatatagtaactatatagattgcttgtgcttaaaagaaaaatgatatcttagatttgaaattctcaataatacatgtccattgctgcttctcttaattttaaattgctctcggatagcaaaaataaatagtaagtttaataaaatatcaataaatgctgtagtttgaaataatggttttcacattcaaagtttttggttatagtaaaggtgtgttacaaacacatatacaattatatcacacttgattgtagtttacaattctcaggtaagggtaaaatctacatgtactaagggaatacaaatgttggtttagtgcttatcttgatgtagtagacttctagaagataccatgaaagattatcttacttaatttttattaaatatttaaatcactaaaccagatactaatgcactcttctgtcattaaagatatgtagatgatagatatttatattcgcatatataatattaatgtaaattgcatttatattttctatatatattcaattacaaatataaaatatcaatattgatctataaagagttaaataaaatctataaaaagttaaataaaaattctagaattggaaaaatataattaagatatattagtgactcagtagatatcaccaaaaagaagagaataaataaactggaagatgagacagaaaaaaatacccaaattgaagcacagaaagatgaaaagtgtaaaagacataccgcaaagatccaatattattatggtaactgaaatcctagaagcaaagaagagaaaaaagacttcgccaagtcaaatacacaaaaatctctgcgaaatctaggaaaaatgatttctaataattttcaattcacacagacatatcataggaagacttcagaaaacaaagaacaaaaaattctacctgaatgagcaagataagaagcattaccttcaaaacagcaataataagagagatgaatttcaacagaaaatacatgaaaaaaattaaaaatcctaaaatttccattagggaaaaaaaaatcccttccaatcctgcgtttcatattcaatgaaaatatctatccctacctgtttcctggcgtccgccggctgaggctcctagccctggacttctggccgtcgccccaagatggcggacacgatgaggtggcgctgcgtcggttgcccctgaggtgtctgtgaggactaacggtcggcgaggctccacagttgaggcggaagacagtcgtccaagcaggaggaagaaaaggaggcggccccactgccggccgacttctcgctagccaccggctcaacaccgccgccaccaggggttggcccctcagcagcccgcccgctgccagtcccggctgccttccccacccgccgccatgaagctgaccgacagcgtgttgcggagcttccgcgtcgccagggtgttttgcgaaaactcggacaagattaactgcttcgatttcagccccaacggccagacggtcatctcaagcagcaacgacgactccatcgtgctatatgactgccaggagggcaaaccaaagagaaccctgtacagtaagaaatatggcgtggacctcatcagatacactcatgaggcaaacacagctgtttacagctctaacaaaatagacgatactattcgttacttgtccttgcatgacaacaaatacatcagatactttcctggacatagcaaaagagtggtggccttgtccatgtcacctgtggatgacattttcatttctgggtctcttgataagaccattcgactctgggatctccgggctcctaactgccagggcctcatgagtctacaggggaagccagtttgttcttttgatccagaagggttaattttggctgcaggtgtcaactctgagatggtcaaactttacgaccttcgttcttttgataaagggccatttactacctttaggatgcagtgtaatcgaacttgtgagtggacaggacttaaattcagcaacgatggcaaggtcatcctcatttccaccaacggcagcttcatttccctcattgatgctttcaaaggagtggtgatgcacacgtttgagggttatgccaacagcaaagctgtcacactggaggcttcatttactccagattctcagtttattatgattggttcagaggatggcaagatccatgtctggaatggagagagtggtataaaagtagctgtgttggatggtaaacacaccggcccaattacctgtttgcagttcaaccccaagttcatgacttttgccagtgcgtgttccagcatggtcttctggctgcccaccattgatgactcaccctgatgctgctccgctatttctgtacagtgagggcggccataggaagaaactcagaggggtctgagatagtagggggattggatcatttgactgggctggagagcatcctttacttggccttctcatggatgtgctgtacatctgctcaaaagaaaataattactttgctgagcatcttcaaaagaactctggtgcaacagactcaattggaactcagcttttctagctgtcactgcaccaagctctgctagaggagtgaccagactcacgatttgggtatagtggggctctcaagacatcttcaatttgaatgtacatgctgctgaggagccagtgaagtcatcagctctgcacatcccttctcctaccccgctgaatgtatggaaagctacagtcctggttttgaaatgctagagcagctcagcgccccttgccctcaccttgcatgtcttgttactgggtcttcctgtgtacttgtgacattgtccacaaccatcatgtttattaggtgccagacatttacagaaatgttttcatattggggtcagagaaagagacagatacagaaggaccttgcttgcaggaagccatgaagttagtcactgcaattagtcatgtgaagctaggtagtttggcaggcctcaggctctaggtgttggatgggaaaaagcccaagggcctaaaagggagtgtaaggggatggtagcaggtgagttcctagggctggaaggtttagcagcagtgtggtgcagtgccctgtcatcaagacaaacccacggtcctcctgggtgcctaccaagcttggtttgcacaaaag

SEQ ID NO: 1881067 - DNA, 4001 bp, Homo sapiens
aaagaaagacgaatacacttaatgacaattatgataataataaatttagaaaggcaatggtaattctttttttcctaacttgtctcactctacttcttttaaattcaaaacaggtcccctttttgctgttgttaaaaaggattttttaacttctgaaattaaagcagagtatttcacttttgttaaaaaatagaacttaatccacagttgagatttttgtttttctagacttgaaaatctgcttgtaatttgcacaaatgcctttcacttcaaaaccttttatccaaatagaagcacaaagttgtacttgcctttccttccacagaaggcgtttccagtatcttgcatacacaacaacttgctcaggttaaacatagtttcattaaagagctattaaatggtgctcttaaagtttatctttgcattttaaaaggggtatagatgttgccaaaacagcaaggatagcatgtagggtactttgcagttctctaaactttttcctccctggagtcactgaagtcccttcctggcttaagtcactttggtactcaatacagtgtttgtttacatcatttagcattatgccccttagctttacccagtgtcattttaagaaatgatcgggtgaaaaacagctttaaattatctgtaaaattgccatagatattcattatgttgcttcacataaaaaattccttgcaactaatttccacttggactttagtactagaatgaagtttgcctatgttttcttttttcagttaatgaaagctgtggaatgcatgggactattctttttgcctaggaatctcagaacttaattttgaggatcctccttagcctacattttctgacatagttcttaccctacatctccctttcccccaaccaccatcagatatttctttctctaagttattcatcccatctttgttttaaggtacctatatattcttttatgattccctttaaaaaatcgcagaagtaggaagatataaaaattagttattctagacttcctcaaaatgttctttcaatctgcttttaaatggcatatacaatcattctcggctttggcatttggttcaggtgacacctgcaagttaccttaccaaaggcctacccagaattgtgtacaatcccagcaaacaaggctctgcccctctcaagagtactctcaaacagcaatgcatatctcatctaatgcattactattttgtgagtcactaacaagcttcagtactttgttttattagtaacaactgactcacagcacaccttgtagctgtggaagccccatctgatacccagacccctgatgcaatgcagctgctctgagatatgccgggaaaccacagctcaggaatcagttcttattttccttcaagtagcagcacagatttccttactttcaactgtcatgagctgaactcatttttcaacgaagcctaacatctgtgcttccttccatccagcaggaaaactttatttccccagaacttatttcttcagtcaaaggtgtctgccagttctcaagagagctgtacttacaaagatgcccaagaagcaactgggaaaaactctttggggttctgaggacccttagaggaaaagctgatggaaaagaggaagggagtgaatgtctcctgaaccccggctctgtgctaggcactccttggcaaatttcttttagccttaccagcaggcctctgatttagacacatttatatgcattttccccatgagaaaacaggctcagaagggctaaagagcttgatcaaattgcatcactgttgtcttagtccattttgtcctgctataactgaattccaaaaactaggtaatttataaacaacagaaatgtatttctcacagttcagaaggctggaaagttcaaggtcatggtgctggtaggtttggtgtccggtaaaggttgtctccattcatagatgatgccctggacactgcatcctctgtaggagagaaacactgttcttcacatagcagaagcatgagggaagagctctaatgacatgaacacctcccgttaggccccacctcccaacactgttgccttgggaattaagttccaacatgagttttggaggggacaaaaatgtttaaaccatagcaacttattaagtggtgaatcctggataatagcccagttggctggatgatggggcccattcagtgttcactatagaaactgcccagagagagtgaggctgttaatatgctccctcagactggttacacagagtaccctatagttcaggccacgtgcagggactctgaggctgcagggcctgggttcaaattccagctctgttacttgtgcatgaccttggacaagttacttaatttcatgggatgcctgtttcatcacctttaagatggggatagttgtttggagcaaattatttaatcctggcacaatataagtattcaacaactgttagctatcgttatccattcatatcccactgttattttattgcagggtaaaaaaaatgatgctttcttgcccaaatggtggtgtttttatgttgcctatcatttggaaatcattcacttggaatggtagacctggtagtggggtcatctttggaatcacctagacagttttttaaaatactgatgcttgtgtcctactcctagagattctgattcagttggtctcctaggcatgtaggagaaggaaatttttaaatgctatgaaatgctcttagtggttcccaaagtctatccctggaccagcaggcttagtatcacctaggagcttgtttgctggaaacacaaattcccaggccccaccccagacctagtgaatcagttactttgggaatacagcccaacaaaataagccctctgcatcatttgatgtccatgaaagtctgaaaaccattgctctaagggaaggcagtgccctgcaagactgcttcatcctaaacacaaggcccaaagactgatgccaacctacagggcttatctgttcatttacatgaggcaatgtagctctagtatactagtctcccctagggccataatatgctgtgactttatcagtgcatcctctcctaggcccaaggaaagccgggtcctcatcagaagtttctttattaaatgttaaaagatatcagctgtcctttgccttggttatgctcctttttctctgttcccactattctgcctattttcccataatcaacataatctttctctggtattaatatacttaaggaggttttaattgatttttccaggctatagagacactctgcaccttctaggtgactttgtgtaactctgttctgatccctaatgtgaggctgtggcactctcagagggaggggtatttcttttcccctctttcttatagaggaactctccatagtgtcacatgcttcagcacctgagtcttgctccttgcttctgcttccttatccatcattattttcttttgaaaataaagaaattttgcattaaacatttgccttccatgtttatccaaattatgtggaacttttgatcagaagatgcttccctaagcttacacaatctatctttcatctgattaaagagaaacactattgtagctcctagtggaacaaatgccatctctatgtctatgcattttaacttctcacagaaaaaacactgatgttttcctcattgggttgcatgtaactaccctctaggaaatctaaactaaaattttacaaattctttttataatgtacttataaataactccgcatcagctttcagcactgaacaagcaacagaatcatcaaaacaagggcaaaagaacaacagcagagcatgaatgtgggagatgaagcagaagagagatgatgtaagtgagttagcaaggagggaaggtaggttctgaaatctaggctaaggagaagctatgcaggcaagtgttacactcagtcttggtgatcaaggcaaaaagggaaacacaacaaattccactgccctatagcaggctgtta

SEQ ID NO: 1881068 - DNA, 4001 bp, Homo sapiens
ctaagttcatatgctttgaaaggcaaaagagaaaactacattgataatttcaaaacattatgcctatcatacatgacaacacctttaaagcacctgaaatctaactgggcctaaagccagtctacccagtttttagcaaacccatggatcccgtggttagagctgggtttcagtcacttgctacccatagtcctgactgacatggtaataacagtatccatttcacattatttgaatagcactgggcacagctccacatgcaaatgggtctgattaaatgcatttgatggtaagattactgccagggttagatcctgacacagataaaccttgcttaaagagctccccaagtccatttctaaacctcccatgtacgtttcttcctttccagtggtagaaaaaaaataaccaaggaagaggatcccttcctttgggttatctggggccagaatcccctcttctgtcactcaccctgtggtggtgctgggggttgtactgagactccaagttatttctccttgctgacccctcctgcttcccctttcctataagctcgttccagtttcccatagttgcaaaaacaaaacacaacaaataaaacaaaacgacaatgaataaaggaaactctccctgcctccccttttagctgtaacttccccctccctgcctaaccaactctcttgaagcagtggtttatacccactacccctgcctcttctcttctttgactccattttgcttctaacctagtgtgattttgtttctgccctcacatccccactaaaaccaatgtctcacaagtaatcaatgacttcctcattgtcaaatacaacagacatattccggtgctcatttgcttcacatctcggtggcatttcccactcctgactacgtcttcaacctggagagtcttgatgtgaactgcttgatgccacttttttctggttttctttccatttctccatctgttcctcaggatctcttatttgatccttaggatctggtatctgtcaggtttgggtttcatgctttcatagtcttttcattctgcctgctcttctgggccatcccagccctgccttggcttcagtgaccatctttaagttgactgttccccagtgggcacctccaggcctctctcctgtgcttggaactcatgttcctaactcttcctggaggtctccacctggatgtcctacagccacctcaaacccatgttcaaaacatgccatcttcctctcaggtccatttctgttcctctacttgcaatcacagtaaatggtatcaacatccatgaagctgcacaaagaacccgagaatcctcccggatttctatttcctttcccctttccctgcctactgaggcagaaccttgtacctggcagtatatcagatatccacccagagtagtgtgtatgagtggatgaatgaactatggtgctacagaacaccatggctccaacttgagtctgaaacttgatgtcattttgcctttcacagtttttcactgcttcttctttaatatgagggagtccacctagatgatcttcagctctgagatctatgatccacactactccaatgtgacaccttagtcacttatccacttaactccattcctttttcttgtgcctatcacacctaggtaaaggggaggggaacccctatgataaaatgggacttaaaacttaaattatgccagattacagaacatattttccctggtaagaggtcccaatgtctctctgcagccacctaccttgagtcaccgtgagaactggaaagggaaacaggaagagtgcatgggaagggcgggagaagctgaaggagagattaacagaagccatttcctcctttccctgtcatgccagatcctctgtctgtgtgagtctccccaagcgctgcacacgggaaagcaccttccctcttgttcctcatgacttctgtctggaaacgagtaccgtgactgtctcctgaacgcctacgtgcctagcactttctacttctcaaaacattgcacgaatatttatttgagagccttccatgcgcaggcactgtgctaaacaatgtgcaccttatctcatttaaatcccacgaccctagcctatttttatctccgttttgcagaccagaaagctagggcatggagcggttaactgcttcactaaggccatccaactagtagtgtggttctggaaatcatcatatcaaacccaggtctgtctgattctatgcccaaatccagggcagccgtggctacactgcttctgacgtattcgtggttatctttcgctgccactcaagacactgagtacacagtatctaggcttttgataagtgctcattgaagaagtgcttaaaccatgtcaatacgagctggatctggtcccagctgccagaagccagaaatgcagctttgggcctttcccatcacctctttgggcctcaatttcctcatctgtaaacgggaggcattatgcaaatgccctcgaaggaggctgtgcctttaacattctgtggctctgttctcatggcgcagtgtccccaacgtgctgccaagaaactgcactgacggcaggacccagcagctcagctctcctacgcggccccagcggcacggctgacgcatgcgccctcgccctccatcctccgccctcgcgccccttgcctggcgcggaggcagctcttttctgcgcacgcgcaggccctcgccgccgcctgaccgctggattgcctcgctccaggagggcgcggctgcctcccccgacgctggggaaatcagtgctctcgacagggataggggtctgcctgccaggagccattcggggcccacgggggagccgcctggccctcgttaggcaaggtccctgggaaagctgccccccacaggagagcgtgttcccgcccgcgcgctggacgtgccggggagcacagagaggctcttcccgctcgcagcacagatggaaacgctctcgctctgcggcctgggctgggaggcaggggagggccccagagccctgccagcccgcaaagctgggaggattttcctctcaaaaacgataccgctgattaaactgaaaacttctaaggtcacggaggacgtttatccgggctggggcggggaatgggagggctggaggcgtcacctgatgttataagctactaaaaggcagcggactctggccgggaggcaggcgcttcattgcagcttagggatgaatacataaacctgggcggctatttttacactggctgaaacagagagcgtgtgtgtggcaggggagaggacgcaagcagccctcccccattcatcccctgatcttccccttccatctggagagttactcctcagaaccgaagcatttttatttttattttttgaaatcagggaagggaaaaggaatgcagatcaaaacgtttcctaaatggtaaaaataaatgagatagcagcattctgaattctcacgccttggtactctcagtccttcctccccttgtgtgcagtcttttgaagtccaaggttgtcggtctgagtttgtcttttcctgctcaggaaacatggaatggcttctgcaaggtttgggcctgcagagagctggaggagacagagaaaagaggagactttttgccaaaaatgcattctcgatcccggcgtgtgcctgtgcactgttgagtgtgactttgttctgttaggacttaaaagaaagctctgcttctttaaataggaattttcagaccatgataagcactgagaaagcagaagattgtccaggaagggtgattgctttgaattttcacctgatttagacccactgaagccattgcctgtgctttcttgtcagaataaatttggagctgaactcaccatacccaagagggaggcgtgctcggggtagggctgtgagctgtatggggaattcttgctgacatcaaatcgtttcagatcactcaatttactttgatttcgttcaacgtcatttcattttctttccaagtcctct

SEQ ID NO: 1881069 - DNA, 4001 bp, Homo sapiens
tgcaatataaaatcaaataagtaaaaactctataaccttctattagaattggaatatcaacacaaatttattatttattttcatctttctttgaaaaactacatctctcctagatcttgtgttgaaaagtctgggaagtgataagccatttaaccatgaacatctttcagtgcagactgtagcatccaaatacctttttcactggaagcaacaaggacacctttgagaaatggctgattctaggtctgaggcagtaaatgtacaatatgagactggaactcttacagtgtcagaaagcaagtaagctatcaagacattcgagcttgtgtcaaataaacaaaggagccaaaaatggccaaagacgggcaatttgaacttcaaaatggataatcactgcaattatataaaagtgtaaaaagagatacagatacaatcaacatgaaactcctagaagcaacaggagattcaatatggtagcaagatacaaaattagacatagaaatcagtaccttcatttatgtaagaatctagctgttataaggaaaagtggaagagataatcccacttacgataccaacaaaaaagagaaatactctaagaataaacttaacaagtgaaaaacctttatgatgcttccttgaaagacacaaagctgaaacttgagcacgagaaaaaataaaccttgcttttcaaaaggaaaatgcaacatcataaactgaaaaggtatgcagaagattttttttttgaaagtacttttatggggctatattctatagttaacatgaaaaaataacccagcattaaaaaaacacttaagaaaacagcaatgatgcagtctagccctaccagatactgaaatatagtctctaataaaaacagtatattagcccataagtagacaataagatcaatgcggggaaaaaagaaaatatatcttagacccaattacaatgtggaaatttacgtatgtgataaaaatattgcaaatcgctggtcagggaggtgctttataaattaaatgttatgacagctaaaaagtcatttgaaaatagataaaattggatacatcacctaggtagaattcctgcatatatgtttgtgtgtacatatctattactcgtgaatcttataatgaggaaccaatctgacatctccaaattgaaggatattctggaagaccaccgggctagacttttcaaaaatgtcaataccaggagaaacaaacaaaaaaggctagggaactgctctatattgaaggaagcgaaagagacttgacaactgcaatatgtggttcttattgatgcactatgtgattcttgttaaatctcggatttacattttacaaactacagggtaaagaaggacattttgggacaattgaggaaattcaaatatgaaatatagattattgtaatataacaatgttacatttcctaagtatgatgatgtgcattgtgatcctgtggtcctcaattgaggcaactttgtacctctcctttttcccccaaccctcaccactacccctccccccctcaacccccccaaccacaccgtttgggtttggcagtgtctggaggcatcgttggctgtcacaactgggggagggggttgctactggcatctaatgggtagaggccaaggatgctgctaaatagtgattgtttagcacaggacacccccaccccaccccgtcaccccaccttacgggtacagacagcaaaaactcatcctgcccaaaatgtccatagcgcggggttgagaaaccctgatgtagaaaaatcccttattcttaggggatacatactgagatattaggctgaatcacatgacattgtctcttgcgtaggtcaagtatcggcaatatttaaggacgaaaggttatgacgttcacaacaaactctcaaaataatgaacaagccccttccgccccggctgccccgcgacctaggggacccgagaagggcgcactcgcacgggccgcggaggccaacgccgagcctgcgcggcgggaggcgctgagaactcactgcgcacgcgccggtcggctggccgcacccacgcggcgcagctcccaaagttgcagacagcccggcgaaccgcgcaatgcgcttcttctgcctgcagcagagaaaaggaaagaaaactccgcaggggctccgttggcttctccacgagtgacaaccatgttttcccagatagaagaccggagccctgctcctttgcgatccgccgagggctgcagagagcatcctcatccatttgggcacccctgcccaggaagagcccggccatccctttccggactggatccttaagaggtgaattttcttccgtggattccgatttgctccgtctgaccagcctaggcaatccagcatcgcgtggtaccagtgccgctgggcacactggcttcacgccggctccgcctcaccagcaagcgcattcccaggtaaaaattttaaataccttagaattcttctgcctagaccctctaatcaagaagtttacccactttttctgtaaggagccagaaagcaaatactctagaatttgggcctggaactgtctctgtagcgtattcgtctttgttttgaaaatgtaaaaaccactcttagctgctggccttacaaaaatagaatcatgaggactgtgaagattagagcctaatcactaattcacccagcacagaggctagagcgccagtgagtcctccgccccttcccaggcccgaccatagttttgcagttaggacccaggttttgtgaggactgggacccacccaggtttagttcacagtctcttgaatccctccctgcacctgcacctctgctcctccccctaggccggtggcccttggtgagtttctggcagtctcctaggccaccaggaaacactccgaccaactgccacgccctcctttgctccaaaatgacaagctcttttcatctgggagcaaaagctgaagtccccacatttgaactaaattagtttagtgtaaaagtagtacaagattatctcagacaattgtattttaatagtatttttttctagtgataaatgtaatatatgtctactatggtcatttggaaaattctgagacgtatagagcagaaaagaaattctccataaccctaacccacaaaaaataacttttgaaatgcttgtgtattttttaattcttttttaatgcatattataggacaacttactgaacatttggatttttagaaatatttttaataaaacgtgttgaagtacagcatacaaaaaagtgtacaaattacaaatacagttcagtaaactttcaaagattaacacaaacatgtccgggcaaccacaactcagctcaagaaattaactaatagtagcattcttcatccccctgttagttttgtctattctgacatttcacatgaaatgaattacttggtaaatattttatagtatttggtttatttccctttatattatatttgaattcatccgtgtcgttgcatgtaacaagtcttttttacaattttattctatgctgtatgaaattcagttatatgagtatacacaatttattctttctactgttattttttcttaattacagatttattgagatataattcacacaccatacagttcatctacttaaagtgtgcaattcaatgtgtacaattcattgctttcagcatattcgcagatatgtgcaaccatcaccacagtcaattttagaaaattttcatcacctggaaacttcataccctttaactatcactcccgcaaccccacttccctatcctttctagccccaagcaaccactaatttttctgctctatagatttccctattctggacatctcacaaaaattgaaccatatgatatgaggtcttttgtgactggtcccttatgctgatactggacattcgagttctttccaggtttggagctattacagataatacttccgtgaacgttattctgtgaatcggttcacatagatacacattt

SEQ ID NO: 1881070 - DNA, 4001 bp, Homo sapiens
ggcactgtaattatagctggttatgagcataccttagatatgtatcgcaatagaaatgtgtatctatgtgaaccgattcacagaataacgttcacggaagtattatctgtaatagctccaaacctggaaagaactcgaatgtccagtatcagcataagggaccagtcacaaaagacctcatatcatatggttcaatttttgtgagatgtccagaatagggaaatctatagagcagaaaaattagtggttgcttggggctagaaaggatagggaagtggggttgcgggagtgatagttaaagggtatgaagtttccaggtgatgaaaattttctaaaattgactgtggtgatggttgcacatatctgcgaatatgctgaaagcaatgaattgtacacattgaattgcacactttaagtagatgaactgtatggtgtgtgaattatatctcaataaatctgtaattaagaaaaaataacagtagaaagaataaattgtgtatactcatataactgaatttcatacagcatagaataaaattgtaaaaaagacttgttacatgcaacgacacggatgaattcaaatataatataaagggaaataaaccaaatactataaaatatttaccaagtaattcatttcatgtgaaatgtcagaatagacaaaactaacagggggatgaagaatgctactattagttaatttcttgagctgagttgtggttgcccggacatgtttgtgttaatctttgaaagtttactgaactgtatttgtaatttgtacacttttttgtatgctgtacttcaacacgttttattaaaaatatttctaaaaatccaaatgttcagtaagttgtcctataatatgcattaaaaaagaattaaaaaatacacaagcatttcaaaagttattttttgtgggttagggttatggagaatttcttttctgctctatacgtctcagaattttccaaatgaccatagtagacatatattacatttatcactagaaaaaaatactattaaaatacaattgtctgagataatcttgtactacttttacactaaactaatttagttcaaatgtggggacttcagcttttgctcccagatgaaaagagcttgtcattttggagcaaaggagggcgtggcagttggtcggagtgtttcctggtggcctaggagactgccagaaactcaccaagggccaccggcctagggggaggagcagaggtgcaggtgcagggagggattcaagagactgtgaactaaacctgggtgggtcccagtcctcacaaaacctgggtcctaactgcaaaactatggtcgggcctgggaaggggcggaggactcactggcgctctagcctctgtgctgggtgaattagtgattaggctctaatcttcacagtcctcatgattctatttttgtaaggccagcagctaagagtggtttttacattttcaaaacaaagacgaatacgctacagagacagttccaggcccaaattctagagtatttgctttctggctccttacagaaaaagtgggtaaacttcttgattagagggtctaggcagaagaattctaaggtatttaaaatttttacctgggaatgcgcttgctggtgaggcggagccggcgtgaagccagtgtgcccagcggcactggtaccacgcgatgctggattgcctaggctggtcagacggagcaaatcggaatccacggaagaaaattcacctcttaaggatccagtccggaaagggatggccgggctcttcctgggcaggggtgcccaaatggatgaggatgctctctgcagccctcggcggatcgcaaaggagcagggctccggtcttctatctgggaaaacatggttgtcactcgtggagaagccaacggagcccctgcggagttttctttccttttctctgctgcaggcagaagaagcgcattgcgcggttcgccgggctgtctgcaactttgggagctgcgccgcgtgggtgcggccagccgaccggcgcgtgcgcagtgagttctcagcgcctcccgccgcgcaggctcggcgttggcctccgcggcccgtgcgagtgcgcccttctcgggtcccctaggtcgcggggcagccggggcggaaggggcttgttcattattttgagagtttgttgtgaacgtcataacctttcgtccttaaatattgccgatacttgacctacgcaagagacaatgtcatgtgattcagcctaatatctcagtatgtatcccctaagaataagggatttttctacatcagggtttctcaaccccgcgctatggacattttgggcaggatgagtttttgctgtctgtacccgtaaggtggggtgacggggtggggtgggggtgtcctgtgctaaacaatcactatttagcagcatccttggcctctacccattagatgccagtagcaaccccctcccccagttgtgacagccaacgatgcctccagacactgccaaacccaaacggtgtggttgggggggttgagggggggaggggtagtggtgagggttgggggaaaaaggagaggtacaaagttgcctcaattgaggaccacaggatcacaatgcacatcatcatacttaggaaatgtaacattgttatattacaataatctatatttcatatttgaatttcctcaattgtcccaaaatgtccttctttaccctgtagtttgtaaaatgtaaatccgagatttaacaagaatcacatagtgcatcaataagaaccacatattgcagttgtcaagtctctttcgcttccttcaatatagagcagttccctagccttttttgtttgtttctcctggtattgacatttttgaaaagtctagcccggtggtcttccagaatatccttcaatttggagatgtcagattggttcctcattataagattcacgagtaatagatatgtacacacaaacatatatgcaggaattctacctaggtgatgtatccaattttatctattttcaaatgactttttagctgtcataacatttaatttataaagcacctccctgaccagcgatttgcaatatttttatcacatacgtaaatttccacattgtaattgggtctaagatatattttcttttttccccgcattgatcttattgtctacttatgggctaatatactgtttttattagagactatatttcagtatctggtagggctagactgcatcattgctgttttcttaagtgtttttttaatgctgggttattttttcatgttaactatagaatatagccccataaaagtactttcaaaaaaaaaatcttctgcataccttttcagtttatgatgttgcattttccttttgaaaagcaaggtttattttttctcgtgctcaagtttcagctttgtgtctttcaaggaagcatcataaaggtttttcacttgttaagtttattcttagagtatttctcttttttgttggtatcgtaagtgggattatctcttccacttttccttataacagctagattcttacataaatgaaggtactgatttctatgtctaattttgtatcttgctaccatattgaatctcctgttgcttctaggagtttcatgttgattgtatctgtatctctttttacacttttatataattgcagtgattatccattttgaagttcaaattgcccgtctttggccatttttggctcctttgtttatttgacacaagctcgaatgtcttgatagcttacttgctttctgacactgtaagagttccagtctcatattgtacatttactgcctcagacctagaatcagccatttctcaaaggtgtccttgttgcttccagtgaaaaaggtatttggatgctacagtctgcactgaaagatgttcatggttaaatggcttatcacttcccagacttttcaacacaagatctaggagagatgtagtttttcaaagaaagatgaaaataaataataaatttgtgttgatat

SEQ ID NO: 1881071 - DNA, 4001 bp, Homo sapiens
ttaaggaggtgaaatagataggacttggtgattgggtaaggcagagggctgaattaagaatgactcactcattcccaactttctaattctgatgactgtggagatggtggtgccaacagctgagggaggggcagctatgaaagcagagaatgagttcagttttggaaatgtccagtttggggtgtctgtgatatctagctagagctgcctggcaggcaattggatatttggttctaaattttgtggaaggggtctgggttggaaattgctaatttgggagctgcatccatgaggatgcaggcaatcccagaagaatgagtgaagtgagcaaagttgttggcttagagtggaatcctgaatttaaggtgcagattcacaagtagatgttaccaaggaggcagaggctttacttaccttcatgtgataatccagagggttcactcttctgaaaccaaggtagtagagagattccagaaggtgagagtcatcccaaggtgtcaaatgtagcagaaagaaccagagagataaggcctgaggaatgcctgcaaggtttggcaaaatgaaagtcatgagttgctcttgcctgagcaaggtgaagggttagagttggggaggagaagccagaatgccaagtgttgagaaatgaggaagcagaggcagccagggaagaccattgtttgaggtccgcatgaaacacttggaagctagttggagggagcacttcaggaggaggttggcttgataattttgtttttaggacttggagaggccaacctgtttaaaggctgagaggaagcagcaaggcaaggaagcctgggaggtgggggaggaagattttagggccagaccccacccagaccgttttcttgtggtttgcccaacactaccacacaccccttaatctcatttaatcatttcaacaccacgaggtttgaaacaaacggtgaggtatgaaacaaaacggtgaggccagggattgggaagagaaagctgtggttccatctcggtccagcgtgctgtccacgccaagaggcgggcagaaatgctagcctcacacaatctaggggaccaggggtggctgtggcgccctcctgcccgcaggaggtgttatcagtgtcgcggactcgggcggtgtgctgcccctggtgagatgtcatcacgtgcgtggaccaggggtggcggccctggtaagtgtccagggactaagggctccctgctctccaggtgtggtggacggggtccgcatgcatgccgtcctcttctctaagacgctaaggcggctgagttctgtaagtagcggcaagaagaacagtcacggagcgggccgggcacaaagggcgcaggccaggtggccccaggcggaaagatggccgcagccagaggctgcaggtggccgggcgcgctccctgcgcgcgtcgcggagaggacgcagcgaaaatcaaacccgcgatttggaaatccggctgcggccctaccccgagataagtcttctgcggagggaagtatttaatttgcatccaggacggtcggaagaggcgccttcccgtcggaggcgaggcgcgggcgcgtgggagctttctcgtgtgcgctcctccctgtcctccgcctgcggccggggcgcagagtccgtggtcatatgagaatgacagttttttgtctgtttgttttggcgggggcgagggtggctaaaggaatgaaagagccttgcattaggagctgggctctggtttcctctccaccattctagcacaagcttcctccatgaccatgactctgggcaacgtctgtctagtcactgagcctcagtttccctgttcataaaatgggagattggactatgatgttgtcatagcccaaaggggatgaagtgggatttgccgttccatttcatcccaccagaaaagccgccctccattagccaccccgggctgacacccagcgtttttggacggcctcgcctccccttacctgcctctttctttcttttgcccgttcgagggtggcaaaggcgatgggtgggcggggcctataaatcgccccgcccctccccgccccttccccgcctcctgacgtcgcccgcgcccctccgccctccgcgcggggatgaagccaccacgtgacctcacatccggcgcgggagtcctgagcccgcgcgcgctcccccgcctgcctgccggctctccccgcagcgtgatcgggcgccgccgcggaggggaggggggttctctacgtcgctggcggcgggggggccgtttcggagtgcagaccgcccccctcccctgcccacctcccgccgccctcccttgttctcgccctgccggctgcacgccgccgccgcgggcgcggaggaggaggagagcgcggacgtcccagggccggcccggccccgccgcggcgcctccttccctcaccctgagccgcagcgcgcggcgccggccgagggcgatggggctgggctgaggcgaggcggcggcggcgacagcggcggccgggtcccccgcggtccctggggctggtccggccgcgagggaggccgcggaggaggcggcgcggcggcggccagtgagcggccccggtgagcggggcgaggggcgggtgggcagcggcgccgggggaggtcgaggaggcgaatggtggtgtcggggcggcgggtaccgggcgaggtcgcggccagccttctcgggccggagttgggcatcgcggggacggggagtgtcgggggcaggtgaggccagggcaggagcccacgcggtgggtgcgaaggcctgggggggacgcgccgcctgccgggggcgagcgtgggggccgggcgcttggtggttggtagtcagagctttcggaaagtcctgtgggaggtggaggtcctgtgggcagaggcgtaggggtgctggcagggccctcgatgagtctgtgcgggaccctagctcgtcctcagccgtggagtatggagctgcttgccatctccgcatttcacagataaaaggagtgagtcccgtggaggaaaagtgacttctgacttgcctgaggcctcccactcggactctgtggcagtgaggactagaaaaacccagggccctttgccctagcagtgctctcgtggccactctcgctatggcctttctgtctctccattcccttcacagagtcaggttctggtggaagtatgacctctggcttttttggggaggtgaggggtagggatgaagggggagggaatcgggttgggattggcaggaactcagctgggggcttcccggtgtggaagaagctttgtgacaggtgtttattgtttcctcttcccatagatctgacagacatccctgaatcttggtgtttggacataggaggtatgaatcactcacataattagccgcttttaatcatcagtgtcttagagctatatttagtggttatattagtgcaaaatgaatgggtgtggagtcgtacacctagaaacagacttgtgttcctctatacgattctaactaaatgagtagaacatacctgggtatgtcatggctactttagatctatgaggcaggaagttagaatttaaggaatctaagaaatgcagggacttgaaagattattgcaaaataaagcctttaaaaagtatcgttgttaaaatgaaagtgtttcgatttgattcctttgaagggtgagtacgtaatgaacagtgctctatctttggttagagctcagcctctttaccaaggtacatgtattaattttgtttcactggaatatatgtgacattattttctctagaggtttgttgctttgcttaatagactacagttgccaaaaatcaatgtgtgtgggcatctcatcctggtttgcaacccctttaaggcaaatcagtgcttggaagttgttcgaagtagtaaacctattattaatgattgttgtagaacataacttttgctggtatctttgatttgcattatcctaccattagatcaggcagagagtgaaataattgagattttgagccttgttag

SEQ ID NO: 1881072 - DNA, 4001 bp, Homo sapiens
cagcctctgcccgaggacgcatgagagaaaaacaccagcctctgcccgaggagaccaatgagggtttcccagaggaagcagctctgggttgagacttaacagatgagaagatatcccagggggccagggggtataagagcatcccagggaaagggaaagcaaaagacggaagtgtgggttcagggggcagcagcacgggcagagcctggggcagagggtgacaggaaggtgggggagagctagctccgggaggactcacctgctgtcctcaggtgttggtgctttatcttggaggcactgggaagccgtggccagggttaagggggtgagatgccaggactgtgctttagtgctctctgcagttactggctgggtagaggagaccgaggagcagaggtgggaggccggagaccagggaggaggctgtggcaggcatccaggtcaatgctggggggctggtctgggcaggagcagagggagagggaaagaggagataattgggaggtcgatgtgaacaatggggcttctacagtgccggcccagagggatgaagtagttcgtggggtaggcgaagggaggcagggagagggagggccaactgtgtgaatggagggagcggcccagggcagctcagcgaggcccgttggctgcacaggcaggtggtgagcgggcggggtcttgctccttgcggggtgcgaaagttggcagggttgggtggtaaccttgggaacctgagaagaaaggtcagggtggagatgtcagccgccattttggccccaggaggtccatccctatgcccggttgattgctctgctttgtgaacacaaccatggctcagccgcagacccaggattagaactctacaaaaagggcttcttggcttgttgtggtggctcaggcctgtaatcccaacactttgggaggccaaggcgggtggatcacctgaggtcaagagtttgagaccagcctatccaacatggtgaaaccccgtctctactaaaaatacaacaattagccgggtgtggtggcgggtgtctgtaatcccagctactccggaggctgatgcaagagaatttcttgaacctgggaggtgggggttgcagtgagccgatatcacgccacagcactccagcctgggtgacagagcaagactccgtctcaaaaaaaaaaaaaaaaaaaaaaaaaaaaaaaaaaaagaggcttcttgaacactcccctcgaacctaccccggcggcctccagagctccgcccatcctcgcccttcaaagttagtggaagccctcaaggccttgaactaactgctcgctgctgacctgccggcctcgttgccctccttctctctgtggctgtgggcaagtgactcacttcttagtcttctctcttggaaaaccggcggctggaccagctgctccccgtggtccctgccagcgctggctcgccgggattccatctccccaccctctctgggttctccacgctctgggctgtcattgcagcgtggatcgtaatgcacgtaatgcagtgtgacatgcattccagcaccctgatggccatgggctctccctcggctcaggcccgccctggggagctgcggaggctgtgttgagctcagctcctcatcttaattctgcaaacctgttttgaggtctggtctggttcccagctgagcactcaggtactgtgggtggggtctcttggcctggggtctgcccggcgcaccatgaatcatcagccagacagggtctttcagaagcgggactgtccatccctgttctccaggcatgatcatgtctgttcatcagagatcatctttacggaggtagagaagagcttccgtctccggggtcacgtgttgtactttgcacatcctccgtggtgaggttcttttctagatctagcccaaatcttcaagaaggcttaaaacaaagctgcattttaagggcttctgggtggaggaatcagattagatccattctgctcagctttctctcaccagaagtgggggctccgccctctgagtgggaagggacccattcctttcacttccccgctccctggctaggtcagcccacacctggcttgggccagagctgcagttgctgttggcacccaaatggtctgaggctgttaggtaacaggtcttggccagacattctggttccgcaggtacagcctacaagttaaaaattgttctaaaaatgcagggcaagctgtctaaacacacacaggcctggggaggggggaggttgtgggacagaggccatagtcagtggagggatgtgttttccacagggactctgggctcagagccctgactccaaaccaagcatcaaactcagggaagagtggcccagacctgctgcagggacgaggggcccagacccgctgcagggacgaggggcccagacccgctgcagggacgaggggcccagacctgctgcagggacgaggggcccagacccgctgcccagagataggatttgcagcccaaccccctcttagcttccctcatttccctcccttccctccctccctctctctctctcttttctttccttccttccttctttcctctctctctctctttctctctctctctctttcgaaggactctcactctgtcacccaggctggagtacagtggcatgatctcggctcactgcaaactctgcctcccagggtcaagtgaatctcctgcctcactctcccgagtagctgggataacaggcatgtaccaccacgcccagctaatttttttgtattgttagtagaaacagggtttcaccatgttggctaggctggtcttgaactcatgaccttaaatgatctgcccaccttggcctcccaaagtgctgggattacgggcgtgagccaccacgcggctagtcttgctctttgttattttgatgtctttcctccagttccatgcttttaggcatctctaaccttccccttcttctttcctctttcccctcttctttcgtttcctcttttctctcccttgcccctactcctctctacccactaggtaaggggatgtgtttttctttttcccctccttaaactcagcccccaccttaagcctctggaaatcagcctggtagtgggaggcagcctcgggcccctccatctgtgaccttggggaattcctgtcacctctctgggcctctgtcaaatggggacaataatacccatttgatcctctgcctcacagaatggctgggaacatcaaaagaggtcagttggttcatttgttccatatttatttaagcacgtgcaatttagccaggcactgtggtgggttctggggtccatagcaggagtgaaagacatgtgcagactgtccctaaatccgctcatccgaaaaccacagagggcttcgaaaaagacaaactccttccctcccccagatcatccgggtgggactctgcagagtcgggcaaagcaggtgggggcggcgtctgtgttttgttgggttttcctgtgacttggagtcacactctgtcaccgaggctggagtgcagtgctgcaacctctgtctgccttctgggctcaagtgatcctcccacctcagcctcccaagtagctgagaccaccacaagcaccactgcacctagctaattttgttgtatttttagtagagacggggcctcgccgtgttgcccaggctgatcttgaactcctgggcttaagggatcctccctgcctcggcctcccaaagtgctgggattgtaggcatgagccacggcggccagcctgatgtctgagtgtttttgttttgtttttttttttttgagatggagttttgctcttgttgcccaggctggagtgcagtggtgtgatctcggttcactgcaacctctgcctcccgggttcaagcgattcccctgcctcagtctcccaagtagctgggattacagacgcatgacatgatgccaggctagttttttgtatttttagtagaaatggggtttcaccatgttggccaggctggtctcga

SEQ ID NO: 1881073 - DNA, 4001 bp, Homo sapiens
aattgttttatagtaactaacatacctatcagtgagccaaatgtatactaaggaaatgactgaaatacagaattttaaagatatatgctcttacggccaggcgcagtggctcacgcctgtaatcccagcactttgggaggcggaggcgggcggatcacgaggtcaggagatcgagaccatcctggccatcgagaaaccccgtctctagtaaaaatacaaaaaaaaaaaaaaaaaaaagccgggcgtggcggcgtgcgcctgtagttccagctgctggggagactgaggcaggagaatggcatgaaccctggaggcggagcttgcagtgagccgagatcgcaccactgcactccaggctgggtgacagagcaagactccgtctcaaaaaaaaaaaaaaaagatatacgctgttacgttatagatgttattcatgtgtctgtctctaacatgaggctttttgatgcttgcccacacagctaatacttgcgttttctgtgtctaattagaagtttccgctgggtattattgttgagttggtataagatgttcaagaccatgaaaagatgaatgtaacagcttcctcatggactgatttttttttcagttcatctgtccttttaagtaatctggctgtttgtaccctgactttaactgaattcacaattattcctcttgccaaaccatgcttccagacttgactgtataaattaaatttcatgcacgcatatgtgagccgtgtgtactgcctgttaaactaagtaatataaacaaattgaaggcacatttgaatgacctttgaattccgtgttagagtagtttttaaacagttatctactgggcaaagtgtaagagacaaccatttacagaggttattttcagtgtgcttcttgaaaacccatttgctcatagaattcagcctcctaatcatgcaagttgcattttgtatggttttcttctctggctccccaccctcttagaatagttctgacgcccccaccggcgaccacctggaaggggctgatccacccccacctccctctgcgaagcgcggagcggctgcggccacccggccagagccagcgctgagctgcgctgcgctgcgtgactggctgcatttctcagccccgacggctgtggttactcaaactgatctcatcgcaggtcgtcacgacacgcgcttcccctcgcctgcacgcggcgtggcgtgagaggggccctggcagccggcgcgcccacccctgatccttcgaggcccacgatgaagcccatcctacttgcaataacggccccgttctcattcttcaaaagacggctcccagacgtcaacaaagaatctaacctacacagcgccggccctcgctcctttcagcctcagcgagcgctgcccttcattaccccccagcgcacttctggacactgcgccgggtcgccggggtcagccgcccggccacgaaagtcgcccccagcgtgccccaggcgtcagtgcacgccgggctcccggctccaggcaggcggggtgaggcagctccgcgaaggccactcgctggcgaccccttcccgggtctcctagccctggccgggctgcccccgcgcccgcccccgccctcgaaatccaggcagtgcgggaggccgccttgctgctctctccgcccgcacagggccgcccgacggagcgggcagggagcaggcgccaaggaggccgagaggggcccaggggcgaggtcgactctcagcccgctgtccccttatcccacgtttcgcagcctgaggtgtttgttgtatatcgggaactgacacttttcggcgttaaaatgagggcgtcacctgctcgaactaaagtcggtggagggcgtctggagccgggcggaatctgggatgcctcgccggattacgcggcggggtcggcacgcgaggcaggctccgggcgcaccaggaagcccgagcgtgcactaaagcggcggaagcaggcagcgggggcggggccggcgggctgcaggcacgcaggcggcgcggcggcctggggttgcgtgacctgccgggctgcggtcgcacgcacttcgtgcttcaggcggccgtcgccgggcgggaggtgcaggtgctggagggcggcgcccggcttctactttcaaaacaccgccggggagggcagtcacgctatatttctgggacagggagtgagttcaccgggggaggacacagcgtccccttgttatcacaacgtgggtaacattcggtaataaaacgcgctcggacaggatgtattaaacgaattgggaaccggagctgctctttccataagcaatcaagctggggaaactttacaaggaaagctttaaattgcgatgcatggcgcaggagtgtggttcgtgtgacatgcttacagagaaaggaaccagagcaaggacggtggctttgggacgaaatttctgtccgctctgcacaaagactaattacagagtcgtgatttggggcatgctctcattcctcccggaagctttctttgcagtgttttattttaaaatcagaggtggttgatctccctggcatacgaacatgagagacctcatttatatggtgactcaaaagccccaaggacataaaaaaggtgccacgttttaagacaccagaatctaagttccttctcaagatcatgtgagcaaaaagtgttttgcccgcacagatatctatttacataattaaaatgtttgtagatttgcagataaatcaagtttagaggacaaaacaaaaaatgttaccacgatagtttttaacacaagagcaccccagtcaactgaaagcttgggaaattccacattagtttattttctatgtacttaaactttgatttggtgaatctatgctctcttatttccctattatgactcttaggcctatagtgcctagttacacacacatttgtttttgtgatacatgtaacattataggaaaggggggattctctagggttagaatagacacaataaactcctaggaagctttctcaaaaatacatattctcatctcagcttaccatatgtgggaaaaggcagcaagattcactgtttaattttaaaatgttctaccagctgactgattctcacgtgggattttttttttttttcctggtctgcccagcacgcttaatttcttctgggacagaactgcctacccttcctgcctggattgtgcttctgcctttactcttctagaatgtagttagaaagggaggtgtcattgtgtgtggccttgcctacttggtccccacacttggtcgagaggcatatacctgactcaaggtaagccaatgacaaacagcacttgactcctcctggccttagtaatttggttaaagagattgcatatcatccaagttgtgccaaagaaagtcatttcctggcaattttctaacaggagggtgggcatagatgccttctccccagttccttttggtgacaaaattggaccgtcagccaccactgctctgccatgtgcagagactgccaacaataaaagaaaatggaaccaactttcattaagtggtagattctaagggctgagcctttttatggcttttgcaaattccacattgcatatctgaggttctcaaagcaatactggctcctgctttcctgaaacttgattgtttacctcttctgattctatgagaagagatatgtatttatagaaataataaaatatacatttagaatgctgtttagaatattacggttttttttttttgtagttataacacaatttttaacttgctttttgtcacagaacaatctattgggacattcaaccacatcagcaaagaaccacatcatcatttctaacagctgcacactgttgttcgagtaaatcaatgtatttcacattttagtatttcctgttttaaaacattataagactgtggtgaacactgaatatatgtgctaataagaaagaattttcctaaagcttccagcaaacgtctcttggaacttctagtcataattgga

SEQ ID NO: 1881074 - DNA, 4001 bp, Homo sapiens
agacacttttctggctcccccaagccagtggcatgaacccacctttggacttcattgaaaagaacttccaagatttaatcttccaagattaaagattttgatatccaatgtatggagaattaattactctctatacagtttttcttcattattttctcaggccaaattcctttacagtaagtgttaggcatgtccaaattattttattggactggaattttgttggtttgaatataggccatgccagaaatgctgataaaatgaaatgaggatactgatggtggtggtgaggatggatggatggatgcgtggatcgatggatagatggatggatggatgcatgcatggatggatggatggatggatgcatggatggatggatgcatggatggatggatggatgcatgcatggaagaatggatggatagatggatggatggatggatggatagatggatgcatggatggatgcatggatggatggatggatgcatggatagatggatggatacatagattggctggtagtagaagtagtggcagtgttataagctaagtagggaaaggtctaacagctccatttcccaaacctggaagctgaaattccacaaagcaaatgactggcccaagcttaccacaggtgagcctgacgtagaacccaagccttctaagttatgcactcctcaagacaccaacttgtacttcagtaatctgtgtcacgctgtgactgcatatccatgtcctgccctggcacagagctttccagactcagtcacagtcataggtgcattttgcctggtttagttactaagtattggccaattatcaagtcatgaagggaatcgtcaccaggactcgggattccagcttcattcttgaatccctaaagccattcctggatttgaacacatatttcctgacccgttaggtagaagaagaagcaccagggtaaacagcagcgatttccaaattgcggtgtggataaaggatttgttaaaatacgtattcctgggcctcatttccctgccaggttctgaatgaggaggtctgaagcaggtgcaggaaatacaggttcaatagcaaaacacttaacctctttgaagtctcagtccaaatgtcacctgtgtaaggtttatcctgaccactctatctaaaattgcaacacacatacaacctcgtcactccccagcacctcaccctgctctccttttccccctagtgctctcacctgttagatattgacttgtttctttttaatttttttttttttgagacagggtctctctctgtcgcccaggctggagtgcagtggcacaattacggctcactgcagtgtcaacctcctgggctaagacaatcctcctacctcaggctctcaagcagttggggctacaggtgcaccaccacactcagctaatttttgtatattttggtagagatgtggtttcaccatgttgcccaggctggtctcgaactcctgggctcaagtgatccttccacctcagactcccaaagtgttgggattacaagcatgagccacagcacccggctgacttattgcttatacttgtttgttcttggcctcctttggccaggacctgtcttcctcattgctgaatcccatgagcctggagccatgcctaggtcagtaactccctgttgaaaacaacagagactgaaggaagaagtaactataattaatgcaggtggttcgagatgcacacttggagaaacactgctccaagagcatgaagttggcaccagcctgacgggggttgggtcccagctctacccacctgctgtgtgacttcagacaatttcagcctcctgcgcatcagttctctctcatctgtgaaatggagacaatccttctatcttagggctgcaacacaaggatccagtaatataaccaggcacagagcaggacgctgcagcgatactccctcccttatcttctgggtggaattttgcaagcaacggtgtctgagcagaaaatgaatctgaagcctcccaggggggagggagcacattctgtttctcatcaggcggagaggcggggaggaagagtgaatggaggtcacccatcgaggggagtgtataagtcatccctgccggctacctctgcagctcacaggacacacgttcacctccctccctccctccttcccttcccaccagcagaaatgaacaagcagtttctctgagtaaacagatgataaatcactggctagaatcagtactcccgccaaagcagcatcattggagatctcaggcagagcaagcgcacgtgcttggggactgcaatttgggtttagaggcagccctgccaggcctgcacactgccgggtgagcattcctccccaaacagcccagcccgcttccccggggctcttggagtaagtcccgcagactcttgccagccccacctggaaggacttaagctccagcgtgggggatgcgggtgagatgggaacgaggatttcctgacagcgatcctggaatgggtgactgagcttatagactttttctctgagttttatgaagcagataggatttggaggtaaagagacaaaataaaaaatgtctacacacacacacacacacacacacacacacacacacacacacacacaaagacaaacacattatacaccccaaagagaggaaaagagaacagcccctgcagagggggatcagggcatctgtccacatggatgtcaggacagtggcggggacacacaatccagagtccagagcccacgtccaagctccagctccaccactcactgtccagtgaccttggaccagtctctctcccagcctcctctcggggtttcttcctcttgaagcacgagcatgcatccctgatgctccctgagctgatgtttcatgggtctctgatttccagttgggccctggccaggcgcattgcggaggcagtagggaaacttgcccaaatgtgtggccaccccaatcttcttggccagcccccagccccagctgagatccaattcaaagcttggacctttactttcagagtctacgatggaaggagcaggattcgtactgacgtcccacacctttttcctggctttctgtccccggtggaggctctgtgcctggcaggctaaacgccctctgagctcttagaggcagtttccaccctcagcccctgccccagctgtgacagcctcagggtcaggctgagccctggaaccgtatctgctcatctggattcaaggagagactactgttcttcaaagtaaccccactcccggtggaacccagccgccactcccacagggctgtccaaagtatcccactagagaccccagcaggagcttctgaggaattagcgtggaaagggatctgccagggtctggttgtgtgaccttgagcaagtcccttaccctctctgggtctcaatttccccacctggctgggctggctctgtgccatctgcccaatgccctgtctggccgctggcagcctctccctccctggggctgtagggaatgctcccctcactggccagccaggggtggggttcaaatgggggaagccaggagcaacccttgcagtcagggctccaggcaggaatcagaagagaagcctccgcctcttctccccagcaacatctcttcccatcttagaattatgggctggcaaagccagggaggctatcaggcatcatccaaaccattatgtacatggccttcctccaaatgaaatctcacacaaatatcagattggaggtttgggaatggggataaggggatgggcagagatgaaatatggcgtggaacatttatgataaagacagctctgggccaggcacggggtggttcacacctgtaatcccagcattttgggaagccaaagcaggaggattgcttgagaccagcctgggctacacagtgggactccgtctctacaaaaaataaaaaaaaattagctgggcgtggtggcgcatgcctgtaattccagcctctcaggaggct

SEQ ID NO: 1881075 - DNA, 4001 bp, Homo sapiens
cactgacttagagttaagcagcactgagccacctccaggggaacaggcttagagcagcttgctcactggccttccttccctttctattctatttctctattaccctgtgattttttcctggaaactttctaattatttgcacaggaattcctgtgttagggtttcctttggggccctaagacacatgatataataagtatttttaaacggatgactcttatctttaaaagcagtataacttgctacttttttgacatattcttatgtaaaagataaagtcactttgccactgctgaatgtaaacagagaaaattgatttggaaaagttttaaaattcaaatttaaatatgaaagatcttcatcctttacccgtgatacgtgctacagatattttctcccaatccagttttttttttcagttgtcttttgactttatgatgtatttgccatgctatttgttttatgtggtcaaatttatcaactttttattttattgcttatggttttttgagtcatagttagaaagcctttttctttttagtacttgtattgtttcatttttcacatttagatccctgatccatttagacttcatttttgttacgctataaggtgtagatctaattttatctttttccaaatggccaaccagttggcccagctctgtgtattacaaagcccaactctgctccaatgatatgtgatagcacctttatctttaactttctacctgcacttggggttatttctggattttctattctattctacttgtctttttatattattcacacactagttccacatcttaattatagagactttgtaacctctatagtcataaaacctctatgactgccttcataacctgtataatacagttttaattacagaaactaaagacaaacataactgtaaaccaatattgaactctggctagttggtctgtttttacacagtggtatgggttagcaattttgaatctactttttgcacacgattgagcaaaaaagtgaatatcttgtggataaggagagccagctttctcactctcagaaaacagttacaattacagaaagggcaaatctgattgaaccgtgagatgctgcactggaactgagttaacagtatgaagtcagctgttttttaaacatacatgtagatagatagatataaaacagatatagatgtgcctggattgatgcatgtatggatgtgtgtggggagggtgtgtgtatacatataaatatacatgtatatatacgtacatacacacacatatgtacataaatatgtgtgtttgcatctctctctctctacatatatatatacataaaatttcctagcgttgtctgctgagacagtctagaagcgatggcatcctagtagcaacgaacacaacctacagcccagatacggctgtaaaatagcattctccaaaaaaaggaaccaggattctttggagaaatgtctgattccaaggcaggagctaagtacaagatgagcctggaacatcttgtgtccttaaacagagaatgacggggggacatgttaaaaggacacgggaaccagaagtaagcaaatgaataaacgggggagaaaggaaagcgcttccttactatagaaaaagagaaaacagaaaagcattctgtagctcgtaccgtgtgggggcgggggaagacagaggcctggctgcagaaggacgccctctggaagggggactggaagccgaatcccctgacaagcggtcgcggtcctgtctttccgctcgagcttcgttctcccttcaccacccaccccgcgcccccacgcaccgatccaccgcggctttatgcctcgtcaccttggcaacagcagcgggctcaggcagtgtcgccaccagtttcttgcacccgccagcagcactgacgctgcagaggttgccgccatgtcccctcggaccggccgcttggtgaagtgcggctgcgtctccgttgtcgtccacatcacctccgttcggtgtaaaagcctcttgtcctcctctggccaccgtccaggtctgaaccaagaaatgagccaatcccagcgaggcattcgggtggggggcgtcaccgttgaaaccactcggctacaatctgccaatcgggctcgtgcccgcggggtgtggtctcggcctccgggaccctgggggtctgcatctactccggggtgatgttgggggctgggaggatctgctctgtccccagcctccttaggccctgggtgtccctatcgccgtttccgcccaagaaccgcaagggcccaccctatcgcaggctccagggcaagaaaccctcctcttgaccttcaatctttagagaactgaggtgaagaaacggggcgggagactgtcgtaggatacaaaggagtggagaataaaacaatgcaaaattgtataacattttcaaaatgtaaaaaaaaaaaaaaactgattaagaaatcctcttaaccatctcaaaactgagattactgaatatcttaaaaatgaaaaaaaaaagagcaagctctgcatattagtacctgtgggatataccaatacagtgcttttaaaaattcaaaataaaagtaaattaaataattcagaaaaaatagcaaggtaaacctaagaaaagccgaaagaaggaattcgtaagaataaaagaagaaaataaaaaatagaaatggaaatgggaatactaataagagatttgaaaaaggcaacaatagggtggttggctcaagaaagaaagaggagcacatcaaaatacaaaatgataaaggggaaataaccatagatacaggaaaacttaaaagcattgcatgatcagtcagttctacataataaatttgaaaacttgaatgaaatggacaagattccaagaaaatataatttaccaaaacattccagagatagaaattctaagtagaccaattaccatagaagaaatagatgttggccgggcgcggtggctcacgcctgtaatcccagcactttgagaggccgaggcgggcagatcacccgaggtcaggagtttgaaaccagcctgaccaacatggagaaaccctgtctctactaaaaatacaaaattagccgggcgtggtggcacatgcctgtaatcccagctactcgggaggctgaggcagaattgcttgaacccgggaggcggaggttgcggtgagccgagattgtgccattgcactccagcctgggcaacaagagcgaaactcggtctcaaaataaaggaaaaaaagaaatagatgttattagagaactgcatttctccatagctgaatccacagaagcaccaggcccaaattatttcataggataattctgtgaaaacttaaggaacagagagttggttgctgttgattctgccttaagcacagaaaaaagaggaagcatttcaaattctattcatgaagtgagcataacatttataccaaagtctcataaaacacccatacagcatatacgtatacattgaccatagaaattcttactcatggccgggcgcggtggctcacgcctgtatcctagcactttgggaggccaaggcagacagatcacctgaggtcaggagttcaagactagcttggccaacatggtgaaaccctgtctctactaaaaatacaaaaattagccaggcttggtggtgtgtgcctgtaatctcagctacccaggaggctgaagcaggagaatcgctggaactcgggaggtggaggctgcagtgagccaagatcacaccactgcactccagcctgggagacagagcaagactccatctctaaaaaattaaaaaaaaaaaaattcatactcatgaatattactggaaaaatcctaaatcaaataaaaattataataaagtatttctattttactagaaatagctgggtacagtggcttgtgcctgtagtcccagctacttgtgaggctgaagtgggaggatcccttgagcccaggagctctaggccagcctgggcaatgtagtgagacctcccat

SEQ ID NO: 1881076 - DNA, 4001 bp, Homo sapiens
tgctggttctctggtaaggacgactccagggattgaccatgcacactgacttagagttaagcagcactgagccacctccaggggaacaggcttagagcagcttgctcactggccttccttccctttctattctatttctctattaccctgtgattttttcctggaaactttctaattatttgcacaggaattcctgtgttagggtttcctttggggccctaagacacatgatataataagtatttttaaacggatgactcttatctttaaaagcagtataacttgctacttttttgacatattcttatgtaaaagataaagtcactttgccactgctgaatgtaaacagagaaaattgatttggaaaagttttaaaattcaaatttaaatatgaaagatcttcatcctttacccgtgatacgtgctacagatattttctcccaatccagttttttttttcagttgtcttttgactttatgatgtatttgccatgctatttgttttatgtggtcaaatttatcaactttttattttattgcttatggttttttgagtcatagttagaaagcctttttctttttagtacttgtattgtttcatttttcacatttagatccctgatccatttagacttcatttttgttacgctataaggtgtagatctaattttatctttttccaaatggccaaccagttggcccagctctgtgtattacaaagcccaactctgctccaatgatatgtgatagcacctttatctttaactttctacctgcacttggggttatttctggattttctattctattctacttgtctttttatattattcacacactagttccacatcttaattatagagactttgtaacctctatagtcataaaacctctatgactgccttcataacctgtataatacagttttaattacagaaactaaagacaaacataactgtaaaccaatattgaactctggctagttggtctgtttttacacagtggtatgggttagcaattttgaatctactttttgcacacgattgagcaaaaaagtgaatatcttgtggataaggagagccagctttctcactctcagaaaacagttacaattacagaaagggcaaatctgattgaaccgtgagatgctgcactggaactgagttaacagtatgaagtcagctgttttttaaacatacatgtagatagatagatataaaacagatatagatgtgcctggattgatgcatgtatggatgtgtgtggggagggtgtgtgtatacatataaatatacatgtatatatacgtacatacacacacatatgtacataaatatgtgtgtttgcatctctctctctctacatatatatatacataaaatttcctagcgttgtctgctgagacagtctagaagcgatggcatcctagtagcaacgaacacaacctacagcccagatacggctgtaaaatagcattctccaaaaaaaggaaccaggattctttggagaaatgtctgattccaaggcaggagctaagtacaagatgagcctggaacatcttgtgtccttaaacagagaatgacggggggacatgttaaaaggacacgggaaccagaagtaagcaaatgaataaacgggggagaaaggaaagcgcttccttactatagaaaaagagaaaacagaaaagcattctgtagctcgtaccgtgtgggggcgggggaagacagaggcctggctgcagaaggacgccctctggaagggggactggaagccgaatcccctgacaagcggtcgcggtcctgtctttccgctcgagcttcgttctcccttcaccacccaccccgcgcccccacgcaccgatccaccgcggctttatgcctcgtcaccttggcaacagcagcgggctcaggcagtgtcgccaccagtttcttgcacccgccagcagcactgacgctgcagaggttgccgccatgtcccctcggaccggccgcttggtgaagtgcggctgcgtctccgttgtcgtccacatcacctccgttcggtgtaaaagcctcttgtcctcctctggccaccgtccaggtctgaaccaagaaatgagccaatcccagcgaggcattcgggtggggggcgtcaccgttgaaaccactcggctacaatctgccaatcgggctcgtgcccgcggggtgtggtctcggcctccgggaccctgggggtctgcatctactccggggtgatgttgggggctgggaggatctgctctgtccccagcctccttaggccctgggtgtccctatcgccgtttccgcccaagaaccgcaagggcccaccctatcgcaggctccagggcaagaaaccctcctcttgaccttcaatctttagagaactgaggtgaagaaacggggcgggagactgtcgtaggatacaaaggagtggagaataaaacaatgcaaaattgtataacattttcaaaatgtaaaaaaaaaaaaaaactgattaagaaatcctcttaaccatctcaaaactgagattactgaatatcttaaaaatgaaaaaaaaaagagcaagctctgcatattagtacctgtgggatataccaatacagtgcttttaaaaattcaaaataaaagtaaattaaataattcagaaaaaatagcaaggtaaacctaagaaaagccgaaagaaggaattcgtaagaataaaagaagaaaataaaaaatagaaatggaaatgggaatactaataagagatttgaaaaaggcaacaatagggtggttggctcaagaaagaaagaggagcacatcaaaatacaaaatgataaaggggaaataaccatagatacaggaaaacttaaaagcattgcatgatcagtcagttctacataataaatttgaaaacttgaatgaaatggacaagattccaagaaaatataatttaccaaaacattccagagatagaaattctaagtagaccaattaccatagaagaaatagatgttggccgggcgcggtggctcacgcctgtaatcccagcactttgagaggccgaggcgggcagatcacccgaggtcaggagtttgaaaccagcctgaccaacatggagaaaccctgtctctactaaaaatacaaaattagccgggcgtggtggcacatgcctgtaatcccagctactcgggaggctgaggcagaattgcttgaacccgggaggcggaggttgcggtgagccgagattgtgccattgcactccagcctgggcaacaagagcgaaactcggtctcaaaataaaggaaaaaaagaaatagatgttattagagaactgcatttctccatagctgaatccacagaagcaccaggcccaaattatttcataggataattctgtgaaaacttaaggaacagagagttggttgctgttgattctgccttaagcacagaaaaaagaggaagcatttcaaattctattcatgaagtgagcataacatttataccaaagtctcataaaacacccatacagcatatacgtatacattgaccatagaaattcttactcatggccgggcgcggtggctcacgcctgtatcctagcactttgggaggccaaggcagacagatcacctgaggtcaggagttcaagactagcttggccaacatggtgaaaccctgtctctactaaaaatacaaaaattagccaggcttggtggtgtgtgcctgtaatctcagctacccaggaggctgaagcaggagaatcgctggaactcgggaggtggaggctgcagtgagccaagatcacaccactgcactccagcctgggagacagagcaagactccatctctaaaaaattaaaaaaaaaaaaattcatactcatgaatattactggaaaaatcctaaatcaaataaaaattataataaagtatttctattttactagaaatagctgggtacagtggcttgtgcctgtagtcccagctacttgtgaggctgaagtgggaggatcccttgagccc

SEQ ID NO: 1881077 - DNA, 4001 bp, Homo sapiens
gacaaatggaatagaacagaggcctcagaaataacaccatacatctacaaccatctgatctttgacaaaaaacctgacaaaaacaagcaatggggaaaggatctcctatccaataaatgatgctggggaaactggctagccatatgcagaaaactgaaactggaccccttctttacaacttatataaaaattaactcaagatggattaaagacttaaagctaagacctaaaaccataaaaaccctagaagtaaacctaggcaataccattcagaacacaggcatgtggacaaagccttcatgagtaaaacaccaaaagcaatggcaacaaaagccaaaatagacaagtgggatctaattaaactaaagagcttctgcgtggcaaaagaaactatcatcagagtgaacaggcagcctacagaatgggagaaaaattttgcgatctatccatctgacaaagggctaatatccagaatctacaaggagcttaaacaaatttacaaggaaaaaaaaaccccatcaaaaagtgggcgaaggatatgaacagacacttctcaaaagaagacatctatacaaccaacaaacatgaaaaaaagctcatcatcattggtcattagataaatgcaaatcaaaaccacaatgagataccatctcatgccagttagaatggtgatcattagaaagtcaggaaacaacagatgctggagaggatgtggagaaccaggtatgcttttacactgttggtgggagtgtaaattagttcaaccattgtggaagacagtgtggtgattcctcaaggatctagaaccagaaataccatttgacccagcaatcccattactgggtatatactcaaaaaattataaatcattctatgaagacacatgcacacgtatgtttattgcagtgctgttcacaatagcaaagacttggaaccaacccaaatgcctatcaatgatagactggatgaagcaaatgtggcacatatacaccatggaatactatgcagccatagaaagaatgagtttatgtcctttgcagggtcatggatgaagctggaaaccatcattctcagcaaactaacacaagaacagaaaaccaaacactgcatgttctcacttgtatgtgggagttgaacaatgagaacacatggagacagggaggggaacatcacacaccagggcctgttgtgggatggggggactaggggagggatagtattaggaaaattacctaaggtagatgatgggttgatgggtgcagcaaaccaccatggcacgcgtatacctatgtaacaaagctgcatgctcttcatatgtatctaagaacttaaaagtataataaagaagatcatattttaactaaatcatgttaaactattcagttttatcttgaatgaatatgagctgattattcaaaacatctcaagaacctagttgttcagagaccctggacaaggacagtctgtaaagtcgtttctataactaaagctctattatcccgtggttgaaaattcttcaatgccagatagaaccattatgtgatttcagggacactggaaggtatctccaccccttctgaaatcccatcaactgcatgacacctgcagtttatcttgcaactggatcacaatgaatgcaagaataataggacggctgggatctcattcaaagctgctcagaatacttactatacttactatgctttcttaaccaagaaatcaaaatccagaaagtgaacaccagcatactcaaaccagttagtgccatagtcagtatatcagacaaccttcccaaggtgaagagggatgtgatcttcctctggcaagaggaataaaactatcaaatctgaaataaatagaaattattttacctttcacacattttcataatttcccctgctgcttcagctaattaattatcaatgctatttgtgtttagacagaagggtttgtctccttcacagcccatctgcttcttggtaaccttgctgtgaagtcattgcacagcagagttgctgataaagctatcatctccatgacaacctgctgctatgtcacaaatgcaggagtgtgacctcactgcagctaaaaggagaaatcaaactggtgtctgatgtgcgaggcaataggaatttttaattagacacatagtttattcacttttccctagaaatatgagaaggatccttatagagaaatattactacaataaccttactgctaattattaaatattaaatgaacattttaatattagtggtacaatatacatgtgcaagtggttatacttgggtgaaatgtcctatgtaaatattgtattcatatcctgaaaacattctataattattttgttatatatctcccagcaaagatgactcatcttctggtatgatatttaccaagcttgagaaagtaagcagcttcttcctcactgattacatctatttgtacagcaacccatatactgaaggggaattgtgacatgtagccactgtatctctcttagagaagaagctaaacacactgagtgagaaggtgaattctgaaatcgacccacaggaactgttaccataagttctgatcagcgtgttgttttcttctttggatggttggttaactagttactcagttgtaagatgtgggcagtaaatattacaacctggaagtgctgcatctctctagctgtcggagagctaaggcgacatcattcattggccatttgttgtgtgtgcatgtactagatactgtttagaggaaaaaaactagaagaggtgcacagcctgtaccctgtagttgtttagcatgttatgggagattggcaggatcaacaggtacctgaaagcacaaggggatgtagaattgtcatatttcaagattaatttatataggtgctaggtatagaaataaaagaaaaagacatcagacaaacttcacattagatggaaattttcaaattgatgattagaaagtaagaatatgaaacagcatcttctaagtgtttactatgtgtgaggcaccatgctaagcactttgcattcttcatatcgtttaatcctttcaacaaccctaggacataggctttatggtacattttatagatgagaggattatggtatattttatagtttgggggttaagtaacttgtccaaatcagtaggcagcaaattggcaaatttcagaacctgtgtattccagaacctacaaatttatggcaaatttatgctgcctgggaagatcagataggaaaattgcataaacacagttcagagatgataataggcaacatcctatcgaggaccagtcaaatcccctttgttccactcttctcatttgaagtgacctaaggcattgccggatggactgacttccctacagctttacccataatcccttcaaattcaaaaatacctttttctttcttgtaacactaaagaaatatagaagccagcatatgttacttgaaaatacttccattcttggaatcttccacctttgaacattctggatttttaagaattaactgaactgtgtgggaagactcagcaggattaatatattgatggaaatgatggattctactttttcctcacttgcctgcgtacttaaaactgcagttatttatacactgtggtttaggcatcttctccattatataacatccattgatctataacactcatatgctttccgatataaatatttcatccattgtacttgtgtgtattgtgctctcatttgtccctggaaacattaaagaggaaagatacttggatgagttaagagacaacagggtattcttaaagctgaataagttagatttgtgtaaatggggatgggaattactggttggccttaaagtttaggttctaaattggaggcaactgaatggtaccaaacattacttatcaggaatgttgtaggagctagaagaaatgttgtttagcttttccttgcttatataaactcatacaaaatttacatttttaagaggaaaaagcag

SEQ ID NO: 1881078 - DNA, 4001 bp, Homo sapiens
agaaaataatggtagagaacaagagtctctggctagtaatccagaaaattctcctggatcttgttgaaggctgtcaaggtggtatttctctgagtctggaagaattacagcattattgggtataaggtaccccataaagcagatatggcttagatcacaacctaagccatatttgacccatatttgacccaagtcttttcaaatatgtgaaaagtcttcccaagaaagacagctacaaataagcccagacagtgaagactacaataaatactcaccttttctcttttttaattttattttttaaacctctcatatggtgctgcatgcccaagattttaatgtccagacactgaagaacatctactaccatcaacaccatccaggaaaaaaacatgacctcaccaagtgaactaaataaggcaccagggacaaatcctggagaaaaagagatatgtgacctttcagacagagaattcaacatagctgtaaaaagaaaaaaaaaacctgaaagaaatttaagataacaaagtaaagaaattccaaattttatcagctaaactcaacaaagagattgaaatagttacaacaaattaagcagaaattctggagctgaaaaatgcaattggcatgctgaagaatgcattagagccatttaatagcagaatggatcaagcagaagaaatagtgagcttgaagacaggctatttgaaaatacatagaagagacaaaagaaaaagaataaaaacaacaaatcatgcctacaggatctagaaaaatagcctcacaaagacagatctaagagctattggttttaaagaagatgtagagacagaggcaggggtagaaaaatttattcaaagggataataacagaaaactttccaaacctagagaaagatatccatatccaactacaaaaatgttataggacattaagcagatttaaccccaaaaagactatttcaaagcgttcagtagatcctccaaaagtcaaagataagaaaagttctaaaggaagaaagagaaaagaaacaagtaacataccggtgagctccaacacgtctggcagccgactttacagtggaagccctaccggccaggagagagaagcaataaatatttaaagtactaaaggaaaaaaacttttaccttagaatagcatatacagtgaaagtgttcttcaaataaaaagaaatactgacttttccagacaaacaaaagctgaagtattttatgaataccatgtctgtcctaaaggaatgctaaagagagtacattaatgagcaataaatgatcacctaaaggtaaaaaaatcctcactgctaataggatacaaaacaaaacacaatattataacactatagctgtgtggtgtgcaaactactcttattcaaagtaggaatattaaataatatccaatcaaaagtaatagctacaacaacatttcaagacatagcacaataaaatataaatagaaacaacaaaaagttaaaaagtgacgggatgagcatacctgtcctgagccggccgatgtggtggaagctcggagctcgggagccggggaagccctggagcgtgggcggaagggaggccgccccgagagccggaagcctgggcaaggaatggaggcctcgggcgccccccagcaacagcagggcggcgccacactggtcctgcgcgaggctggccgccggcgacggcgggacgctctgggaggtcggcggaaagcgcagcgccgcgactggcggtgcttaggcttagagggggagagcagcccggccacgggcaagcggctccggggtgcctgatcccagcctcgcggccccgggttggttatgacgcctggaatcaggcgcgcgtatctggacccggctcttgggccagccaggggccactgccattgtccacgtccatactaccctgaacacgagagaaacccaagcggcggcccgtgggcacgctcggcgccactgctcccaccacagggacaggcgcactcgacaactttcagggcccacagcaccaagaggacagggaggagccaacaaaggaatgacgctaggaaacgcacgcccaaagcaaccaaccaatccaagtaaaaacacgtctcagggctccgttggttttcccgcgtgggcggccctgccctcctgttctagcccggcccaggcaccctccaccctaccctcgccaaagggtcccctgtctaccagagcagagcctccctctccaaggctctgttgctccccctctctagctccctcaccctctccctttctctacttccctctccaccttgctctctctctctctctctctccctctctctcgcagtttccccgtccctctctgtctctctctctctctctgtctctctctctctctctctctctctctctctctcgcagtttccccgtccctctctgtctctctctctatcgctgtttctctctctccttccgtttctatctctccatccctctgtcccttgctcttcttcaagctgtctgtgtctttgtgtgtctgcgtgtatgcttgtgttcccgcgcgtgcgcccgtatgtgtctgtttgggagtgggtttgctagtgattgtggtggggtgtgtctggatgtccgtcagtacctttgtcctgggatcaggctgccaactctattgccagcgcgtgggtgtcatagttgccgtgatagtctcacacacgcaggtgtgtggatctcgttcattttcatgtagacaatgagagcgaaagcacagagaaaaagaaacgtcccgtgcatcacggcctgaggatggattcctgttttctgcaaaatggggagtcttcgatatagcctgtttgaaaactggaaaggagagcaccgacacgatgctggtcttccacgcattcctggaagtttctgggtccccacagagctcgggaaacagtcaacatggtcacgctttccgggggcggcagagacttgagtaacaggcacctttgcagagagcaaagaaacgtggaatccagaatcacgcttcacttggcctgagcgtgacttctgtgtggatgggactatccgcctcgcgctctgttgcagggctaaacgtggggatatgtcatctgtgaaccatgtggatgaaaaacagacaaccacccgagtctccgctcattgctctctggggaattcgctcattccttcggaaacggaattcgtctgaatcgctctgggatgaagtaacccaggctggcgatccggagggccgctgagctccccaccggccaacggggctgtgggcccagcacttagcccgcactgggcacccaacattttcccggattgctgggtcctgttggttctggaggcagaagaccgtttttctgtctgccttcggttctctgtttcttgctccttttgtccctcggtccatcctgccctctgttcttccctccctgccctggttttttcctccctttctccctctctccctcttcctctcccttccagggtccctccgtccatccatcctttcctagctccatccttccgtcccactctgtctccgttcctgtcctcatctctgcctgccttccctcttgcctggaaagggcagcaccccggtttgcgcggggtctcgggtctacatttagttgcaaggcgctccatggtgctggcgaggaggctggtgggacacgggttggcaagtgatagtgagagaagaggcagaggaatcgagccgcagaaaggagaactggcctggcttctgccccgacccagtgtttcgcggactgaggtctccgccaacccgactgaagaacgcggggggaaaagggatgcgagctccgcctgggctggttagaaaacctaagctgttgcctgcaaacccccgcatgagcagtagacagtccacctcccggtacgtggacgggccctgggatccccgggatgctcaggaaagaatgacagccctcctctgtgtggagtctctcgccggacctggaacccagggatcctagacaggtca

SEQ ID NO: 1881079 - DNA, 4001 bp, Homo sapiens
ttcaggtctgatccagggcagtcatagtggtggtggccaggggtgcttgtgtctttcttctcccagctttaggtggcttagaacagagagaaagactctgtatctttgagagaaaataatggtagagaacaagagtctctggctagtaatccagaaaattctcctggatcttgttgaaggctgtcaaggtggtatttctctgagtctggaagaattacagcattattgggtataaggtaccccataaagcagatatggcttagatcacaacctaagccatatttgacccatatttgacccaagtcttttcaaatatgtgaaaagtcttcccaagaaagacagctacaaataagcccagacagtgaagactacaataaatactcaccttttctcttttttaattttattttttaaacctctcatatggtgctgcatgcccaagattttaatgtccagacactgaagaacatctactaccatcaacaccatccaggaaaaaaacatgacctcaccaagtgaactaaataaggcaccagggacaaatcctggagaaaaagagatatgtgacctttcagacagagaattcaacatagctgtaaaaagaaaaaaaaaacctgaaagaaatttaagataacaaagtaaagaaattccaaattttatcagctaaactcaacaaagagattgaaatagttacaacaaattaagcagaaattctggagctgaaaaatgcaattggcatgctgaagaatgcattagagccatttaatagcagaatggatcaagcagaagaaatagtgagcttgaagacaggctatttgaaaatacatagaagagacaaaagaaaaagaataaaaacaacaaatcatgcctacaggatctagaaaaatagcctcacaaagacagatctaagagctattggttttaaagaagatgtagagacagaggcaggggtagaaaaatttattcaaagggataataacagaaaactttccaaacctagagaaagatatccatatccaactacaaaaatgttataggacattaagcagatttaaccccaaaaagactatttcaaagcgttcagtagatcctccaaaagtcaaagataagaaaagttctaaaggaagaaagagaaaagaaacaagtaacataccggtgagctccaacacgtctggcagccgactttacagtggaagccctaccggccaggagagagaagcaataaatatttaaagtactaaaggaaaaaaacttttaccttagaatagcatatacagtgaaagtgttcttcaaataaaaagaaatactgacttttccagacaaacaaaagctgaagtattttatgaataccatgtctgtcctaaaggaatgctaaagagagtacattaatgagcaataaatgatcacctaaaggtaaaaaaatcctcactgctaataggatacaaaacaaaacacaatattataacactatagctgtgtggtgtgcaaactactcttattcaaagtaggaatattaaataatatccaatcaaaagtaatagctacaacaacatttcaagacatagcacaataaaatataaatagaaacaacaaaaagttaaaaagtgacgggatgagcatacctgtcctgagccggccgatgtggtggaagctcggagctcgggagccggggaagccctggagcgtgggcggaagggaggccgccccgagagccggaagcctgggcaaggaatggaggcctcgggcgccccccagcaacagcagggcggcgccacactggtcctgcgcgaggctggccgccggcgacggcgggacgctctgggaggtcggcggaaagcgcagcgccgcgactggcggtgcttaggcttagagggggagagcagcccggccacgggcaagcggctccggggtgcctgatcccagcctcgcggccccgggttggttatgacgcctggaatcaggcgcgcgtatctggacccggctcttgggccagccaggggccactgccattgtccacgtccatactaccctgaacacgagagaaacccaagcggcggcccgtgggcacgctcggcgccactgctcccaccacagggacaggcgcactcgacaactttcagggcccacagcaccaagaggacagggaggagccaacaaaggaatgacgctaggaaacgcacgcccaaagcaaccaaccaatccaagtaaaaacacgtctcagggctccgttggttttcccgcgtgggcggccctgccctcctgttctagcccggcccaggcaccctccaccctaccctcgccaaagggtcccctgtctaccagagcagagcctccctctccaaggctctgttgctccccctctctagctccctcaccctctccctttctctacttccctctccaccttgctctctctctctctctctctccctctctctcgcagtttccccgtccctctctgtctctctctctctctctgtctctctctctctctctctctctctctctctctcgcagtttccccgtccctctctgtctctctctctatcgctgtttctctctctccttccgtttctatctctccatccctctgtcccttgctcttcttcaagctgtctgtgtctttgtgtgtctgcgtgtatgcttgtgttcccgcgcgtgcgcccgtatgtgtctgtttgggagtgggtttgctagtgattgtggtggggtgtgtctggatgtccgtcagtacctttgtcctgggatcaggctgccaactctattgccagcgcgtgggtgtcatagttgccgtgatagtctcacacacgcaggtgtgtggatctcgttcattttcatgtagacaatgagagcgaaagcacagagaaaaagaaacgtcccgtgcatcacggcctgaggatggattcctgttttctgcaaaatggggagtcttcgatatagcctgtttgaaaactggaaaggagagcaccgacacgatgctggtcttccacgcattcctggaagtttctgggtccccacagagctcgggaaacagtcaacatggtcacgctttccgggggcggcagagacttgagtaacaggcacctttgcagagagcaaagaaacgtggaatccagaatcacgcttcacttggcctgagcgtgacttctgtgtggatgggactatccgcctcgcgctctgttgcagggctaaacgtggggatatgtcatctgtgaaccatgtggatgaaaaacagacaaccacccgagtctccgctcattgctctctggggaattcgctcattccttcggaaacggaattcgtctgaatcgctctgggatgaagtaacccaggctggcgatccggagggccgctgagctccccaccggccaacggggctgtgggcccagcacttagcccgcactgggcacccaacattttcccggattgctgggtcctgttggttctggaggcagaagaccgtttttctgtctgccttcggttctctgtttcttgctccttttgtccctcggtccatcctgccctctgttcttccctccctgccctggttttttcctccctttctccctctctccctcttcctctcccttccagggtccctccgtccatccatcctttcctagctccatccttccgtcccactctgtctccgttcctgtcctcatctctgcctgccttccctcttgcctggaaagggcagcaccccggtttgcgcggggtctcgggtctacatttagttgcaaggcgctccatggtgctggcgaggaggctggtgggacacgggttggcaagtgatagtgagagaagaggcagaggaatcgagccgcagaaaggagaactggcctggcttctgccccgacccagtgtttcgcggactgaggtctccgccaacccgactgaagaacgcggggggaaaagggatgcgagctccgcctgggctggttagaaaacctaagctgttgcctgcaaacccccgcatgagcagtagacagtccacctcc

SEQ ID NO: 1881080 - DNA, 4001 bp, Homo sapiens
tcacgcttatatttctatttcaaatttagtatacggttttacacctttttctcagaaaaatcttgttttattttttgagatagagttttgttcctgttgcccaggctggagtgcagtggcacaatctcggctcactgcaatctctgcctcctgtttcaagcgattctcctgcttcagcctccccaatagctgggattacaggcacctgccaccatgcccagctaatttttcaattttagtagagatggcgtttcaccatgttggccaggctggtctcaaactcctgacctcaggtcatctgcccacctcggcctcccaaagtgctgggacttgggaggattttcccttgccagaaaaatcttagttttagcattaacataattagttatttgctttaactcccaccccacataatttcaaaggattaatacctataagacgagtaacggagatgattgattgaaatttaggattcagtggctctatttgtctttagactatggctcactaaatctgcacacttgaagtgctgtgttctagcgatcctctgatgacacatgaagtaataggctgcgtgactgtcaccagcctgatgtgcagttgggctgcagaaccccgtgatgctgcctagcccagccagccccaggtcactcctcagactcaaactcgattctgacaccaccagcacccgggacgctgcctaggggctttctctggtggcagcagcatgtcctggagcaggccaggggtgcccggaattgaccatcctgaacctgtgcagcgtgggctggtgaaggaacgcaccagctcccacagtgaacacgggcccagctgtccacatgagacccggctcccggacgccccatgctgccgcctctttcctgtctcacctcccacttcccttcagctgctgctcagggccaccttccaaatttttgtctcagggttggcgcctgtagaatgcaatccaaggaatttagattcattcatttcagataccattctttcaattttagggactatcttaaaaacttagtttggtaatatgtaaaacacttacaatttcaaagtccagatattacttcagagtctatttcggtctcacttccaccactgacccctgtcctccacagcaaccactttagatttttatctttgtactgttttaagaaaaagcaaatatatatttgcattatattatatgtactctgccccttatcaataggcgttcctcattcctccttctggtacggagttccccactgcacgaattaatgttcctaatcccttactgatggacattttgattgtttccagttttacaaatgccacagtgaagaactttgtggcaaacacattcaggctgtgaaaagaactctgtggataaagtcctttcatttctttgccagagttttttttgaggcagattctagaattgctgagtctaagggcaaatgccatgtcgttttgttagatgctgccaaatcctcttccatgaggctgcaacgttctgcattccacagtgacgtatgagagtccttgtaccccacagcttcataaacaaagcatgacagcaaacctgcacgtttacccatcacacagttgagaaattttatctactttcacctttttttttggttagcatttttattcccagcttttttgtggtataatgcgcagaaggtaatgaacacattctacctgcaagcttcttcctgtgcctttggaatctgctcctgccagtctgcagggaaccacggatctgctttccgtcacgtaggaggcattctcgacaccctctgtacacagcatgcgctttatttggcttctcttacgcagcgtagtgactttcagatttattcaagctgctgcgtgcgccaacagtccactccttcctagtgctgaggcccccatcacatgagcacaactgtttcttgtgtgtgatgtgttgtcctctggctgtgcactgccaaaaaagacatcattaaaaaaaatttaaatataatgtaagacctgccttgtcttaggaaacgtttttctggcagtggctcacacctataatcccaatactctgggaggctgaggcaggaggactgcttgagcccaggagtttgggaccagcctgggcaagagggtgaaaccctgtctctaaaaattagccaggcatggtggctcacacctgtagtctcagctcttagggaggctgaggtgggaggactgctggagcccaggaggtggaggctgcagtgagccgagatcacaccactgcactccagcctgggcagcatggcaagactctgtctcgaccaagaaaaaaacaaaaaattaacagaaggaaaaacaaaacggctttcttatcaaaaatacactttaagaacaaatttataatattaagttgctgcaaaagtaattgtgccttttaccattgaaagcaatggcaaatactgcaattacttttgctccaacctaatattattttctaatgacaaacttggaaataactgtcattgctctctaaaaagaacagcctaaaaataaagcagcagcccatttacttctatgccagttcttttagcatttggttatttaaaccggcagtccctaacctttttggcaccagggactggtttcacggaagacactttttccactgacaagtgtggggatggtttggagatgaaacggttccatctcagatcatcagtattagattctcataagcggggcataacctagatccttctcatgcgcagttcacaacaggattccactcctatgagaatctaatgccaccactgatctgacaggaggcggagctcacacagcaatgatatgacaggggcggagctcacaataatgatatgacagggggcggagctcacacagtaatgatatgacagggggcggagctcacacagtaatgacagggggcggagctcacacagtaatgatgacagcgggcggagctcacacagtaatgctctggcagggggcggagctcacacagtaatgctctggcagggggcggagctcacacagtaatgatgacagggggcggagctcacacagtaatgatgacagggggcagagctcacagtaatgctctggcagggggcggagctcacacagtaatgctctggcagggggcggagctcacacagtaatgctgacgggggtggagctcacacagtaatgctgacagggggtggagctcacacagtaatactctggcagggggcggagctcacacagcaatgctctgacagggggcagagctcacacagtaatgctctggcagggggcggagctcacacagtaatgccgacgggggtggagctcacacagtaatgctgacagggggtggagctcacacagtaatactctggcagggggcggagctcacacagcaatgctctgacggggcagagctcacacagtaatactctggcagggggcggagctcacacagtaatgctctgacagggggcggagctcacacagtaatctctggcagggggcggagctcacacagtaatgctctgccagggggcggagctcacacagtaatgctctgccagggggcggagctcacacagtaatctctggcagggggcggagctcacacagtaatgctctgacagggggcggagctcacacagtaatgctctggcagggggcggagctcacacagtaatgctctggcagggggtggagctcacacagtaatgctctggcagggggcggagctcacacagtaatgctcactggctggctgctcacctcctactgtgtggcctggttcctaacaggccatggactggaacaatctgtggcctggggattggggacccctgatttaaagaatcgaggacacactcacctagcaaaccatctgctaagaaaaaaggaggaaaagcaccaacattaatttgaacttagaaataaactacaaggccagacatggtggttcacacctataattccagcacttcgggaggcca

SEQ ID NO: 1881081 - DNA, 4001 bp, Homo sapiens
cctgagtagatgggattacaggcaccaaccaccacccctggctaatttttgtatttttagtagagatggtgtttcaccatgttggccaggctgggtcccaaactcctgacctcaggtgatccacccacctcagcctcccaaattgttgggattacaggtgtaagccaccgtgcccagccttaatttggtaatttttcacttgatttgtttgctattatttgataaattatatccaccattttggtttcagtgattaccctacagattttaatatacatatttatcaaaatctctgctaacattatctctaccttattcctgacattagcaggattaagaacctgtaaatcccaatcactctctcttaatgtatatgctattgttaactatttagttcaatattttagacaccagaattcattatcattatttttactagtaatagtgctttttctagtcatagtgtttttttttttttttttttttttttttttttgcacagattttaactaattccttaggtttttatttcttctggcatgtcagaccatataatctgggattatttttattccgcttaatgtttaattttaggagtgtatgtgtctgtaatcttcatgggtcttatgctcatttttttttttgattcttcagtgtcattcttctttgctttgtttcccctgtcaattccaaagaaatacattgtatctgtaaagatgaaataagaattataagtgtccctctccccctatttaaatgaatatgtctggattcttatcattgactggaaggcagaaaacaattttaaaaaaggtagcattctttactatatgtataaccaaatattacaattgtgtgtatgtacatacatgtacatatatatgtacatttttgtatacagacattagtcatcttccaaaattccataaaagggccatacgctatggttgcatatttgtttaaaaggttgtaagcttcctgaaagcagtgatagtagcactgaatttctcttattatcttacctgatgctaaaccgaaagcagatgttccataaatgacttaggcgaagaacatggttcatttgtgccggagcctaaaagagaaatagtgttttgtgaaaagatgatagctgaatgctgtcaataattttgcttctcctgggaaaagaataccagaatgattgttcaaggtgaagaaattgcttaccacactgaaaaatatgagaggttttgcacacacaggaaggtgtcctcatgcctgaattattactgggggaaaagaattgaacatggttgaggacaaccatttccagaattgtgttcctcacctgaaagtttctagacaggaagtgagcactgacagacagactgaagtatttcatattttcttaggtggcatttttgttaaaggatttaaatattctttggaagtctatatacacttgtagagctgtagaaaagaaaaaaataatgactctggaacaaaactgcctggagtcacatcccagcaaaactctagctagccatgtaactatgagcaaccgtttatcctatgaagccactatttcctcatttgtacaacaggaatactcatgaaacctacctaacataattattgacagtataaatgagttaatatagataaaatgtttagaccagatcagattggtacaatgttaacataatcttatctgctttcccacctggacaccaaggaattgagaagtgagcaagtgtcttattcatatcagaatgctccatatttgtttgtttgttttttgttttgagacggagtcttgctctgtcgcccaggctggagtgcagtggcacgatctcggctctctgcaaaatctgcctcccgggttcgcaccattctcctgcctcagcctcccaagtagctgggactacaggcgcccgccgccacgcccggctaatttttttgtatttttagtagagacggggtttcaccgtgttagccaggatggtctcaatctcctgacctcgtgatccgcccacctcggcctcccagaatgttccatatttctaaaggatatgacataataatagtagtaacaatagtaataatgataatagagaaaatgtattaacgtcttattatagatgtcagtcagtgtgattttatgttacttatgtcatttgccccatcatgttggggctagtaatatcattatgttcactttacagatgaagaaagcactgattaaagaggtttattagtttgttcaaaaccaagtaacttgtaatatttcagtcaaattgcagtattccttagtaaccaatttgttatgttaccttaaaactgtcaggaatttgattaaaaatgcattaaataaataaggaaacaatgcattttcaattaaacatcatttatcttcataataaacttactttatagatatgttcagtgatggtaatgacttcacattcattttagcattgggaaatgtgtttcttcagtatctttacaggtgctacagagcgatggtctccataaggtaaataaaatgtggtaccctggtatctgtttctttaattgagcttttaaaatatatatcatttgaatgaaattataatgatttcattaacctcttttgccctttctcaaacataatgactataaatgtgataggaaattaaaactgcccattgctggaggaaagcaatcaagccagattgaccaatatgcttacacgcttgtctggaaacttttctcccttaaatagggaagctgaaagaggaggatcattataaatatctatttgtgtatctataaagaaattaaatcatgcaaactcagcctcagaatttcaatgaatcaattttacagacagaaatcttaaaatttttatttcttagggatttccactttaacagaaatgataaaacatcctggcttattttattcagaaggtgatgcatatagattccataattttcagtggtcaccttaaaatgagtttccaataccaaatattttagtatggaatgacttttaaatctagggggaaagaagtctattaagtactcacaggtgtgtaggtccatttgctggatgcagtacaagccagctgctatctaagctatgaggccttgcacatttagtaactttgtcacctttaaaaatgagtaagtgttaatagatatgttggcatgtattataggtatcacagacaaaaaagaagcaattaaataatgtgatatggcaaagaaaaaaaaaacaactaaaaaattagggcccagagacacactgcttccaagtttataaacaaaacaatctcattctttccatctccatctccctgtctctttctgttgctttctctctctctctagcacacagacagatacacatgcacatacacatagagaggatcataaccaatggttctgaaatgattacaaagaacccaaacttagtttgatgctggtgcagaaactaccatcctgtgaatctatttataggtttagcctttagggaaggataaggatcacagtgaaggaaacatcataaaatgaaaaattttctttccaaaaggacattgaaaattttaccttccctgcattgcatgtgtctacttacaatgccaaaagccccccctctcaaataattattcatctttgtcattcccctccagcatcattccttcatttttaacccgttttagaaagatactcactttaagaaattatttctcaaaacaactacagctactggcaaagaaagtggttagaaaatggaagtgtgtttgtgtgtgtgtgcgtgttttccttcccctatgtccaatatatttcctcaggtctctactttgggaccgagaaagaggaactctgataatccaatgtaatccaccttccaaagaattgtaaacccagaccaaattacaatttctcttttttaagactaaattattttatgtctcttagggggaaaaaagcaacaggcacacatttatttgcattaatatgtgattgattaatatc

SEQ ID NO: 1881082 - DNA, 4001 bp, Homo sapiens
ctagattgtaaatttgttttattttctcttaaaactctatggtagtagcattacctgccttccgagtgtttcctttgcaaccctttgtctactggactcctatttataataaatatttagcggattgtgtctgaaatgttagaataacatttgctttttctagagtcactttttgttactggatagaaagcatcaacttgtttctttgtgtttcttctgccattggggcttttattaaattaaatgttgtagcatgtcatttatttctaattcagcggcagatttttgcctaagtgtgccctgattgtgtccttgcttgctcaggcaccttctccaataaactatagtcttgcaattagcactagacccatgaaagaaatatgttgaaatatgataatttattccatttgctaatataagtttattccttggtagtattttccaaagccacatggatttgattattcttaaatcttcacttcctagtgatggttctttcattatattataaattatctgattataattcagtggcataaactcttgacttcgtgttttttcttttttttaacttgcagttgatagtacttgaaatgttggtagcttcattatggaatccaaagacactattactctttgaaattggaaaacgctattgcctaactggagtttattagaaaagaaaccaatttgggggaaattcagtaatgcaaacttgatctcagacgtaaccactaataggaactttgagtgaaattttgccttgcagcgacttatccagagagaaaaagacttctccttggaaggaaggctgaaacttttttgtttgtttgttttgttttttagtgtttcatactcaaaggtttgtaaggttaaagccatactccctcttcttccttttaatttactgaaccagaattgttaggaatttttcttttcacactcttttaaaattttttgagcatctactatgtgttaggtcccagaagaaaagacagctgggctctctacccccatggagtactggttctaatgagggggaaaaggaaactcggaattacaagatgttgccagcagatatgcagaatcccaggggagcccaaggcagagatcctatttctaacttgctgagaccagacttttcatcctagaagaagcgtatctacgttgagacctgaagaatgagaagtagttaaccaggtgatcaataggtggaaaagggaaagtagaaatatgagtactttaagcagatggaacagcaagtccaaaggtctgggtgcaagggagagaccatgatgagaaactgaaagatcaatttggccagacattcatggcatttgttcattgtatgcacattatgcaatgctttccagcaattgtggtttgtgtgagggggtgacaagacagagagaaggtgccagacctgtgaccttgtctaccataaaggatcctagagggttttgggtcttgactctgaacaacagacacaaccttcccacagatatcctcttacctgccatgatgtcaccagctgggtggaattcatacagtccatgaagtaataggaagaagacctctgtggtccctgcagcccgggagaaaagaactcattcagggcagaagcaacacggtcctgagggagtcggggtattgagtgaagcagagatgaaaacaaaacaggacagagtggtgaatttgatttacataataagagcaggcaaggaagactggcaagtgtgacagaaaagacctgtgctctaaatgtgtttgggggtggaagttgagaataggaaagagacaactcaagagacaagctggcattcacatgcagggtagtgactgggcagcaatggtgagagagaatttttaaatgtctgctatgcattaagaatttacctcctccttcggtgtttccttgatagacaggacagatttgaaatgctgaatatagacttataatactttctggttgtgtttgtatttctttgaatgcagtacttggctgagaatggaccagttggaaccctagggctcacagggttgtagaaattttctcatgagactgtagcttcaacttgctaagcagagtgcagatgactgtttagaaatatagccaatagataatctcagttcttactcttgggttattactaggatagttcctaaagagatacatttggggatgtctgcccagcccatgaatttctgcatccaaaaaactgttccctcacccataagagctagcactctggccaggcatggtggctcacgcctgtaatcctagcactttgggaggccgaggcgggcggatcacctgaggtcgggagttcgagaccagcctgaccaacatagagaaaccccatctctactaaaaatacaaaattagctgggcgtggtggcgcatgcctgtaatcccagctactggggaggctgaggcaggagaatcacttgaacccgggaggcagagattgcagtgagctgagatcgcgccattgcactccagcctgggcaacaagagcaaaactctgtctcaaaaaacaaacaaaaacaaacaacaaaaaaaaatagaactagcactctgccagcatgctagcacctagcacttcacccctgttccaacattggtcgatcagaccaggaatgagtacctgaccccaactgggccaatcagagtattttttgagaataagatattaaatgaagaagatggcaacttgggagctgcagagaaccacatatgtccatgagttccccaaagctgaaaaagcaaagtaataaagggaaaagattaagcagactatggaagagaagctgagctttaaaacttagggtagaaactttctgatctcttggtggcttttctattttgggctccaggccctcaagaaactgtttcccctagcttcttgcaagatacgcggtatctttgaaacaaacattattattattattattatttttgtggcccaagttagtgcgaagtaagttttgattacttaaaatccaaagaacctagcctaaaaaaattgccctttatggcccaaattctttaggttattcagtttactttctagtatttctagacccatctgtttgtgaacttcttgtgtgttaaggacacaaggccatccatcagccctgatgatctgttttatcttcagaatcagccagccaagcagaggcaacaagtatctgctagtattttgctgagaaagctcttaaatcatcttatctcctgctgggtataattgtgtcatttaatagcttaaccatttccccctaaacttcaggctgtgtttgcctttatttatctattgcatctactaatgagctttcctttttaggttcatgactggatgtctgtctccgtcaaaattggctatatttagaatttaggctgggatgggttttccaaaggggctggtgtttctcattctaagctaaaagtaaaaccagtatctactttacacatagggcagatgagtatttgggaagcagacccttcaaccccaaagctctataacacaaacaggactgagcccttagcatacaaggactcacagaaaataaagactttcccatggtgagaggggtggccctagatctccaaatgtttatgaaaaatgtgatgacccagggccctgctgaatcagactctctagggatggggctggggatcctgaattgtacataatctacccagttaattttgatgtgtgaaaaccattggctatgagcccaagtagcaattctccaatccaaacataattgttagactgtgttttacaataagctcactctcttcttcagtgcagcagtggtatacttctatcataaaaattaaagccaattgaagtttgttccttttttgatgactgccactcctgaaaaaaagtgaacccactccagatcctccagaattggaatggaagtcactggctcaagtttctttattcaaactaataagcttgttaagttctcttgaagcatcagggactagg

SEQ ID NO: 1881083 - DNA, 4001 bp, Homo sapiens
tgtgattatttttatttcagtcacttaaaacaaacaagaaagacagatggaactggaccaaattgagggattttatagcagaggaagtgtgtatgcctgaaaataaattaaccattcaaaatagactccatttgctgcttagggacaattcaatccatgtatctagatttgaattttccagattaaatgcccaatttaataatcatcctttaaataaaaaaaaagtaaagccaatgctattttaaatttttagcattgaggaattccctgtttcttcaggttaaaaaaaatcatacaataaaatttaagcagaacactattgttgcattctacataatacttttaaggcattggagaatacagaatacatgaattttctctctacaaacagttatatctcaagatcattatgtgtgaacactagtcaaacttgaaaacataaaagtaggatgagtttatactttactggttaccaatttagggatttaaatttataaatgattttcttaataagactttctatttaacttaaggaacagattaaaaaacaatgaaatagttcatgtagcacttttaaattattagagaaaataacatcatgatttataggaaacatttataagctataaaaaagctcatagaggaaaaataaaaatatttgtaaaaactcaatagatgatattccagttttattgtgtatcatattattttaagattactcaaataatttgtaggtcagagaagttgctttgcatatgggttataaaaggtgtaatttcaaacactttcttctggtaatatgcattaaacaaagaaggactcaaaatgtaacattacaaatattgaagtctagtgttatgactcacttggcattgctcatttcataagaaaactcataaaaatataatcagtggtatattagatatgacttaggagattggagactacttctaaatatacattttcattttcaatatgtatatacgtttcataaatatacatattcatctagcatttgctcttccacaacaatcattgtatttgttcacctgctgccttttcatggtgaggtgaataacaactgctcctctctgtttccttggattacttgaataaaagcctttcatacaatcagggccaggccctcagtttaagctaatattgttgtatgatttgagagagataattttggtttgggggcttatttaactgaatttttatggtgatttttaacaaaatacattcatttctttaactttttaatatgaattcgaatattagctaaatattcaagataaatcagagggcaataattttaaagaatgggaaaacaagattgctcaaataaacctattctgaaatgtatttgtcatgcgttgacatttctgctagaataggtgaccaattccttaataacatgggtttattattggttccagcccctgattgttccagatagtaaacaacgggacgctcaagcaacatcttggaataaaaatgtaactttcattgtcaaatgcatttttacctgatacaacagcaagtaaaagattaaaggactaacacaagtttgagggtctcagtaattaacaaatttgattgccattagcttttcttttgctttttattatatatatgtatatatggcaaaacacttctggatactttatcaattgctcatatgacatttcttgttttgatactacagctaagtcatatttccctattgagaagtgggaaaagttaggccaatatgccaatagaaatatctatgataacactactcctttaaaaatcattctactgattttttttaaatgacttacctcagtatgtctgtgtgatattcaaagtgaaagctcatttctttttccaggttgtagggaggcttctgtgctgactatcttctggcttattcatgaaaatgtcgtaagcagaggaacgagaggcagtgagtaaaacaaacatagaaacccaggagaaaagacgtgccctggagacctgtgctaatggcaacgaagggaaggaagggctcctcctctgaaaccttccccatgttagcatggatagctcacagatccccttttcagatgctgaaattgtactttaacccagaaatgtttagtccagaaatgtactgaaactagtttttcccctgcttaaacaaggcatgtcataagcttgcatatcaatatagcatatagtgtgcaaagataatgtagcttcttgacatctctgatatatagagttataccagggcatagaaattgaatctcctgtttattttagtaactgtttaaaatggtttagtttgttttcaaatcaagtaatagaacagagttgttttaaaagcccatttttatagcaatttctggctaaaagtcctgaaaaaataatcatgctagcaatgtatagctggttctgaggggagattaaccagtcaggagaacatgagcagttttgctgctttgaaatgattggcattttttatgtctctatccatgtgcaataagatgaaaaagtaatattttcagaatagagtgcccagaaataaactcacataaatatactcaactgatctttggcaaaggagcaaaggcaatacaatggagaagacagtcttttcaacaaatagtgctggaacaactgcatatccaagtgcaaaaaaaaaaaaaaaggatctagatacagaccttacatcttctaaaaaaattaactcaaaatcaatcacagacctaaatatataacatataactccaaaacttctagaagataacatagaaaacaatctagtgacctaaggtttagcaacgactctttagagacaacaccaaagacacaatccatgaaagaaagaattgataatctggacttcattaaaattaagtatttctgccctatgaaagacactgacaagagaatggaaagagaagccacctattgggaaaaatatttgtaaaagaaatatctgttatagaattgttatccaaaatgtacaaagaattatttaaatgaacaataaaaataatactattaacaagagaccaaagaccttaacggacacctcaccaaagaagatatacatatgacaagcatatgaaaagatgctccacatcatatatcatcggggaaacacaattaaaacatcagtgagctaccactacaaacctattagaatggccaaaatccagaacgctgacaacaacaaatgtgggtgggaatgtggagcaacaggaactctcacttattgctgatggtaatgcaaaatagtacagccatgtgggaaaatagttgggcagtttctcacaaaacgaaacatactcttaccgtgtgattcagcaattgtgcttcttgatatttacctcaaggagttgaaccttatgtctacacaaaaacctgcacatggatgattatagcagcttcatttataattgccaaaactttaagcaaccaagatgtcctttactaggcgaatggataaattgtggtacatccaaacaatagagtattattcagcattaaaacgaaatcatctgtcaagccatgaaaatatgtggaggaacctgaaatgcatattaccaagttaaaaaacccaatcgacaaagaccacatactgtttgattccaactatatgacattctggaaaaggcaaaactatgcaggcagccaaaagatcagtggttgccagaggtaactggggagagtgggatgaataggcagatcccagaggaatttaaggcagtgaaactactctgcatgatactttgattgtgaatgtatgtcattattaatgtgcccaagcccatagaatataaacaccaagagtgaaccttaatgtaaactatggatttgggataataatgacttctcatttaggccttttttttttttctttgtgactcactaaaatgtcttgggttcaccttgtgtcttacctgttcaagatttggagtcagtcattatttttagacactgttccttctagagaggagtggcagttt

SEQ ID NO: 1881084 - DNA, 4001 bp, Homo sapiens
ttctttgagttcagcctgggcaacatagtgagatcttgtctcaaaaaagaaaaaaaatatgccgctattagctgctattattattgttcttttcattagttcaaatctttttccttcctccatgtaacaactgccgatccttggttctggttgtctatagttatatggagggagggaaagatttgagaatagtgttcatatctttccctatatttcctcatttaatcctgagcctgagtggagggtgaggctgtgtcagggaaataaggagacgtgggagtgaggccatgtgcttgtgctgggcaggactgtgcatggggcgcacctgtgaggtcgagtaggagagacgtcgggtgcttctgggggtggagattagatttgcagattggggagtaggttagatgccctccctgggctctcaacgtggaaaggaggctgggagtgggcagtggggcctggggcgttagcagctggaggtgggatgacagagaagaacgagaaggccaatggagaaatggcattcccactccagctttctgcaaggttgtatcattgaagtcgtgcatgtcagccttctagatgtgtgggtagaggggtaagactggaggagcagggccgagtcaaggctgggtaggacttgggtgacaccaaatgaaattagtattaaagccagacttgtgatttgagctcaaattcaaacaattaaattctcttttatccattttcaaagacgaacaggctcctttgatgtgaaacagactggttgtggactcagggagaatttagaaaagaaattaattgagtttggatctgttttacaaaatgtatgatttttaaaataaatcatttctactctttattcagtgtgtgcatttcctgacctttgttttcatttaagacaggacaacagttctgagagcagttctggatgtaagtctgttaagtaagatattaatctccttaattacggaaattacatagaaacctttatttttattttaaagtaatacacacatcatttattaattgttgtttccagatatattaattacaagcatggttttagacagcattggaaaagtatttatatggtaaataaaataacttctagttgtcaaggaaagtgaaaaacaggataagttcaagcaagacaagactcatgtctgtgtttcagaaccttcagatcagcctagaaccttctgagacaaggattctgaaaacttttagtctttatttgccattttatcttcaatgctgtttttaaaagctggttctcttgcaatccctggtcccccaacactgccctgataggccaattgtctaggcagcagttgtggcaacagctggaactgcctgcactttctgggcactagtgctggcataaggaccttgccaatcatgctgagcaggagtgcctagcttcccttcacgcgaccctcccaaaggtggctcagatctggaaggtccaaagcccatctcgtggcacattaggtatgaaccccaagtgtttatacctacttttgaagtaggttgttgtctacttttgaagcaggttgttgtctacttttgaagccttgcatttttacatggtccacacccatatccatagcaaaataatagttaatatcagatagctaacacttaccgagtgcttgctgcctgccaggcacaatccccacctgtgatttaatttccataactttgtggaggtgataatattgtaactcccatttaacagataaggaaagtgaggcacagagagactcaattacacacataaaggcacatgctcaggcaacacgtggccagtgcagataacaggaaaattcactgctcttccctctcataatacattttaatattatggaaatgtggtccttgaaaaagtggtcattgagcacttaccaggtgctacggatacaattcctctgcagcttgcattctagtggggagagacaggaaacaaatgctaaaatgtgcagggtgccaggagtggcccattccctgaaagaaaaggaaaggggagagtggttgtgtcaggagattctctctgatagggcagcatctgagcagagaccagaggatatgaggggagtgagcaacagggctatttgtgggggaagacagtaagtgcaaaggccctgaggcaggagcgtgcctttgaaaagaaatggcaaggaatggctggaggacagcaagtgcagggaggctgggaggagacggaggaaagggcaatgagatcctagagggccctggccacactgaaagaagctcctgtgaaacggagtctctcagaataggtcccttttaaagtcacctgaaaccaggtgtcagtgcctgcctgcctgccttccctccttctttcctttctttctttctttctttccttcttctttctttctctctctctctccttccttccttccatccttccttcctttctctctttcttctctttctcactttcttctctttctttctttcttctttgtttctttgtttgtttctttctttctctctctctcgcttgcttgcttgctttccttccttccttccttccttccttccttccttccttccttccttctttccttctttctttctttctttctttctttctttctttctttctttctttctttctttctttctttctttctttctttctttctttctttctttctttctttctttctttctttctttctttctttctttctttcttttctttctttcgaagtcttgccctgttgcccagactggagggcagtggcacgatcttggtttactgcaacctctgcctcctgggttcaggtgattctcctgcctcagtctcttgagtagctgggactacaagtgcccggcaccacacccggctaatttttgcatttttagtacagacagggtttcaccacattggccaggctggtcttgaactcctgacctcgtgatccacctgcctcagcctcccaaagtgttgggattacaagtgtgagccaccacgcctggccctagtgcctttcttacttccaaacacatgtttctgaactgcataaggagcctggaaggctgatggcagccaaggctaagtgccattgtgagcactgtgagactctagcagagttctggggtcctggtcgccccaggtgactctcgaatgggagcagctgccctccagttgcaatgctggtctctgagatgagtgactgtaatgaagagattgatgataaccccatgtcctcagaccttcattgtttctgcggaagggaactgggaaagtcttccaccaaggaatcttttgtgaggcagtgagcttgccttcctgttttctgtaattcctcccattctcccatgtgcttgcggcgagaggaggacgtgaggattgtgttaaagggtgatgagagagcaggagtggttgcagttctggaaaaagatctaataaaacacttacctgcctgaaggcagtgtgctgaaatgaagaggcacattcaacagcattgtcatacattggacctgtgaggggtgtcattgaattgaccacttaggatgtttaaatgtttatttaaagttgcccttggctataaagcctgaagtgggtgttggagtagtcaacgactaacccaggatggatttgtgccaatacacaagtgacaacatctttcacagctgaagagtcggaggataaagccatgcccacagatcgttgtcacacaggtataaccttacattttccaaaatagtcttttaagtgccagcattgttgagtggcatgcactttttgaattatgtaatctgggcatattgtatacctttattttaaaaattttgtttaaaaatgccaatcacgtttattttactttatacatataagtaacattttttctatcatatataatttaataaaatccaatctcactgtgaacactgtactgctgaaaattcatttttactataaaatagaattctgtaaattgctttaagaaagcatttattggctgggt

SEQ ID NO: 1881085 - DNA, 4001 bp, Homo sapiens
tataaggctacagtaaccaaaacagcatgataccagtaccaaaacagacatatagaccaatggtatagaacaaagcctcagaaataacaccacacatttacagccatttgatccttgacaaacctgacaaaaacaagcaatggggaaaggattccctatttaataaacggtgttgaaaaaactggctagccatatgcagaaaactgaaactggaccacttccttacaccttatacaaaaattaactcaagatggattaaagacttacatctttgacctaaaaccataaaaaccctaaaagaaaacctaggcaatactattcaggacacaggcataggcaaagaattcataactaaaacaccaaaagcaatgtcaacaaaagccaagattgacaaatgggagctaattaaactaaaagcttctgcactccaaaagaaactatcatcagtgtgagcaggcaacctacagaatgggagaatactttttcagtctatccatctgacaaaaggctaatatccagaatctaccaggaagttaaacaaatttacaagaaaaaagcaaacaatcccatcaaaaagtgggcaaaagatatgaacaaacactcctcaaaagaagacatgtatgcggccaaaaaatatatgaaaaaaagctcatcatcattggtcattagagaaatgcaaatcaaaaccacaatgagataccatctcacaccagttagaatggcgattattcaaaagtcaggaaacaacagatgctggagagaacatgaagaaacaggaacacttttacaatgttggtgggagtgtaaattaattcaactattgtggaaaactgtggcaattcctcaaggatctagaatcagaaataccatttgactcagcaatcccattaatgggtatacacccaaaggattataaaccattctactataaagacacatgcacacgtatgtttattgcagcactgttcacaatagcaaagacttggaacaaacccaaatgcccatcaatgacagactagataaagaaaatgtgctacatatacaccatggaataataggcggccataaaaaggaatgagatcatgtattttgcagcgacatgtctgaaggtagacaccatcatcctcagcaaactaacacaagaacagaaaaccaaacaccacgtgttctcaatcataagtgggagatgaacagtgagaaccatggacacagggaggggagcttcacacaacggagcctgttgtggggtgggaggctaggggagggataacattaggagaaatacctaatgtagatgacaggttgatgggtgcagcaaaccagcatggcacgtgtatacttatgtaacaaacctgcatgttctgaacatgtatctcagaacttcagttataattttaaaaaaaactaagtgagaagcacactttcatatgatatattaaatttgcattattttatccagaataaaatatcatacatatttaaactttgaatgtaacactgacttgtactataaacacagtacctggttaaagaacaggcttattgaagaacaatcaaaggagtatctttttattaaagaagtactccagaatgcttcctaaacttctaatacataatcaaatacttactcaacctctgaattaaagagcaaatttaacatgttgaaacctgaaactcgtatttctttcctaacattgttgacattatgttcgtccatccagtaactcagacaagatcttagggtcatttaggtatttttatctcacataccagacatctaatccaaaagtaggggctggatgcagagcaagatggcagaatagaaagttccactaatcagcctcccatcaagcacaccaaattaatgactatctatggagaaaaaacaacttactaaaagccaaaaactagatgagcactcccactacctcagtacctggtttgatcttcattgttgaaagaggcactgaagagatagaaaactcagtcttgaaccgccgatgccacctctttcccactcccagcaacagcagcatgttgcagggatcatctctggttgctaggcgaagtagaacacagcaattgtgaggctctgaattcaatgctgtcctgttaaagcggaaacataaaccagaccaaactcaacaggtgcttgcccacaacgggagcatttaaaccatccctagtcagagagcaattgctgatacaagtggtccagatttgagtgctcaaaccttgccacgaagggtcaaaataatctcagcctctaagtaaacctgaaatgcagtcgaggccataaggactgcaacatatagttgaattctagggctgtactaggcccatagacaatggactgagggtcgggggacacgacatactgagacaccagctgtggcagccaagggattgctggcatcacccattccctagactcaagctgcacaacataaggctccaaaagagacccctgtcttctgcttagggagaggagagggaaaagtggagaggacttttttatacatctagataacagctcagccacagcaagacagggcaacagttggagttgtgaggcccccattccaggccccatctcccagataacatttctagatacactctgggccagaagggatgccattgccttgaaggaaaggacccagacctgccagcatttatcacctgctatgtgaggagacccaggtattcccaggtactacatcaagggccttggtgagcctctgagactttctgacttcaggttaccagctgtggtggttatggggcaaaactccttctgattgagagaagcagaaggaaaagtaaaagggaattttgccttgcacctaagttaccaataccaccatggggggtagagtacaaaggtggctttggggttcctggttccaggacttgactcttggatggcatttcgtgacctgccctggaccaaagaggtgcccactaccctgaagggtgagtaccaggccaggaaggattcaccacaaactgacttcggagaccttgggccttaagaggacattggtggtagtctggtactaatccctgtggccagagtgggtgttggctatgaagtgaggttcctctgtctgtagaaaggggagagaagaatgggaagaactgcatgttgcagtttgagtgccagctcagtcccaacacaatagaaaaccagggagactcttaagtttttctatcctaggccctgagtcctgatggtatttcagggcccacccatgtcctgcgggacctcattgccccgaagggaaaaacatcagcctggctggctttggtacttgctgattgtagagccccgggaccttgagtgaacacaggcagtaccagggagtggttacagcaggccttgggtgagacacagagctatgttggcttcatctctgacccagtgcagtcatagtggtgatggctacagaggtgtttatgtcactccacctacaactttaagtgactcagaacaaagagagagagagagagaaggcgggggggcggggagctctttatggttgagagaagaaacaagggactgtgcctggtaatccagaaaatgctcccagaccttattcaagatcattaatatggtacctctatgagtctgcaaaaccacagtgttactgggctttgggtgccccctaaagcataaacagcttagatcacatcacgtaaagcattcccaagaaaaataactacaaataagcttagacagtgaagactacaataaatacctaactcttcaatggccagacatcaaagaacatctgctaccctcaacaccattcaggaaaacatggtctcaacatataggtcactaaataaggtataagagaacaattctggagcaacaaatatgtgacctttcagacacagaattcaaaatagctgtgttaaggaaataaagaaattcgagataacacagagaaggaattcagaattctatcagacaaaattatcaaatatattgaaat

SEQ ID NO: 1881086 - DNA, 4001 bp, Homo sapiens
gcagaaaacagtagtaatgatcatgttactattaaaattgtaaatatgacaaataacagaaaaaagtgatctttttgaatcccagaaacgcctaaccctgagaccatccaaagctatctaaaagtgacccagagtgagatatgtgtcaggaaattggagctgtatagtcttatttttcttcatttatatatatattatataaatatacatattatatattattatttattatttattatataatatattgtttaatatttaatatatcttattatatattaatatatattttttgagacaggttctcactctgtcacccaggctgcagtgcagtggcttgatcacggctcatagaagcctcaacttcctgggctcccagctcagcctcctgagtagctgggaccacaggcacacgccaccaagcccagctaattttgtttttattttttgtagtgatggggtctccctgtgttgtacaaattggtctcaaactccttgacaaaagcaatcctcccctctcggccttccaaagtgctaggagtacaggtgttagccattgcacccggcccgtttataatttagtatgaactcttagtactgtcctcttcgttaaatagaggcatggatttacaaaaaaccattgatataaaaaaaagtaaccttttaattcaaaatatttaatcagaaacaaatagctgtacttccttaaaagataagtcctcagcctgggcaacatagttaaaccccttctctagaaaaaaatataaaaattaggctgggcgcagtggctcacgcctgtaatcctagcactttgggaggctgaggtgggcgaatcacttgaggtcaggagttcaagaccagcctggccaacatgatgaaaccctgtctctaaaaaaaaaaaaaaaaaatagccggcatggtggcgcacgtctgtagtcccagctacttgggaggctgaggtggcagaatcgctcgcaaccggtaggcacaggttgcagtgagtcaagatcccaccattgcacttcagactgggcgacagagcgagactccgtctcaaaaaataaataaataaaattaaagaatacaagagcacccagattcataaagcaaggtctttgagacctacaaagagacttagactcccacacaataatagtgagagactttaaaaccccactgtcaatgttagacatttcaacgagacaaaaaattaacaaagatattcaggacttgaactcagctctggaccaaataaacctaatagacatcaacagaactctccaccccaaatcaacagaatgtacgttcttctcagcaccacatagaacttattctaaaatgaaccacataggccggccgcggtggctcacgcctgtaatcccagcactttgggaggccgaggcggggggatcacgaggtcaggagatcgagaccatcctagctaacacggtgaaacaccgtctctactaaaaaaatacaaaaaaattagccgggcgtggtggcaggcgcctgtaatgctagctactccggaggctgaggcagcagaatggcgtgaacccgggaggcggagcttgcagtgagccgagatggcgccactgcaccccagcctgggagacaaagcgagactccgtctcaaaaataaataaacaaataaataaaaaataaaattgaccacataattggaagtaaaacactcctcagcaaatgcaaaagaacggaaatcataacaaagtttctcagaccacagtacaatcaaattagaactgaggattaagaaactcactcaaggtgttcgcagccgccgccgcaccgccatgccgccatcactctccaacgccagcgctgcctctggctcgcagagctccagctgaaggataagggaggtaaataaggaagcctctataccatggcttgtacaaagcggactgcctgcaaatcgaccgtaaagcagccaggaagcaactgggtacaaaagccgctcacaagagtgcgccctctactggaggggtgaagaaacctcatcattacaggcctggtactgtggcactccgtgaaatcagacgttatcagaaggccactgaacttctgattcgcaaacttcgctttcagcgtctggtgcaagaaattgctcaggacttgaaaacagatctacgcttccagagtgcagctattggagctttgcaggaggcaagtgaggcctacctggttggcctttttgaagacagcaacctgtgtgctatccatgccaaacggctaactattatgccaaaagaaatccagctagcacgccgcatacaaggaaaacgtgcttaagaatccactatgatgggaaacatttcattctcaaaaagaaaaaaattctcgaccgggcgcggtggctcacgcctgtaatcccagcactttgggaggccaaggcgggcggatgacgaggtcaggagatcgagaccatcctggctaacacagtgaaaccccgtctctactaaaaatacaaaaaattagccgggcgtggtggcggacacctgtagtcccagctactcgggagactgaggcgggagaatggtgtgaacccaggaggtggagcttgcagtgagccgagatcgtgccactgcactccagcctgggcgataggtgagactccatctcagaaaaaaagaaaaaaaaaaagaaaaagaaaaaaattctcttcttcctgttattggtggttatgaaggttagatatttttttccatggggtcaaaagatacctaagtgtatgattgcaagtggaaaaataggggatagaaatcaggtaatggcattttttcaattttcatttgtgtgtaaatttttaatataaatgtggagatgtaaagcattaatgcaagttaaaatgtttcagtgaacaggtttcagcagttcaactttataataattataaataaacctgttaaatttttctagacaatgccagcattagcatttttttaaaaacaagtaaatttcttattgacagcaactaaatggtgtttgtagcatttttatcacacagtagattccatccattcactatgtttttctaactgagttgtcctacatgcaagtacgtgtttgtttgttttcttttttttttttttttttttttggagatggagtcttgctctgtcgcccaggctggagtgcagtggcaagatcttggctcactgcaacctccacctcccaggttcaagcaattctcctgcctcagcctccagagtagctgtgactaaaggcatgtgccaccacactggctaatttttcatatttttagtacagatggggtttcaccgtgttggccaggatggtctccatctcctgaccacgtgatctgcccacctcagcctcccaaagtgctgggattacaggcctgagtcactgcacccaggcaagtacatgtttttaatgttgtctgtctgctgtgctgttcctgtaagtatgctattaaaatatattaaactattaaaaaaagaaacttattcaaaactacaaaactacacgtaaactgaacaacctactcctgaatgactactgaataaataacaaaattaaggcagaaataaataagttctttgaaaccaatgagaacaaagacacaacataccagaatctctggaacacagctaatgcagtgtttagagggaaatttatagcactaaaagcccacaggagaaagcaggaaagatctaaaatcaacaccctaacaccacaattaaaagaactagagaagcaagagcaaacaaattcaaaagctagcagaagacaagaaataactaagaacagagcagaactgaaggagacagagacatgaaaaacccttcaaaaaatcagtgaatccatggctgggtgcagtggctcacgcctgtaatcccagcactttgggaggctgaggcagttagatcacgaggtcaggagatcgagaccatcctggctaatgttgtgaaaccccgtctctactaaaaatacaaaaaaattagtcgggcgtggtg

SEQ ID NO: 1881087 - DNA, 4001 bp, Homo sapiens
ctgggaacagagtatctgtcaagccatttacctgaccacttacttctcaaccccttcaattggtgctcactacacttgtccaaagggcgaagatgacattgggagaaaattattttcattgcatagtaaactcttctctctctcccgagttgggcagaataatagaattagcctgcctagaatattaattcatcaatacatgtcatactgattctcagtttccagaaggatcagggcagggatgagttcaaggttattgagacatatttctccaactgcttcttaatgatatcccagtgggaggaggacatgggaggagaaagacttcattcttctctgaatccctggttctgcatctgatcatctatctgaaaattctcttaaccttgtcgttcttttgcgtctttcattttacagtaactctgtatactaagatagaaccaattgggaaccaagatacaggtattcatctcaggcagtgaaatgtacacacatgtgagttatacaaatagccacagtgacaaaattagtttactaactgatatcttgccacctcagaaatttcattcccttccagaatataacctcacactggatacagctcttacttcaaatctgaagacttgcctttcaacttcagtctttcatttgttgctgatggtcgtttggatttctctcttccgtaaagcccagttgatgattctcctcaggggcggccatcttggaggaacatggtaatgaggtagctgtgatcggcacggagcttctgtattactctctctaggtagtcaggtccactcataacaacttctagaaagctagagaaggcactgaaaaacttaaacacaatggtcataataggtggcataccagagttatccaatggagctgacagaatcaaggcacaccttagctcttatgaatttttcttgcccccagtgttcctccctccagctacctaaatttggtctttcttttaaggctcttcaattaagcctcctttaagccccttctaaccatcttcccagaaaccccttctccctctgaattacaagtgctcttattgttggcactatttaaaaatgccactgccctgtattgttggtcattatgtcccatcctttcacatggattagtcactctttaaaatttagaagcttttcttttgtttctgaaaaatccccccagcactcagagcctaataatgtgaggctcactaggacctcagagctccgtcggggagcgctgccccgctcctgccctccagcagggccctgtgctatctgttcttacccctgcctgtatttccctatcttctgcctcctaatctccaatcctaacaccactctccacccaatacccaacagggaaacacattttttcttccagggcccaattctcaaatggctggggccccatatgatgtttttttctgttttacctcataactctctcattcccaagacacacagccctctcagagagctctcagggttcaattgggttcaagtgcctgccattagaaacaccacatcttggccgggcgcagtggctcacacctgtaatcccagcactttgggaggcccaggcgggcagatcacatgaggtcaggagttcgaggccagcctggtcaacatggtgaaaccctgtctctactaaaaattagccgggcatcgtggtgggtgcctgtaatcccagctactcaggaggctgaggcaggagaatcttgtgaacccgggagagagaggttgcagtgagccaagatggtgccactgcactccagcctggcgacagaacaagactccgtctcaaaaaaaaaaaaaaaagaaacactgcatttttctagtgcacaattcctgcagctgaatctagtctacagtgccaaactccttactctgggtgatttttctctcaggaatttgcctttcatcagcgttgccccagcccagtctatcggttacaactgtcaaggtctgaatctcaactgccaagagcgttcaaattctctcccatggtgctcctgggcaccagaccaatcacatggtaagatgtcagtttagttgtctgggcattctatggcagttatatggagttatatgtggcttttttacttcccagaggacagagaggaccttttgtggggggaacctaactcctcaagccaatgaatcaggatcttggtaatgagataatctaaatctcctgaccaagaaatgaagacattactgggaaattagggtaaacagctttttagtgagggctccaaaagtcatgtacaaggcaacacggccaaacgcttttttaataaaaaaagtttgcccttttttaaaactttgggctaacactagagagttttgtttgaaaggtgcattgagagattcttattagcattttgttgcttgttaatttctgcctttgagagaaaatgttggtttttttttttttttttttttttttggcaagagtctcactctgtcgcccaggctggggtgcagtggcatgatctcggctcactgcaacctctgcctagtgggttcaagtgattcttctgcctcagcctcccaagtagctgggattgcaggcacgcaccactacacacggctaatttttgtatttttagtagaaatgaggttttgccatattggccaagctggtctcaaactcctgatctcaagagaaatgatccatctgccatggactcccaaagtgctgagattacaggtgtgagccactgtgcccagccaagagacagtgtcaattctaacaatttatgtgcatttctggtaatccacccctcacaggttgctttgaacaacttgttgtttcccctagtgatgagctgaaagttgtaacaataaccagtctcccatatgttattgctgaataattccttcttagtggcttcataataataatatacaaaaaagaatctattgttctgtttggctcttttcagattcctagtatctcattacgtcaggagagtctttgtttcctcaaggtaaaaaaacaaaaaacagaaacccacatattactggcctttttatttagctgtcacaataccagcagtgggagagtcactatgcagaagaaacaatggtaacatggatcacttcacattgaaatgtggtacctaattattgtttttaggggtagtctaatgagtggtacttgtaggtgattaaacatatttgggtttggaagaccaatgggttgagaaccaagccaccctccttacaacagtatgtggagagagagagtttgggtactgcatctgcctcaagagccccatcccaccccacccacaacgccttctcatggcttccatgagaagccatttaacaatggctgaagatgcctgagaagccacccagccaaaagaacccattcaaaaggacatcctggatttgttgcatatcatcatggatttagcttagcagccactgagaacaaaaaggatttaaatatatatatgtatagctgatgatcctaaattaaaaggccctaaaaatattagtgtatgagttccttaccctagatcatatattgtactaaatactgaggacaaagataataaccctccccatccctcagggaacttcaacatgcaccaaagatagacccttatatatttaacagaaaagcacaatggcgtgataaaatttaggcatgaacagatcataatgggagcatgaagatggaaatgactgcttctgcccagtttagagacattgaaggaaaaggggggaaaagtctccgtagaggaaggagcatttgacctgggcttttaaaggaggaggaggagcttgacagataagagaatggagcctctggtagaggaaacacaaaatagcaatgggacattaaagtagggaccaaatttgcaaagcagttctaacatgacctgtacaacagtaatcctgtgttcatgctcctctatggtttgagttgctagatgtaaagataatgtatattaaacatctttcttcaatcttgccaga

SEQ ID NO: 1881088 - DNA, 4001 bp, Homo sapiens
ccccagcacatctttaactaccgaacaacacattccttttctactttttatgactcctcacacaatttatattcctgctaagaaccctgtctggcttcttccccaaacccatgccgtacaggagcctggctccatgcagccctcagggtccaggctgtgggaatgcaggaaggtggggctgttgtaacaaggtcctgccagtggagagagccctttggccaagagcactgtaggaagtgcattgtatgaattctgtcttgtcttgacacccttgtgtgatccttaacaatatcagaatttcattaatatgaatataaaatacatgctcttttaaaacactaataatgtattagaatttaaggcaatatagtgccacaacattgagaggaaaaagcaaatctatatgacactccagcagagtaaatattgaataccagcacggtataatttaaaggcaaatactgattgtggtttcaccaacaaccaatcatcttacagactacttcataccaacaaagcttagggtgtatctaagcatatggcagcagcactaagaaatatcgtccctgttctacatcgtcattgccctaggcaacagatgacatcccacacttccatgtctgctcccaattcttgctaaaaccactttatcacagcatctcttgtacaagtccctttcctacgtactcattcgttggatccttgtccaattgggaacacagtttattatagagggaaaaaaaccatgttgtaaagtcagaaagccaaagattcaaatctcaattctaccacttagaagatctgctgcttaccttctcagatggcattatctgtcacatgttctcttaaaaagtcaaagctcggggattctgggatgagcaggggacagatttcctggtgactcagtcactgtctctattctccaggtggtgacgatctgagcctcatccgtaccctccattttggttcttgttaaggggctactcactctatgctacagaggcttcccagcagtcatgtgcaatcaaaaataaaaacaataaatttcttattaatagcattctatttggccctaaattataaactgaagaaatggctggcctctgttctgctgtcaaataataataccactatttgcacagtgcttattatatgccaagaactttacacacagtatctcatttcatcctaacaagaactctatggaataggtgctattcctcatcattctgcagatgaggaaatttgggcactgtgagtttgcataacttgcctatgttaaaaagctatccagtggctggacctagattcaaatgcaggtaatccctaccctgagcctgattttttaaccactaccctctactaactcaaagtagtagtactgggctaactgagaagaaatgccttctcactgttcacagtaagaaacggaaagaatggggaaaaaataagagaagagcacagtaagagaaaaacattttatcaagaagacttacttaagaacaggcattatgaaaagatcagcatggtaatacagggagacaaagcataaagcattaacagctaaagagagaacacatctccataattttataattgtcaatgtgtgataatcttccaagttttatgacagtgcttatcagagtgtactataactattgcttttcacgtttatttccctcttatactgagaatgtggtcagagtcctattcatccttgtacctgcagagcttagccccacgactggcacccagcagacaatcaaatagtgttggatgaatgagtgaattgaatgctgaaaactcaagttaatgtttatgggtgccaaacatttaaggatttttagggaaagaagcaaaccactgaggcctgaagcagtaaagtgccttaaggaagaagatctttacctggatcatgcagaatgagtgggattttaacttcagctaaggactgattgaaagatgacagggtgttgttttaacggcattccagcttttcttgactaaacttgccaattctaggagccaatacttagaaatgcaatattgttttcttttatgagctaggttgaataatcctgggaccaaaagctgtaaataaaagatagtacattttggcaaactctaaaaaagaaaggtgctaaagtaaaactaattagaaagtgtatgccaagaaaaaaatcacgactctgtttttcaagaattgtctcttcatataattgcctatggactttctattatccggtaggaatactgcaatattccaacagcctaatttagatttctcaccactccctaattctaacatgtgtttaaagagtttcatggtcttctgattattactttaaaaacatattatcataaagaatacacagtgatgttgctttggcaccaacatacattttcagaattactcttactgaaggatattgagattataacagaagataatttatttcaacctaacaggcatactcagaacaagccatcactcttctgtatttctaatacatcattttcctcattagattttgctagtacaacctttccacccatacgcattcttcaatgacataagtttacattcaattgattgcttatggcaatcaattccttaaaagctactcttgagttaggagcctgagtttatatatgcatcatagttttcagaaaaaaaaaaactgagttgtcataatcatccatggacatagagttagaaaatttaggaaccaaattggaagagataaggtagaaatgtattataattgttttatacctttattaacatagatggaatcatcattttcagtgccaaaatttggggtgtcttaatgatcatccattatttcattccataacatttatttccatcacgtttatttccctcttatactgagaatgtggtcagagtcctactcagccttgtacctgcagagcttagccccatgactggcacccagcagacaatcaaatagtgttggatgtacgagtgaattgaatgctgaaaactcaagttaaatgtttatgagtgccaaacatttaaggatttttagggaaagaagcaaaccacagaagcctgaagcagtaaagtgccttaaggaagaagatctttacctggaacatgttttaaaacatgttgggactgtgatgctgaattaaactacagctgggttctttgtgtgtcatggacaacattgatattttgatgaagtacggggatcctttgtgtatcagtttagtattgctgctgtaacaaagtagaacaaacttagtggcttaaaacaacaggtaattatagttctgtaggtcagaagtctagtacaggtcacacccaaataaaataaaaatgtgattataaaataaaaatatagttagtgaaagaaatatttaagcaaattcgtggtttagttatacgtctgcatcttcactaatggtttaaataataagatcaagtggtgagtctactaactagtatatttttcaaagggttaagcacaaatgatattttaatttattagaaaaaactataaatgtaatatgaaaatgtgtgtgagttccattggtaacaatgtcacagctattgccaatactattgtgctttgttgcttatgcttataattgaaagacatgataaatttcagttttaaatcagttaaaaaaagaaagatgtatgtgcacccttcacccccaaaatcacacaactcctgagtttttaaatcctaaattcctggtacagagatcctaaagttctgaattcatcttttttttttccagtatattttagtgcaaacttctagggcagagaattttagattgggccatataaaatgaaaatcagtgactttttaaaaacccatctgagaacgtaggtcccagggcaaactggaacccaaagcaaactggaacccaaagccaagatcatctggagcaaaagccattggaaccactaactagcagcaacacttagatcaagcttgtccaacccatggcccaacaggcta

SEQ ID NO: 1881089 - DNA, 4001 bp, Homo sapiens
tccaagttttttgcaaagacatcagtagggactttaagtcagggttgacctaatactaataatcagataattccattctctcagccccagcaaagatttcatgagcttttctaacttaataaaaactaacaaaatatcttagaaatccgtctgcctctagtgaaacagtttacttgttaccaacgctacaaggctatcccgaagtctaggttaaaataatgaaaacaaatagggagaaggtgttacttcaaagcatctatctcaacttttgcagggggctaatgatggtctggatctatgttttattcaaataaagaatggttcagggcacatatgtcttagaattgcacttggtttcttcattattttatcttccttcttcttgaatacagacataaagaattctagagtctctctgtaattctctataacatgaaaaaaaaggcattgcaagtgttttgggtataattgtatattctgaattcattcttaagtgttgtgaccacaattactaattggatctaagaatttcctagagtttttcattttctttcccagatgcacaatcttcaaagcacagattttacagtctaacagacctagttttgacttcataagtccacacccttcccagctgcattatatctatatcgttactaaacttcctagaatatcagtttcttcttccatataatgaggacaattagacctatccgcaagtgatgctgtgaagataaaatgagatatataagtaaaatacctcacatagtatctggtatagtctagtctcaataaatagaatttgccctacctaaaactatagttcctgcttttttacattgttttaacatggcaggtttttaaaataaggcaacacaaagcaaacatagattctctttttctgttttctctctttgaaatcttcgctttatgaaaaagatcctgtaatgcatgcctatcatgtttcctttcatgtaataacttagattggtgattttctcaacaataatcatatcgaaatataaatgaataactgccataattctgtttttgacagatttaaataaaacgccacatgaatataaagtcatttttcatatcttcctgtggatgatgctacgagaataagctttcaaataacacatggagaaaatgaaaacaaaatcactcacttttaattcgttccttcttctaacaagagaaaggcagtaatcaaaatataaaaaaaaataaaaaaagacaacattatgagctaattcttgagtattcataatttcataacagcatagttacactctaaaaagagaatcttgttttcaactttagtagtaaaacataaactggaaagaaattgggatttagtcctgcctctaccattaagtcacattattatttaggggacaccatttatcttgctctgaaataaaactgtaaataagctcccccagctcttgagacaatagctccctgtggctaatggagacaattaaatttagatcacagtaacaagtagccatggtggggtgagagaagagtcacacgctctctgttcttagaaaaggcagcttttgacaaacatcccgttgttttttgtttttgtttttgttgagacggagtctcgctctgtggcccaggctggagtgcagtggcgcgatctccgctcactgcaagctctgccttctgggttcacgccattcttctgcctcagcctcccgagtagctgggactacaggcgcccgccactacgcccggctaatttctttttgtatttttagtagagacggggtttcaccatgttagccaggatggtctcaatctcctgacctcatgatccgcccgcctcggcctcccaaagtgctgggattacaggcgtgagccaccgcgcctggcgacaaacatcctgttttatacccttaagctagaatagttcttgtgacgggagccaagagaagccatgagagaacccccaactccagctcagccttttggaaggaacatctgacagacttctggttttgggattgggaagccacccaatcagagttcgactatctggaccaatcagaacgaaatataagcttgactcttttgtctacgtaaaagaacatgattggcggggcgcggaggctcatgcctgtaatccccgcagtttggtgggccaaggccggcagaggacgagggcgagagatcaagaccatcttggccaacatcttggccaacatggcgaaaccctgtctctactaaaaatacaaaaaattagccggacgtggtgtcgggcccctgtagtcccccctactcgggaggcttaggcaggagaatggcgtgaacccggaaggcggaggttgcagtgagccgagatcccaccactgcactccagcctgggcaacagagcaagactctgtctcaaaaaaaaaaaaaaaagaatatgattgagacatggggcaggaaattttcctgcttaagccaaactcttcctttattctttggagagcacaccttcacttgtattgaagaccatgcctccccaatctgcagattgcgtttcgtagaaaataaagttcttcctttttcctccacaaatctcatggccttttgttaacattgctgaatctcatgctagagcttctgtccagctagtgcaggtgttggcccactagccccatgagccaaaccctgcgtgctgcctgtttttgtaaataaaggtttattgaaacacaaccacatccactcattacgcattgtctacagcgtctattgcactgcattggcaaagttaagtagttgcaacaaagatgattaggcccacaaaacctaaaatatttactatttggtccttacataaatttttcattttgatgaatttcaatttgactacttttccatggtttgtgctttctatattctagttaaataatcgatcctaaagtcacaaagatttctatatttttcctagttttagagttgtggcttttacatttagttctacaattaatttcaagttacatttgtgcatactgtgaaacaagaattgacaatttatttttggtaatattgatatccagttgctccagcaacatttattgaacatactttcctttcttgttggattgatttagcacctttgttgaaaattaattggccatgtatttgtggtctatttctcaactctattgtgttccactaatttgtgtctcaccttatgccaatactatatggcagtgattattgtggaaatacagaaatccttgaaaacaggtacggtaagttctacaactttgttctttttcaaaatcattttggctattataaatcttttgaattgctgtataaattttagaatcagcttgtccaattctaaaaacatttttatttttaaactttatttttaattaacaaataaaaattgtatatatttatcatgtacaatatatggttttaaaatatgtatacatgcagcatgactaaattgagctaaaaacaccttgctgggatactagtgggaattgcattgaatctatgctgtatatcaatttggagaaaattgacatcttaacaatatgaatgttttaatccatggacaagatacaaatcttcatctatttgtattttctgtcttttttttttttttttttttttttttggagagacgaggtcttgctacattgcccaggctggtctcaaactcccaacctcaagcaacccagcaatcctcctgctttggcctccccatgtgctgggattacaggtgtaagccactgtgctcagcctattttcttaaattatttcaacaatgttttatggtctacggtacacatgtttttacatattttgttaaattttcccctaataatttcatgtttctgaatgcttttgctaaaggttttggttttttatttttaaatagatcatgtctagcatatagaaatataattatctgagtatacctcccttgtattttctgaccttgctgttttgtaaatcacttaggattatctatgtat

SEQ ID NO: 1881090 - DNA, 4001 bp, Homo sapiens
tgttacccctttatttgggagaatatggaggaaatatctgtcatactggtcatcaatttttatttcaggaaaagtaaaacgtattcttatgtaatcttctccagcatttagaagctcctcaaatgactgcacctctcatttctttcttaatatatgcaaattttactatacatttttttggacctgaaaactttaaacacaaaagatttgatgttgctcataccttgagcaagcaggaaatccttagggaaatgtgaactacttcatacttattaaaacagctattttaataaaacaatgaattattgacccaacatctgactcatcttttactacattttttaagttacaggaaggtttataactaataaatttctttgtattgcatgcatatcttatgaaaaaataattgcatatcttctgcatatattcttaaccactggcatgttgtatgtactcaaactgcagtagtaatgagatgtgaatatgggtaaaattttgttctaaaatcataaatcataatgctgaattatgagggggtaattatttaacaacaacaacaaaaccttctctctttacttatctttacctacttcatctcaatctcacactattttttaaaagaaaacttcattgcatattctagcaaagtgtattggtaggggaaggtttaacagagccagagagaatgtgcaaggagtgagaaagtgaattgatggatggatggttaaatgaatataaatgaactgacacctttacaggaaaataacatttcttttctttttttattctatagatcagtgggttttgtatctgtaattctttcatatcagcaaagaggaaataaactctcatgtaaatcattttccccccatctgtagcatattaaaaccatgccttttttttcttttaagcagactcttttttccgtatttgcttatcagttcatccaccattacattttaaatgaaattgcaagacccttgtccctcccccaaatttcagcctgatgtaggaaagtggaaagcagacttttcttgccttagaatagtgacctagattcaattacagatagacccagaagagagaagtgacacctcacaattttcttagaggtcctgaaaaaattagaaatctcaaaacaatacttaatggaaaagaatctgtttatttctccccattttccatcttatttcttctctgccttaattgcattgctttggtccatttaattgttcctggtataacatcacaataggtttcccacgggatatttctgaatcataaaaacgggcatttcaaggaaatttctgagtttggcttttgagggtgagtgtgtacacacagagtatgtgtaattctgcaaactgaacccagataagatggaaaaaaatctcctaaaaggcacattttcccttgcatccttcaaaaaagcaaacaaattacattaataaaatacacttattataatcgcattgcagacaaagcattgaaggcggaaagcgggtgtatatattttacggttttcccaattactgtagaaaaatgtggtcaaaagaaatagaaagagggaagaaccctgtgattccgcttattgacttttatcactaaattaagcatataaatgacctgagctggtggcttggtatattaaattaaaaaaagaagaacaatgattctctcttctttttccctccctctctgatctcagcctgaaaggagtcttcgagagataagaaagatgggattcggtccccgctactcgggtggatcctgcttaccgcgagcggggaggcggttgccttccgtgcaggatttccgttgagggctcacaataagcggtctcaagcgggggcacattccccgccacttccgcggtccctcaaacaaacaaagaagccaaagtcggctgtcccaagaccaatgtaagcgcttaggaagctttgaggcgcttgagggcgaggcaggctgccgtgggcaggtgtgaacacctcagccctcgcggcgggtttggagccgcccagcgtaggaagagggcagaagtgggctcgcgtctatgcgggtattcgaaatgaaaaagagctgcaaacggcacaaaagtccgggggctaggcgcaggaaaacagagcaagggagctgccttagttctcaaacactgcatatggatgggtgttccgcggaagattattctagaccctgtgaaagaagtctccactgggcgccggccacggcattggggtgcgcgcctgctctgcgagaagggtcccccaggccgcgcgggggaacgcaggagacgcctgtccccgggggaaccagcggaggattgtttcatttcaaagtgaaaatctgcaggctttgggaaacgatattcaaaaaagtatataatctccatatgccgctcaatggaggatcctcataatttacagcggcagataaggctagagggtgtaataaaaaatctgaagccctcccctcccccctcgccgcctccccggaattgcaccttgggcagcggagcagaatccggaatgtgaacttctcccgacatatgtttcccgcagataagtaaacaatctggacgtgaaatggaaatggtaattaatgcagtaatgctgttacacctcgagtgtgcaaatcccattgactcgccgcgccacggggggtgccgggcgtacggggaccggtggcgtgcgcccaggctgcccactccctccctcctctctccctcctccctaggtccccgggcggggcgtccagaaatcccgcagggatgtggacgggctgcgggaagcaaggagctgcttaagcggcgttcgggactcccggctctcggcccttggaggactgggcgggtgctctgcgtttgcctcgacagccgcacctctcacccacctccctcggttatcaccgccgcgctagcgctagcagggcctcctcggggctcgagtgcagcccggccctgaagcacctaggagagcctgagctcgggcgacagaggcctggaggcagagggaaccctcaaacttagtgcggcgggtggccctgagtgcggcggtcaggtctttctctcctctctgttccggggccaagtgctgccgggttgtctggcgagagtttttctgaagtttctttccatcctcgcaccgaaagcgctgatcgtgtatgaattgcttttcttacggacctaagtggaaaagtttggaaaaggccactgccctccagagtagagcaacttctccactttgtagcaaagaggaaccttgaggcctcctttcagcctctgtccggcctgggcacccgttcccttcctcaacccagacccagtgcttgggcttttgggggatcggggaggatgcctagcgcagggattcgagcgaaaaggatgcagaatcaggggtggcagccaagggacgtccccgacccgcagcccttcccgcttccgaagagaacaccttgctcacccgaccccagaggctgggcaggagcctgcgatgacggctctgcgggacccagggccaggggctgggctagaaagtgagtaacgaggccccatcttttctgacttcaggctccttcctagtgtgagaaccggcaacgcccaagccccggaacctgggcgcacacagagccgggattccgtggggccgaccgcgaatctctggttttaagtagacgccccaggatttctagcgcccccatccgccatcaatttcattattttcttaattactctgccgtggcccagctcctgcgcttctggttccaggccgatgcccatccctgcagcgtcaggaaagaaaccagcccaagtagctctcccactgctaggtccactagagcctaggaggcagggcagggcagggcaggacagaggccaggagagcacgcacctcggtggaggcgggaagctctcctgcctccaaatctaacggaccccttctgtccctgtgcctcttcctctcacactcacacacaatccactcagcaaatagatgagaatt

SEQ ID NO: 1881091 - DNA, 4001 bp, Homo sapiens
ggttgcatacctaaccattggctacttgaggacaggggacctgatttacaatcccacaaggagtatgcaaaattagaaagtcgtgattcccccccaaaataaaatcagagtgctatttaagggggacagaacactatacagtagaaaatgcatcctctacatactgttaaaagaataatgcaaaaccaaaaagcgtacacatagtaaaccaccatttatgttttttaaaaatgggagagaatacatattacatgtatacatgtagaacatattcttaaaaaaaaaaaaaaacactagaaacaaccttaacattgtatctcccattaggccctaagttccatgagggcaagaagtgtgtctgtcccattcatttctgtatttccaatgactaacagtatgtcttacacacaggaggcacataataaatagtggcagagtgaataaaggatgtaattctacaaaggagaagagggatactagagacagacttacttttcgttttttaatttttttcaagtgcctgaagtttttatgcaattaaaaagggttaaggataattcataaagacaacatatttttagggggctcaacaattctttaagaagttcggggattgttgttatcaatgacccacatcacccctcttccctaaaccgcctcattgtgtatgtgcccatacagagagccaagcagaaaagggctcattgtccagtggaacaaaccagctccggcaggagaagctccccgtccctgcagtgcacacatggcaacacagcttctccagggcctcaggaaataatgacttacggcaagataaatagtcaagggttatttggtcatcacgctggggctccagctctttagaggtttgcactgatagcaaaaacactgttgagtgtctaaataatttgaatgatattaatacaagaccccagaaagaggaaaacaacaatagcttgatgatagcaagctgacaatgggaagcattttgtgggctgagatgactgtaaaagcaaacaatggtgatattgtccttctggtgttattgtgtaatgctgtaatttatggatgaagtggaatttcaaacaaaataaacagacttgaatttgttaactaatacagtaagcatagaacattctgttatgtgaaaagagaaatgttttatacactcctgctatttgctaaacagaaatatgtttacatttggcataacgtcttgcttttggttttgctagctttttgagaatatcctttttcatttaatcttgaacacagatacaaaatgtgggtgaaagaggaatattgtcaatatatatcattgtaccattatattatagttctataagttaaaattacaacaataataactttatctctatcacaagtgaaacggtacgggttcccttgtcctcctctcagggcgtgtgatgggagtgtggctcgtttcttcagcgccccgctgctcagacctctagaggagcatacagacaggcaggctgtggggctccgatcccacgacagtgtctagggctgactgtttacagctcccgaagccccagtggacgtgtgtgctcctgaagccccagcaggcgtgtgttactgggtgctctcttagtttgccgtctataggcagcttgtgttagctcaattggaccctctaccttatcgcaaggacagagggctttctgtatccccggatttctcgccttggtgtaccggaaaaattggtcacacgtggcttggagaatgagtgcaaagttgtattgagtggaagtagctctccggtgatgggggagcgagaagggaggtggttttcccctggagtagggcagctcggcggccccagctctcctcccactgccccagccaaactccaccttgtcccgctggtcaatggcctgccggtgcctgtctgtgtgctcttcccccagcgggctctccatgaccagccacctgtgtcttcttccccggatgtgttcctcaaatgtctagcgacttcagtgtgtctgcccgctagggcctgcggggggcggtttttataggcccaggttgggggcgtggccggcaagggtaggcttggaaaatacaacatttgggcgggaaagcaggagcgcctgtcctcacctagatccatgggggtagagccgagccagggacccgccttcctctacccctcacttcccttccccacttccgtatcatttaaagggaccacgctcttccgttcccggtactcccgtatcacaagtgggctatgatatcatgtgggaactatttggttgcagttacacttataaaacaaaagctacttctccgtaaactataaaaagcaggtttttatctcagaaaggattgttaataataaatgaccactatttatggagctcttggattcacaagaagtgagtcaccaatgacaaattacgtatcttacgtctcagtgctgagaatagtgcctggcacttagtaggtacttagtagatatttgttgaataagtaaatacttcttctacaagccgggtattgctttaagtcatggttacatctgtcaaagacaaaactaagttcgagacaaaatgaacaaaggctgtttattcataaattgatggcaagggaacccatctgctgtcagtttcgtttcagcagggttcccgggtgttagagaggagagtgatttttatagaataaaaaaggataggctgagacagcctctgactgctgagggttctataaaggtgagatttctggaagccagggtgactttctaattgatcttcaggtacatttgactgccctttgttggctgggagggagcaaacaagcagtctggggacattctggaaatgaatgctaggaacagaaggttttccgtggccagccatttcctggaacatgtagtgctcaatggggtgccttttttacagtcaaactgtcaggatggtcctttatgagaagctgactgcttgggccagtttctaacatctgggttctctccccgacttcaatctctctctcactcttgctctctctctctctcaaaaacaaaaacaaaaacaaaacaacaaacaaaaaaaacctgtcacctaattggcaaaaacctcctagaaaaataaaaataagtcagttttaaattgaaaaacattattaccactcaaaaatcctaaatgcagtaaaaataggagtgatataacctcatatgttcacgagaactcatctgatgcaagtaaacctgcatttttatattcaagtcttatttaatcatggctgtggtcttaggacaaagataagttcaatattttacggaagtttgattgatagcagtgaagcattgtcctaaagattcaggaacacgctttttatagatgttattggagtgcaaaatagccaccttaaaaaaaaaaagcttacaaggattcacaacctttctagtggctttgtctttatttattcatttataaagcagctatctagggggagagtattagtggccatgggaaattttaagtagaaattaaatagacctttggcttcatgcccagaaaaatatgtcagtcctgtgcagaaaaccaggcaaaagataaaaaagattccattatatctataatacaatcttcttatggctttagtacaagtttcttttctgctaacagaagtccctgcagaaggtttaaacaatctcaacaatttcattatgtgagcgtagctaaatccaataatgtaaaagggcctagagagccttcccatatgcttggttccataccctttccttctaggggaagtcaaagaacttggctctcaggaagctgattctactccaattgcccgcagcacaaatcttgcattgttgacatcgaggaagctctcctgaggacacacaaagaagagaaggagccattagaatttctcatgaccctgctttgagccaaatccagcttcacttaaatgaatgaaaatgcttgttatatggcccaagaaactactttgtccatttgaaaattaat

SEQ ID NO: 1881092 - DNA, 4001 bp, Homo sapiens
cctcatctctactaaaaatacaaaaattagctgggcgtggcagcggatgcctgtaatcccagctacttgggaggctgaggcaggagaatcacttgaacctgggtggaggttgcagtgagccaagatcaagccattgcactccagcctggcggacaagagcaaaactccgtctcaaaaaaaaaaaaaaaaaaaaaagaagagacattttagaaaatattgccattgagataatgtgcctctgacatattacaatttaaattcacactgtaatttggcttatattctctatgagagcattaaagttgattccttatttgaattgcaatttcacttctttatttactcagagatgatcacagaagggttccctagaattacttaatgctagaaaaatagctcccaagagtcaatcaaattaaccatcccttcctaacaatatagaatccagcatactttggttctctcatttgacattttgcatgatgacagttgcagaatttgacttctgggcattttggtttctccccaatttaggagaatgcccagaatgcagaaacatgagaagaatgaacaaaacaaagatgactttataggtctcctttgaagagctttgcatttcttccaattgctttctcccagactaaaaaaaaaaaaaaattacctcagtaatatattctcgggtaaaaatataaacaatatagaagcaaactgagcagaaagtgaaagtccttctttgccatcctccaatcccacttccctccccagaagttaagaatctttccagaccctttttctatgtgtttatatatgtgcatgtatatagatgcacaaaaatacatgaccgcaagcaagatgcatatatttctttacataaatgggaacgtatacactatatatattttcctatgacttgcttttttatttactaatatttcttggatatctctctacatataaagctatcttattttttttttaaaactacatattattccataatatatatgaatgtactgcgtttgtttaagcaatgtctatggatagacattcaggttgcatgcagcttgggttttctgatttgtttgttttgttgctattagaaacagtaatccaaatttattctacctcctttaagctgataaaaaccatccctagatgtggattttctctctctatttctgcagcaataagagtgcagatgggtaggaaagggagagaatgcaattccttttcttccttctgaccaccttcttcccaccttccacctcccacttccttcctgtccacaatatacaaaaagagagctccctctactgggaatgccattgccttcctcccgctcacctgggtaactcctttcttcctgcaaattgcacctcactccatctccccaaggtctccagctcaccacctgggaggtcaagggccttccttcatgttcttttggccctctctgtatccgacatcatattaaagttacccatccagacaccggcccctgaggggagagaaggaactcaccgtgtatcctcagcacctagcacccgatcagctgcggcaggagcccaggggcatacctggtgacctgaaatgaaggacctccaagtgaatagatcttcacatagtgtgcacttggtttagttaccattaaatccatgttgaagccaacagcattaaatgatgaatcacctggataacatcggagcctcggacaaggtgtgcagactaagaacaggatttcagaaatgttaaaataacacacatcaatgccagcattcgccggtcctttctatggccttccccacactcatcacattggtagggatcactctgatattggcagcaggcttctgccaactgaaaaagagcaatacctgttctgcaggttctatttttaatttttattaacatttttacctgtgccctgcttgatctctctcaggcaggctgttctgataaaaccagtttcgttatgtcctttccctggtgcatttctgcccagagggaaggctaagcacacagaagagcccggagacagttccatctggagtagccagcgggtcagaccacagggctaatcctgaaactagaccatcaggtatcttggagatcagctagtcagtactggagaaaagggtggcttggaagagatggatctcattttatggaaagcacaacaaacactggttccaccctgccaccagcttgctgctccctaactcaacttgtagagaaattctgaagaaaactggcaatcagccaaaacttcccactccggcttgtacagctgaactctgatatccacacagccgccccaacagtgaaagagaaggaagagggatgaggaaaggaggtagtggaaggagcggtgtggactggttcttcttcctacccttcattctacagagaagcacactgacacccacagaggtgaagggtctgagcccctcactgttgagttggcggcagccctctgggaattcagccctcctccgtgccagtctccatgctgttcctatgccctgcatgttgaataggtacagtagttatcgaccacacttctggtataatctatggctaggtgagggatctactaggccttaaatgcctcctccacttgatttgccaatttcccatataaaataatggttttattcattggttcttttataaatgcaaatacccctgggagaggcaacatagccttaaaggattcattaaatcttttctgcaaagtagatgaaccatagttcatgacctggtctggctgctcctacagctgtaaactcccactgacccagattcttcctggcagcccacaggaagatgagtgtgcgatgactggcagattagctctttcaggtggaagactgccagagagatgtgccagcactctccttggcggcagagggtgggagagcttgcctgggagtgaggtgtatcctcaggctcctaaatcacctgtgtgtgtccatgccccctccttctctccttgcggtggattccttaggtctttgccaactccaaaagcaggggtgccttcaaaccctgacagctgcgctgatctggtggctctacctttaatagctattttaggttccttctaaaccttgtcgagtctccacacttctacttagttggaggcacctagagtgaaaaacaatgtatatacagtagcccccattatctgcaggggtatgcctgaaactgcagatagtacagaactttatacagactatatattttcctatacatacctatgataaagtttaatttaaacactaggcacagtaagagattggcagcaataactataaaatagaacgattataacaatatactctaataaaatttatgtgtatgtggtctctctctgtttcttaaaatatcttataatactgtcctgcaggtaactgaaaccacagaaagcaaaactgtggattacggtgggggaactatcgtaccacgtatactacagcagctacaaatgctaggaagattgtttaaagaagcctggcccccctcttcctcttcgagttcccttgtgaggatgaataaaggaaagtaatgcatccaaagctcactgagctccttggggagagggggtatgaatgcccagattccgtggttttacaccgggcatttaataataccactgacagctagactttctcctccctaacagaatttgattgcatgaatcacccaaaggtcttctttgcaagagaattttttaaaagtcaatgaaagtggaaaacatcatagtcttccaataatgactgacaacaggcaaggttctgctaaaactgggggagggggtacaattcctatgggacatggagagttattcctctctggaaagtctcagagaccagagaggtaatgggaaacacaaaagcgagtttgactactgaaatttaataaggcctgacatttctgtgcctaatcctcatatatattccattatggtgattttcaagacaggccaccagaatgaggct

SEQ ID NO: 1881093 - DNA, 4001 bp, Homo sapiens
tagataacaaaatcacagatgtgtgagaggcatgtgtgcttggaggtggaagctgggtaagaagagacattttaggctgggagcggtggctcacagccgtaatcccagcactgtgggaggccgaggcaggcagatcacctgaggtcaggagtttgagaccagcctggccaatatggtgaaacctcatctctactaaaaatacaaaaattagctgggcgtggcagcggatgcctgtaatcccagctacttgggaggctgaggcaggagaatcacttgaacctgggtggaggttgcagtgagccaagatcaagccattgcactccagcctggcggacaagagcaaaactccgtctcaaaaaaaaaaaaaaaaaaaaaagaagagacattttagaaaatattgccattgagataatgtgcctctgacatattacaatttaaattcacactgtaatttggcttatattctctatgagagcattaaagttgattccttatttgaattgcaatttcacttctttatttactcagagatgatcacagaagggttccctagaattacttaatgctagaaaaatagctcccaagagtcaatcaaattaaccatcccttcctaacaatatagaatccagcatactttggttctctcatttgacattttgcatgatgacagttgcagaatttgacttctgggcattttggtttctccccaatttaggagaatgcccagaatgcagaaacatgagaagaatgaacaaaacaaagatgactttataggtctcctttgaagagctttgcatttcttccaattgctttctcccagactaaaaaaaaaaaaaaattacctcagtaatatattctcgggtaaaaatataaacaatatagaagcaaactgagcagaaagtgaaagtccttctttgccatcctccaatcccacttccctccccagaagttaagaatctttccagaccctttttctatgtgtttatatatgtgcatgtatatagatgcacaaaaatacatgaccgcaagcaagatgcatatatttctttacataaatgggaacgtatacactatatatattttcctatgacttgcttttttatttactaatatttcttggatatctctctacatataaagctatcttattttttttttaaaactacatattattccataatatatatgaatgtactgcgtttgtttaagcaatgtctatggatagacattcaggttgcatgcagcttgggttttctgatttgtttgttttgttgctattagaaacagtaatccaaatttattctacctcctttaagctgataaaaaccatccctagatgtggattttctctctctatttctgcagcaataagagtgcagatgggtaggaaagggagagaatgcaattccttttcttccttctgaccaccttcttcccaccttccacctcccacttccttcctgtccacaatatacaaaaagagagctccctctactgggaatgccattgccttcctcccgctcacctgggtaactcctttcttcctgcaaattgcacctcactccatctccccaaggtctccagctcaccacctgggaggtcaagggccttccttcatgttcttttggccctctctgtatccgacatcatattaaagttacccatccagacaccggcccctgaggggagagaaggaactcaccgtgtatcctcagcacctagcacccgatcagctgcggcaggagcccaggggcatacctggtgacctgaaatgaaggacctccaagtgaatagatcttcacatagtgtgcacttggtttagttaccattaaatccatgttgaagccaacagcattaaatgatgaatcacctggataacatcggagcctcggacaaggtgtgcagactaagaacaggatttcagaaatgttaaaataacacacatcaatgccagcattcgccggtcctttctatggccttccccacactcatcacattggtagggatcactctgatattggcagcaggcttctgccaactgaaaaagagcaatacctgttctgcaggttctatttttaatttttattaacatttttacctgtgccctgcttgatctctctcaggcaggctgttctgataaaaccagtttcgttatgtcctttccctggtgcatttctgcccagagggaaggctaagcacacagaagagcccggagacagttccatctggagtagccagcgggtcagaccacagggctaatcctgaaactagaccatcaggtatcttggagatcagctagtcagtactggagaaaagggtggcttggaagagatggatctcattttatggaaagcacaacaaacactggttccaccctgccaccagcttgctgctccctaactcaacttgtagagaaattctgaagaaaactggcaatcagccaaaacttcccactccggcttgtacagctgaactctgatatccacacagccgccccaacagtgaaagagaaggaagagggatgaggaaaggaggtagtggaaggagcggtgtggactggttcttcttcctacccttcattctacagagaagcacactgacacccacagaggtgaagggtctgagcccctcactgttgagttggcggcagccctctgggaattcagccctcctccgtgccagtctccatgctgttcctatgccctgcatgttgaataggtacagtagttatcgaccacacttctggtataatctatggctaggtgagggatctactaggccttaaatgcctcctccacttgatttgccaatttcccatataaaataatggttttattcattggttcttttataaatgcaaatacccctgggagaggcaacatagccttaaaggattcattaaatcttttctgcaaagtagatgaaccatagttcatgacctggtctggctgctcctacagctgtaaactcccactgacccagattcttcctggcagcccacaggaagatgagtgtgcgatgactggcagattagctctttcaggtggaagactgccagagagatgtgccagcactctccttggcggcagagggtgggagagcttgcctgggagtgaggtgtatcctcaggctcctaaatcacctgtgtgtgtccatgccccctccttctctccttgcggtggattccttaggtctttgccaactccaaaagcaggggtgccttcaaaccctgacagctgcgctgatctggtggctctacctttaatagctattttaggttccttctaaaccttgtcgagtctccacacttctacttagttggaggcacctagagtgaaaaacaatgtatatacagtagcccccattatctgcaggggtatgcctgaaactgcagatagtacagaactttatacagactatatattttcctatacatacctatgataaagtttaatttaaacactaggcacagtaagagattggcagcaataactataaaatagaacgattataacaatatactctaataaaatttatgtgtatgtggtctctctctgtttcttaaaatatcttataatactgtcctgcaggtaactgaaaccacagaaagcaaaactgtggattacggtgggggaactatcgtaccacgtatactacagcagctacaaatgctaggaagattgtttaaagaagcctggcccccctcttcctcttcgagttcccttgtgaggatgaataaaggaaagtaatgcatccaaagctcactgagctccttggggagagggggtatgaatgcccagattccgtggttttacaccgggcatttaataataccactgacagctagactttctcctccctaacagaatttgattgcatgaatcacccaaaggtcttctttgcaagagaattttttaaaagtcaatgaaagtggaaaacatcatagtcttccaataatgactgacaacaggcaaggttctgctaaaactgggggagggggt

SEQ ID NO: 1881094 - DNA, 4001 bp, Homo sapiens
ttggccttgtcaaagatcagatggttgtaggtgtgtggctttatttctgagttttctattctgttccattggtctatggtctgttccattggtctgtgtgttgtttttgtaccagtaccaagctgttgtgttactgtggctttataagagccatctatgaaaaactgacagccatcattataccaaataggcaaaagctggaaccattccccttgagaactggaacaagacaaggatgcccattcttaccactcctattcaacatagtaccggaattattagagaaatcaggcaagagaaagaaataagaggcatccgaataggacaggaagaagtcaaactatctctcttcactgatgatatgattctattcctagaaaatcctgacgactctgctaaaggctcgtaaaattgatgaatgactttagcaaagtttcaggatacaaaatcaatgtacaaaaatcggtagcatttctatacatcaacaacatccaggctgagagtgaaatcaagaacacaatccctttcacaatagccacaaagaaaataaaacacctaggaatacagctaaccaaggaagtgaaataaccctacaaggagagctacaacacgctgctgaaagaaatcagagatgacacaaataaatggaaaaacattccacactcatggattagaagaatctaaatattgtaaaaatggccatactgtccaaagcaatttacagattcaatgctattcctatcaaactactaacatcattcttcataaaattagaaaaaactattctaaaattcatatggaactaaagagcccaaagagtcaaagcaatcctaagcaaaaatgaaacaaagcaaaaaacaaaaacaacagcaacaaaaaaacaaaacaaagctgtaggcattaaactatgtttcataattttgaattttgtttcatgtgcctgtattacctatttattaaaatttttatatcaaaaatagtgaaggtcaagttcaagaatttcactaataatacagtaatattttctagtcaccttattgagaggtaacagcatgctggcagtcctcacagccctcgctcgctctctgcgcctcctctgcctgggctcccactttggcggcacttgaggagcccttcagcccaccgctgcactgtgggagcccctttctgggctggccaaggccagagccggttccctcagcttgcaaggaggtgtggagggagaggcgcgagcgggaacccgggctgcgcgcggcgcttgcgggccagctggagttccgggtgggggtgggcttggccggccccgcactcggagcagccggccggccctgccagccccgggcaatgaggggcttagcacccgggccagcggctgcggagggtgtactgggtcccccagcagtgccagcccaccggcgctgcgctcgatttctcaccgggccttaactgccttcccgcggggcagggctcgggacctgcagcccgccatgcctgagcctcccactccctccatgggctcctgtgcggcccgagcctccccgatgagcgccaccccctgctccaaggtgcccagtcccatcgaccgcccaagggctgaggagtggggggcgcacggcaccgggactggcaggcagctccacctgcaaccccggtgctggatccactgggtgaagccagctgggttcctgagtctggtggggatgtggagaacctttatgtctagctcagggattgtaaacgcaccaatcagcgccctgtcgaaacagaccactgggctctaccaatcagcaggatgtgggtggggccagataagagaataaaagcaggctgcctgagctagcagtggcaacccgcttgggtccctttccagtctgtggaaggtttgttctttcgctctttgcaataaatcttgctactgctcactctttgggtccacactgcctttaagggctgtaacactcaccgtgagggtccacggcttcattcttgaagtcagtgagaccaagaacccaccaattccggacacattatgaccattattacagggttgatctcataaagggctaataattccaaggcagtttggcaacatccttaattacacaaaacttaaatttgttgtgctatgcagcccacctgcagtttgctgtcttaggaatccagtactctgctttggctgaaagaaactacatttcccaggttgcttggacctctggtccagctagctatagccaatggaaggcatgagcactagaatgaggggtaaaaggaagaaagaagccagcgtatgtttctctctgtgttccctgtggtatttcaagcaccagtaatgtcccctctgtggtctcagctccaactggaaagtctctactatggttctagtccccacagaatggccctgggctctgataatgccactttctgctattgttcttccagtcttaaagtgagagaaggttgctaatctctggaattctccctgcatttcatgtttggcttctctgctcttctgtttcataggtaaccaattctttatgtcaaatttactgtcagaaaaacctggaacggcttgtttttctggccagagggcctgactgatatacttcacattttctgtttcttgctttgaaacacccttctccatgagaaagaaaaacagctcagtagtttttcatataacatctgaccttagattcacattgcagaactcctaacatactagctttacgttagttttttgcaccccgcccctatatttcataactaccattctttatctttgcttaatgctatagatgccttttaaaaggacactatttgtagatacatgcataggcataatggccactgcattcttttcaaaacaagaacacttacctacagcattaattgtggaaatttctctgatcaaactcctggggccagaggagttgcccaagctgcctggggccacagaagtcacccaagctgagctattagagaaggctcatattcagagtctctctcccacagaggttttaggggaaaatgactgagtggtgctcacgtgcagactctacatttctcagctggctttgtctcaagctcttctggtgtaagaaatcaaaatctcatttcacttgttcctcaggaaagacaattattctcaaccaagccagtggcctttatttaaaggtcatgggcttatctcttgtcaccacagagtgctcaccagagtttatcctaagcctaactactgcagattacacgttcatgtggggtttgctaacacattgttctaattcatctgaaatgattgggttttctcaactcatatgcatccgaatcacactctggcctggtgagtgttatcctccttcataattacaggctgtgtctcactcatggcttctgacttattcatggccccttacatcatgcttttctgaactcgagtggactccaccccttcttactgcccctgcacctgtggcctcttttgtccacctgctgcaggtgagaatgcacctcctttcttccttgacaatccccttttctaatgctggcctgatccttctaaccgctaatcacagcaatgtggagctaacctaaaccctgcgccccatcccacctcagctatagaatctgtccccatccccatccctctacttttcgcttttgagccagtcttacccatcctttcaccaatcctgttaatgtcccacatatggccccatcctgccaccccaaaggtcctgtccctctaacaacatgcctttgactctgactgttaaaggtcagggtaacaccatctctggcatgggaacaatcatagctattgaatgtcccatccccctacactggctatgttaggggcctagtgtctatctctcttagtcctttaactgctccccaacagagcttcaacttcctctcacaaatctcccacccatccatccattgttacccctggcctgaccctgccatagctatagagacagatttaccaaggacaccaatga

SEQ ID NO: 1881095 - DNA, 4001 bp, Homo sapiens
tttgggaggctgaggcgggcagatcacaaggtcaggagatcgagaccatcctggccaacatggtgaaaccccgtctctactaaaaatacaaaaattagctgggtatggtggcatgcctgtagttccagctacttaggaggctgaggcaggagaattgcttgaacccgggagacaggttgcagtgagctgagatcatgccactgcactccagcctgggtgacagaacgagactccatcacaaaataaacaaataaataaatgtgtgtgcataaatatgtacacacatatacatatgtatattttatatacacaagtatttgtatatctaaaaccagtttcacaaaacagtaccctcattacatgcatagctcaaattttttaatttctttataatctagttatcttaataactttttaaaatgctggttttgacctagagatttttaaccttgtgtgtgtgtgtatatgtgtttgtgtgtgtgtgtgtatctgtttgtgtgtatgtgtgtgtgtgtatgcatgtgtgcacgtgccatttctaccccatgtgatgaagcctatggatcctttcttgtagtgtttttaaatgcataaagcaaaactcttaggcttacaaaggaaatcaatgatattgaaatacaattctatccttgggcctcttgtggggaaagggcagtgtccacagacccaggttaagaatctctgcatgggtaaattgatttcccagctgactgctgagccacaacctgcagtttggaaaataaggctgtacaaagcctcagaacattttgttgtagttaagtatttcagatgcttattatcctgtcacggttttaaccctcttttccctccctttccccatgctccctctatccagtcacccacaccccaccacatgcacatgcatgtgtactcacttacatgcatgcacatatatgttgccacatatccacatacacataggcacacacatgcacaggcacacacatgcagatcttaggtcacatatctggaatgagatgaggcactagaccactgggtccagcccctcctgtgaccccagtcccactccctgactgcctctgtgtcacagctcctctggctcctgcctcagaactactctagtggctcattatctctgcagggcagcgctcaccatcacgactttcttgttttctttcacagcattgtgagccaataggtgcattctgcctcagaatagtggtggagactggtggtggcacagcccagagctcttgacgtttattttctcaggcttcagtgaaccttctgtggcaggtgtttccttttgataggcggcagttcctccctgggtcactccagcctgcagctgaagccctcacttagctcactgtggctgtactgaacacaccacctcccaacatggagcagcctagccagggggtgcgggaaggaaagatggttgctgccacaaatgaatgactcagctaccttctccaatggtttgatattgacgtttcctcctgtcatagcaaaaatgcccaggtgaactgttttctccatcgcatgtagaaagatgatggttgtctgaactggttccaggtaatggacagtggtaagcgctcccttctcttatagtatgttatggattgaagtgtgtctccccacaaaaagatattactggagtcctaaccctgaatatttcagaatgtgaccttatttggagatagtgtgtttactgaggtaatcaaatttaaatgaggtcattacagtctctaatccaataagactagtgtcttataacagaaacgaacgcttacagagggaagacaatgtaaagagacacatggagaagatggctgtatttccattctcatgctgctataaggacatacccaagactgggtaatttataaaggcaagaggtttaattaactcacagttcagcatggctggggaggcctcaggaaacttagaatcacggcagaaggggaagcaaacacgtccttcttcaagtggtggcaggaagagaactgagtgagtaaaatgaggaaagtccccttatcagatctcctgagaactcactcactttcacgagaacagcgtgaaggtaactgcccccatgattcaattacctcccccgggtcccttccatgacacgtggagattatgggaactacaattcaagatggggtttgggtgaggacacagccaaaccatatcaacagccatctgtaagccaaggagagaggcctggaacagatacttccctcgcagctcccagaaggagccaatcctgccgacaccttgatttcagacttctggcctccagattgtgagacaagaacagcaactcggcctgtgttctctgcccttgaggttgaaacagggagcagaaggttttttttcccctctgtgttgcagcatggagttctgaatgacagatgaggggttgatcaccctccacacccatgctaagccttatggcttcacggggttcaggcttcctgtgttcagtcttctgtgttgccagaaaaatttgcatactcccatggacaaagaaagcagcagaggagaaagaagagctttcattcacttcctctttggggtgagagcaagtctgaatgctctagaattgattctattagaaaaactctctgaccccaaatatgaatattttcaccacacccaatactcataattttaaaaatagatcttttgagtttcatcctgactagtaacctaaagatcactgacttctgatttatttttttatcatgctctacagttagaaatgcaaacatatagactagagagggccacagaggtgtttgatcccatcacttcatgtaggtaggaagatgttgaacccctgagaggggtcggaacttgtccaagatcacacagcaggcagagtacatcaggacctcaaacccatatcttctgccctctcctcctaaggtctccatcactaacaccctgtcacggtccatcctgctaaggaagtctctactataaaatcccataccttgaaaattaattgtttttccactcacacgttaccacccttccctcctgcaaacatttggaagttgaaaggtcgcacagccttcatgaaattaaccagaagaattgaaaggaagctgatgacaaaagtacttcaaaatctgtttttcatgaaaacagctttttcttttccccctcagatcaaactgaatttttctttttatttttgcggtattcttctaattgtgcctttttaaatgtgtttgaaatagttctttgtttctgtagattaatcacctttcaatgctctccttttttaaaaaaaacaaaattttaaaacttttaaataaaattttcatttgttaactctcagtccttctcctttatcataattcacttttcctatcatgttcagtgaattatacaattaattactttttcagcttgcaaatggtttgctattgtatatgtcatgttttcttttggatgagaaaacacttatttcacacaatagtgccattgcttttattattcttcctgtcactgagaggggggaaagaccaagaaccaaacaataagacttttatttacagctactggaaagctgtcctgaaggtcgctacaagcctctgccattgtgtgcttccatcttggacatgccatccgagatgcctagaatggcaggggtcttccagagcatggagtcttatctcgtttcacagttgaagaaactgaggcacataggtcctcccagggccatgcagctacctaatgccagatccggaactaaacttcaggttcttgactcccaacccactgtcttttccactgcccagaaaatcccaggaattctttccaagctccctgaattcatcccaagctagtgttgcaatccatttgcttttatctcagcagcgttggaaaaaaggggctgtcatgaatcctggctcaataataggagtttacataataatttgcataatctggttgattagtttcatgttgcgccagct

SEQ ID NO: 1881096 - DNA, 4001 bp, Homo sapiens
taccttttctttctttcggtttcaccatccttgatgctgtgaatcctgcagggagctaacaggctggtgtgatagcttcttactacacctacagctcagcgagtcccgccacttgctttatacactttgatttttctctttgcttctctctcctatctgaccccccttttcctgaacacttgctgccccctatttctcttttcttcacttttgctttacttcttttgctgccccattccgtgggagaccctatctctgtttcttcaggtggccctgtgggtgtgaaagaacaaacttctgggcaggcatacaccagtggtacaccagcggtacacaggaagacacccctcccaggaaacaatacctctgcctctgacacttccgggagccttgtagccacaggaatcaacacatgtctctgcaacacttcaaattaactcaggcctcaacaaggcagagaggggtgtagccatacaggcatgatcagggccagcttatcaccattcactgggagactggctggaatgtggatgtgccgagtgaaaagtcaaatgtctgcctaatagcagagccctccactctgaaacacaaatggcccactacattcctcactcataatttttaaaaattttttaaaaaaatcttttaccctaatgtccagtaggctattgaacactagctatcaattttttgccctatgccctacagttaaaaataaatggccaggcagggtggctcacacctgtaatcccagcactttgggaggctgaggcgggcagatcacaaggtcaggagatcgagaccatcctggccaacatggtgaaaccccgtctctactaaaaatacaaaaattagctgggtatggtggcatgcctgtagttccagctacttaggaggctgaggcaggagaattgcttgaacccgggagacaggttgcagtgagctgagatcatgccactgcactccagcctgggtgacagaacgagactccatcacaaaataaacaaataaataaatgtgtgtgcataaatatgtacacacatatacatatgtatattttatatacacaagtatttgtatatctaaaaccagtttcacaaaacagtaccctcattacatgcatagctcaaattttttaatttctttataatctagttatcttaataactttttaaaatgctggttttgacctagagatttttaaccttgtgtgtgtgtgtatatgtgtttgtgtgtgtgtgtgtatctgtttgtgtgtatgtgtgtgtgtgtatgcatgtgtgcacgtgccatttctaccccatgtgatgaagcctatggatcctttcttgtagtgtttttaaatgcataaagcaaaactcttaggcttacaaaggaaatcaatgatattgaaatacaattctatccttgggcctcttgtggggaaagggcagtgtccacagacccaggttaagaatctctgcatgggtaaattgatttcccagctgactgctgagccacaacctgcagtttggaaaataaggctgtacaaagcctcagaacattttgttgtagttaagtatttcagatgcttattatcctgtcacggttttaaccctcttttccctccctttccccatgctccctctatccagtcacccacaccccaccacatgcacatgcatgtgtactcacttacatgcatgcacatatatgttgccacatatccacatacacataggcacacacatgcacaggcacacacatgcagatcttaggtcacatatctggaatgagatgaggcactagaccactgggtccagcccctcctgtgaccccagtcccactccctgactgcctctgtgtcacagctcctctggctcctgcctcagaactactctagtggctcattatctctgcagggcagcgctcaccatcacgactttcttgttttctttcacagcattgtgagccaataggtgcattctgcctcagaatagtggtggagactggtggtggcacagcccagagctcttgacgtttattttctcaggcttcagtgaaccttctgtggcaggtgtttccttttgataggcggcagttcctccctgggtcactccagcctgcagctgaagccctcacttagctcactgtggctgtactgaacacaccacctcccaacatggagcagcctagccagggggtgcgggaaggaaagatggttgctgccacaaatgaatgactcagctaccttctccaatggtttgatattgacgtttcctcctgtcatagcaaaaatgcccaggtgaactgttttctccatcgcatgtagaaagatgatggttgtctgaactggttccaggtaatggacagtggtaagcgctcccttctcttatagtatgttatggattgaagtgtgtctccccacaaaaagatattactggagtcctaaccctgaatatttcagaatgtgaccttatttggagatagtgtgtttactgaggtaatcaaatttaaatgaggtcattacagtctctaatccaataagactagtgtcttataacagaaacgaacgcttacagagggaagacaatgtaaagagacacatggagaagatggctgtatttccattctcatgctgctataaggacatacccaagactgggtaatttataaaggcaagaggtttaattaactcacagttcagcatggctggggaggcctcaggaaacttagaatcacggcagaaggggaagcaaacacgtccttcttcaagtggtggcaggaagagaactgagtgagtaaaatgaggaaagtccccttatcagatctcctgagaactcactcactttcacgagaacagcgtgaaggtaactgcccccatgattcaattacctcccccgggtcccttccatgacacgtggagattatgggaactacaattcaagatggggtttgggtgaggacacagccaaaccatatcaacagccatctgtaagccaaggagagaggcctggaacagatacttccctcgcagctcccagaaggagccaatcctgccgacaccttgatttcagacttctggcctccagattgtgagacaagaacagcaactcggcctgtgttctctgcccttgaggttgaaacagggagcagaaggttttttttcccctctgtgttgcagcatggagttctgaatgacagatgaggggttgatcaccctccacacccatgctaagccttatggcttcacggggttcaggcttcctgtgttcagtcttctgtgttgccagaaaaatttgcatactcccatggacaaagaaagcagcagaggagaaagaagagctttcattcacttcctctttggggtgagagcaagtctgaatgctctagaattgattctattagaaaaactctctgaccccaaatatgaatattttcaccacacccaatactcataattttaaaaatagatcttttgagtttcatcctgactagtaacctaaagatcactgacttctgatttatttttttatcatgctctacagttagaaatgcaaacatatagactagagagggccacagaggtgtttgatcccatcacttcatgtaggtaggaagatgttgaacccctgagaggggtcggaacttgtccaagatcacacagcaggcagagtacatcaggacctcaaacccatatcttctgccctctcctcctaaggtctccatcactaacaccctgtcacggtccatcctgctaaggaagtctctactataaaatcccataccttgaaaattaattgtttttccactcacacgttaccacccttccctcctgcaaacatttggaagttgaaaggtcgcacagccttcatgaaattaaccagaagaattgaaaggaagctgatgacaaaagtacttcaaaatctgtttttcatgaaaacagctttttcttttccccctcagatcaaactgaatttttctttttatttttgcggtattcttctaattgtgccttttta

SEQ ID NO: 1881097 - DNA, 4001 bp, Homo sapiens
gcttttaagcctgtatagcttgtgattgttccaaatactgcaggcaattgtaacacaacggtaagtatttatgtatataaacatgtcaaaataaaaaatgtacagtaataatatgatattacaaccttatggaaccaccatggtatatgcagaccattattgaactaaattattatataatgaatgactgtatgcatatttatgtattaacacactagctatgcatttgtacagattggcattcagtaaattttgtatgcttttttctggggtttggcaaactatggccctcaaattacatcaaacccacctccatattcacagctaaagttttattggaacaaaaccacattcattttttgatgtactgtctggttacttttatgttacaatggcagagttaagtggttatggcagagaacataatgtcctcaaagcccaaaacatagactatctggccctttacagaaagagttgatcaacttttggtttattccatagagcaaatatgggactctcaacaaatcccaattagtacctataactacaataatagtaataattacaatagtagtaataattgttatcagttattaaatgcatactttgtgccaaaattagactaagctgaaagagcagggtcctgtgatttatagcctcatcaaaatcacatgaaacgaggaaagaatagttagaaaatagaatgcctgttgttcagaagaaaaaaagatcaatatctaccatactattaataaatacaaatgctagcctgtcatgacttgttctaatgaatgcctaacctcatccaatatatgaaattaaattggataaagtctcattaatacaagaagtgaatagtattttttcagaggcaagcatttgttgataatatgctaaagttagtttgattctaggaggggagcctctatgttgtgtttcctattctttgtaacaatgaaacaaataaacaaaactctatttcaaatcaatagtaatgccaaatcaaactgtgaagtctccagattgggatgcatacaaaaatgatctgctgtggtagaaataatttattaaaaattctgtttacattcatcttatctcatcaattttagtaggtatttttaaattatatattagaaaaattgtgtacatataaacaaatatagtactgaagtttacttgctcaaatattattacttatagagatgtccatccaaaaatgtttagaaactactgacaaactataagtaaataacctatcaaagagttctcagaatccctctaagatcgtaactgagtatgtctgtagcataatccttattaattttgctagaaaactgttatgttcaaatataaataaatatacttatgtttaaatacagatacatcaataaatgcaatgactgtcatttcattccttcataaagcctttcattctcatctcttccttctctttgctgatcttcaaattctgaagcttctttaatgggattcctgttagcaagttctcacctttctgtgtcctccatacacaaatgtctgtggtttcttgataattatattccatgaacatattaatcatacctttgctcctaattttatatacaagttggaatccagactaagcttttttatttaaaaaaattacaatctcaaatcaataaatgcttctgccatatttttctctttcatttaagcatattgctataattacacctactgttcttttctcactaatttatcactcttcttctaccttcctttctttattatccatgtaaattttaacctttctaagatagactgatttgtttttttgccatgtagtaaatgatcctcctacttctagtcaaattctccacagcatctatcagagtctagttgttactaaacaatggttgcagttttgtgctgtggtgacttaccagaaagaacgatgatttcctagtgaagttcatcactcccagtgcatgagataagagttacatttcagcaaatgtggacctaaaaacaaaaggtgaaccacttcatcagatgcttaataataaaattcaatgccgtttgctcacagatgtactttttcagctaaacttggtctcaggatccacatgtagtttctcagcgctgtaacgcagctctcatttgtgcacatatgtgttcacgttaacaacatcatactttggaggtccttaacataaaagatgaaagaattctttagaagataaaactctcagtgtaggacatctgatttttagtattttcttttcttgttaagtcctaaaaccatcaaatgattgcagttctcaatttgcttatagtgaggctagaagatgatatgaggtctaagcaatattcttaaaggaaatttgggcctctgctacgttacatcatgctcacacatcactttaggaaaagttaaaagagctataacaaaaatattttatactttgataaacataaattttcagaactgaattataactattgcattccaaatgaattttctgtatacattactgattttaacaccaaggtcatggtcattttaatgaaaataagtaaataaataaacactagcagaaaaatatggtcagaaaaaaggagaataaaacctgcatctgaatttcagttgataatgggctatttaataactaccagtacacagctctgcagggaaaaaggcaataattcatgttagatatatccagtacctaaggataatcaacatgctttaaggaaaatgaagataatatttctttatggaaaagaggtaaacgaacgtctttacataatatgtttaaaattctctttttagtattcagattttaatgaactgcagatcactgcaattcttcatgttaaatcacatctgggattgttccttaatcgagtaaattgggttaaaatattgcatttttattgctagcttaatagcttaaagagatattaaacgtttaattattaaccttgacatgaaagaattggagagatttcttagatgatttaaggatttgaaagttctctcttctgagtgaagtttatatgttaggataaagcaaatctaacgagctatcttgaaatgggcatctgactaattgaaagagactaataacagagcatacatatatatccaatgttacttaaggaaatcattcatagaagaatagatgctttattttaaaaatcaactaatggatgttaaatattaataaagtcatcataactgaataacagataggttagcctagtaatttactcattcaaaaaatatttactgtacattcatgatgtggaaatcagtattctaggcactagcaagacagcagggaattggttcttatcaaacttatactctactagaaatagatgcatatgaatagagttttcagaagagaaattaaaggttgcaagaaatataaagaatataaagagtcacatattaataggcaatataggcaatggtatgctgacaaatgtttaataaccagctctctaaaaggaacaaagcaagccgagtttttgccattttctgtgatgaaaacattcccaacatgactgatttaaatatactaatatgacatcactcaatacatagttggaaagaggtatactgtaagccctagtgagctgttataagacagcattggcacacacactatgacaagattactttaagttgtatactcagaaaaggcctctctgggaaagtgacacttaaactaagatctgaaaaaccagaaaaagtcgtgtgtgaaatcttgaggcattacaccctgaagagggataacagctaaagttcccaaaccagtgcaagcctggatgtcggaggaacaagaagaaggccaataagtctggggtgtactacataaaaggaggatatacaatgggattagaaaaacagtcaaagcttttcatgcagaacttcgtaatatagggtatgaaatttggcaaagatgtcactggaaggtttgtgaatcatgttaattgtattgattaaaactttt

SEQ ID NO: 1881098 - DNA, 4001 bp, Homo sapiens
gtgaaagtcgtggccactacctaatgcattaactggtcactgaggtgctccccactcttcccagcagattctagaggtttttaaaagctcctgcagtttaaagctattcacactactgccctaccaccattccctgaatactgactacgtaccaggtggagtgcgccatggtggtgggatggcaggcccatgagggggttactttcatcctcatctcacaggtcggctttctgaggcttggagtggggcatgacttgcccaaagtcactcagggagctggtggccatttcgatgtccagatgaaaggctttattcccacagaggtgactcacgtttccacagactcccattcctcaggtgatggctcagtcctcccaggggaggtttctgcacagcttgtctttgtccatttggacaggcaggcattccctaaagagctgtggggtttcttctctcctgccgggaggctctgggcagacactgacctcaaggaggccggggtattagaatctccagagaaaatttccacagggctgaaggcgttggggaggcgggctgcaccatcatggtgtagcaggtgtggaggcctgggtagttactggaggcccaggaggtgtgtcctcagtgatgggaggtagtggggagggtcacatccccatgacccacagggctagggctgtggctgtggaggtggctgcagtgatgtgttcagggcggccacacaccctgtttgtggcccagagcatgtcactctgcttattccatttcatgtcttctgggcagccagctctgaccccgcagggtcgaggacccatctggcccccacagcccacagagctactcacacctcctgctctctgcttgagccttcctcctccaccaaactgtgagctctgtgcggcagagccggtatctgccttctctttgagaccccgacacccggcccaggtgggagctggacagtgaggcagggcaaacacagctgctacagcccaacctggctccactcccagctcacccacctaccagctgcgcaaccccgggcaaatcagcacatctcctacagcggcagttttcacctctgtcaaatggggccaccgaggactgtcttgcctccctaattgcagaggaaatcagatagttcgcactccctgggctgggccctgggattcccttccctctggatcctactgtagatggagtaggtggatgaggaaaagataattatagggccaggcctgggggaggatgcttgcctggagagaaccagagacagcttcagagaggagattccttaaacggggctttgaagagggcaggggtcgtcataccaagaatcaccactgtgatggtgatggctggcatctctggaggacctactgcgtgctagacactgttttaaatgtttgtgtgttaacttgtttaatcctcagaataacttaaactcatgtgatccccattttacagaggaggaggctgagacacagagaagcttgtgacttgcccgagtaggagatcgcccagcagggcataacaagcgaaggggaaagcttgggcgatggtgcagaggcaggaaacagcctggcgctcaggggaattggtcgtaggttggtacagccatgagtgcccaggagccacacccctcttgtgtaatcctctcctacattggccgccggcttggtcacatgacccgctttagccaatgggacagcagcaaatgcaatgtaagcagcggcttgggaagcggttgcacatgtggcttgctctgggaaggctgcatccaatggaggagcccaggctagcctgctggagatgtacggctcagccaacggcagctaccccaggccaggcaaggccaacttagaccatgctgcaccaaggtgtcttcagctgcctgggtgagcctaaatgaaaccagcagaattgcccagcctaacctggaccagatgacaaagctaatttagtgtggtttgagtgcattaatagatcattgagacaaactttcaagtgtccagtatctgaagagaacaagatgaccaatgctgtgcagatgtgacagagcagataactgtacctgcagtgtcctgtccttggaagcactgtgggaagacaaggcttaaaggaaaacttctggtgctctgggttcctgacatcggcagccccaagagaggggttctcagttcacactcccctctgcattctgaatcccaaagaggatccttaactcccacctcactgcctgcttccaaagcacccagctagcttcaaaggccatcaccctccatccagtacctggcatgaagccagcacataggagctgctttattttattttacgttactttattttatttttgagatggagtctcgttcagctgcccaggctggagtgcagtggcgtgatcttggctcactgcaatcaccgtctccaggttccctgattctcccatctcagcatcccgagtagctgggaccacaggcacccaccatcatgcccggctaatttgtgtgtgtgtgtgtgtgtgtgtgtgtgtgtgtgtgtgtgtgtgtgtgtatttttaagtagagacggggtttcaccatgttggccaggctggtcttgaacgcgtgacctcagatgattcgcccgcctcggcctcccaaagtgctaggattacagaggagctgctttataaacagtttttaaatgatggggaatgcatgcagcctcgcatatacaccaggtactctgaaccactgcagaaacactaaatacaaaatcaaagctgcctgtcatatagctggacaggtgtgtccactgctcccacacccccagaatggatggactgttcatttcctccttagactcaattgctcttccctcctccagtcccctgcccaggttagacagcatctgaatcccccacttagaatgaatggagtatctgcctcccccctgagactggatggaatgtccaccttctcccttagactgggtaaggttaacccacctctccttttggcctgggatctccttaaaggcagaggcctgcctaatccatcctgtggccccaacacaggatttggccctgaggtcctgcagggtagagccctgtgtttcccagcagggcccccgcctgggttaatcctccacttcctgatcttctagtggcctttctcatgcctggagtctgtgtgggatggtcagaaagatggattgacacacagcccactttcatttttactagttttcctcttcctagttcatcccctcctccccagcatattttttgcctgcatttcacagactatgaaaccaagtctcaggatgcataatgtggtcaagttcatgacagggagtagacggtgaagccgggacttgaacccaggtctgtctggttgcagccccagcattcctgagagccacacccactgctacaatgctggaggggcttgggcccctgtgctgtttgctggggtcccaggtgagcatcatgctttagttttgaaattctgccctggagaggggccctctgggaagggaaggctctgcggctagacagggtctctgacggccacccgagaagggctggagaaaatggctcccagcccacagggactcgctggccttgcaaagagcactggacagggagccatagacacccaaagccagtcttggctccacagctggccagccactttgcctcaatttccttatccatgggcacaataacagccaccgagagcgtggtgccaagtgccctgtaaacatgaattcccctggctcacaggtcccccagcccaccttggtatctccttcttcccctctcgcatctgctcaccccatttctggatcaaatgcctgccacaaatttcttgctcctttgttttaaccaaggcaagttgatcacagaactgaatgcctgaggccgggctcagtggctcatgcctataatcccagcactttgagaggtcgaggtgggcggatcacttgaggtcaggagtttgagtccagcaaaaccc

SEQ ID NO: 1881099 - DNA, 4001 bp, Homo sapiens
ataatctttctcaaaaattataaaactgtattttatttttctcatttatttgggagtttggtaagaaacgtttgggaagaaatgcttttatggagaaactactcagatttgaaactacctagtttatactaccagaagacagagattcaggttagctagtttgctaatcctcacagtttcagagatatgccttgtatttttccagattataggctttgaggacattcaccaatagcatcctcctctgaatgtattttggtccttttgctaagctatgtcttattttatagtcctccaaatgatgatctatgacttctctgcctgctcattagaggaagaaaagctcagatgcattgctaactattatttcaatgccagtggaactggagaaatgcttgaaaaagtaatctcaggttgtaaaaaagaactatctttttttggttgcaggagctagaaccctattattctgagagtaaattttctattattcctatctaattcattttcttgggagatgaaactccctcttttttttggtggggagacagggtctcactttgtcacccaggatgatgatgatggagtgctgtggcacgatcacggcacactgaagcctcgacctcctaggctcaagcgattctctcacttcagcctcctgaatagctgggaccacagacacacaccaccttacccagctaattttttgtatttttttgtagagacagggttttgccgtgttgcccaggctggtctcgaagtcctgggctcaagcgacccgctcaccttggcctcccaaagtgctgggattacaggtgtgagcccctcactgctcctggctccctcattattatatttcctgaagttgacatgatttgggtcctttacttagaaattgtcatcacacaatttcagaaaggtaaagaaatccatttttattggcaactttgggctatgcttcatcctggcaaaaatttaaaagcagtacacttcgacgtggctcactttcctgcacacctcaggcagcttgtacagactatccaagaaaaaatgaggaggaaagtgctccatcaaggaagagggatgagatgggagcataattcacacactaagaactgagttctaaagtcacttgagctttctggagctcagttacctgtaaaacaaggaagaatgaatggtctttatggaaaatgaatggcagaataagtgatttgtcaagttcattgaactataaattccatttttactgtcatttatttataacaaagttcagatataaagaaaaatctgaacatacagtaggcacagataaacctatagcaaatattcacatgtggtttgaatgcatttattaatctctgtacttattagaattaataataatactaaaatgatttggagaattaatgattaataacagtggaaaatagccttcccattattgttagaggatggtgccatcatgatgctaaatgcctatctgaggggaagctcataaatattacttgacaatattacttgataaatatttgttgaaaaaagaaatgtagtaaagaagcaaggatggctgggcatggtggagcatggctgtggtcccagctaacttgggatgctgaggtgggaggattgtttgagggaagctgagtttgcagtgagccaagattgcactactgcactgcagcctgggtgacagagtgagaccctctccaaaaaaagaaaaaaaaaaagagaaaaaaaagaagcagcagcaacgaaaggagggaggaagggagaaagtttactttgatatgccatatgattgaaacaaatgctcttttttcaaagacaaggattatactcctttgcattccagctactttggtccattgtaacttggtaacctttgccttgaaaacaaaaagaatccctggatataatctccttccttgtaattttttttataagatgccagtatggtaataggtccattagcaagtaagtacaggcacatcttattttattatacttctcagatactgcattttttacaaattgaaggtttgtggcaaccctgcatcaaggaagtctgttgacatcatttttgcaatagtatgtactcactttatgtctctgtgtcacattttggtaattcttgccatatttcacactgtttcattattatctctgttattaaaatctgtagtcaacgatctttgatgttgctattataattactgggggcaccatgaaccacacttatataacacagtaaacttaataaatgtgtgtatgttctgattgctccaacaaccaacctttctccaatctttctccttcttctcaggcctccttagtccctgagacacaatattgaaagtagatcaattaataaccctaaaatagcctccaggtatttcaagtgagaggaagttgcaatctttcactttaaatcaaaagctagaaatgaataagcttagtgaggaaggtgtgtcaaaagctgagacaggctgaaagctaagcctcttatgccaaacaaccaagttgtaaatgcaaaggaaaagttcttgaaggaaattaaaagtgctactttgtgaatgcatgaatgataaaaaagtaaaacagccttactgctgatatggagaaactttgagtcatctgaatagaagatcaagccagccacaaaattcccttaagccaaagcctagttcagagcaaggccctaactctcttcaattctatgaaagctaaagggaggtgaggaagcttcagaaaaaaagtttgaaggtagcagagtctggttcatgagtttgaagaaaagaagccttgtgcatccataaaagtgcaaagtaaagcagcaaatgttgatgtagaagctgcagtaagttatccagaagatctagttaagataattaatgaaagtggctacactaaacaatagattttcaaaagagatgaaacagccttatattggaagaagatgccatctcagacttacgtatctagagaggagtagtcaatgcctcacttcaaagcttcaaccaacaggcttactccttgttagaagttaacgcagctggtgattttaagttgaaatcaatgctcatttaccatttccccaaatcctacgacttttcagaattatgctaaatctaatctgcctgtgctctataaatggagcaacaaagcctgaatgacagcatgtctatggacagcatggtttactggacattttaagctcactttttgagtcttactgctcagaaaaaaaaagaatcttttaaaaatattgctgttcgggccgggcgcagtggctcatgcctgtaatcccagcactttgggaggccgaggccaaagtcagtagttcgagaccaccctgactaacatggtgaaaccccatctctactaaaaatacaaaaataagctgggtgtagtggtgggcgcctgtaaatccagctactcaggggtctgaggcaggagaatcacttgaaccccggaggcagaggttgcagtgagccaagatcgcaccactgcactccagcctgggtgacagagcgagactccatctcgaaaaaaatatatatatatataatatatattatatattttatatatgtatataaaatatatatataaatgatcagttccagaccactataatatatatatatatagctgttcactgacaatatacccagtcacccaagaacttggatagagatatacaaggagattaatattttcgtgcctgctaacacaatacctattgtgcagcacaggaatcaaggagtcatttgcacttttcgtaagactataactgtcacagattgtgatcccgctaatggatctgggcaaagcaaattaaaaacctggaaaggattcaccattctagatgctgttaagaacatcgtgattcatgggagaaggtcaaaataggaagatcaatgagttcggaaactgattccatccctcatggatgattttaagaggcccaagacttcattggaggaagctctgctatagac

SEQ ID NO: 1881100 - DNA, 4001 bp, Homo sapiens
atattgaaaaagagtgctatgttttgcaacttacattctaatatggtagacatgcaatacataaaccatacaaatatcctaaaactttatgctggcccttgttgttatgtacaacattcaatgttttaagaatactaaatgcctacattgttagtggcactaggaatgaactgatgatgaaatccccaaatttcagtcccatgttcacgatcatcttcaatatcacacagcctatttgtataatattatctcttactgcttacctctgagaccaataaagaaggccatagccaacccaaaccaaatgtctgacctgaatacatctctcgcccagaacctcttcacacctaccaaaattgttcttttaaaccatctgtttagaagggggctttccaatctgaaggccttactaatgcccctaatttagatcgctccctcaatttaaatgctacacacctgtgcatgtctcactttaatggcatttattttgtattttactgtgtactcatattcatgaacatgcctaacctagtcatttgaatggcaactctttgaggacagggactcaatagtttctaacttttctcagtattttaggctttatttagcatgctatcttacctagttagctttcaagtcatatttcttgtattgaattgtgttatatctgcttatgtgcaatgataaaagatacaattcagtcactggttcatgaacaacatctgttcaagggaatctatacaagtttataagtaatctaacattaatcttagagtaatattactaaatataaaacctcagcctcgattatgtccaatttagctctgaatcttaatctttcaattttgttgtttctaatataaactctcggtcagaactctcgagttttcaaaactcttgtgaattccacatacaacctgaactttagggaacctatatttatatatctatgcatcctatccccatataatcacctcggcaaataatttatgttcaaaatgtaaaaaccaacctttcctcagaatttaaaagcatagaaaactcaatgcacaactgaatgaaattcaacaaatgtaaagtataacagtaaaacaaatatattcttttaaattcagatttaatattgtggtaatggatctgcatactaagttatccagatagacatacaatgtatgaaggtgcagaaattcatctatattcagcacatgtctatttgtaatcatacgataataattctgcatctaggtcacatatacatgtgtatatacacaacacacatttacaaaacaaaatgtacatatgcatgacatgcatttttcataactagtgttttcatagctacaccatgtttttttctggcacatagatttgaaaacactgatatattacaggtgtgtttaagtctacacctacaggtaaaagtctactccacggcagtcaaacattttttgccattgtcttttaagtcatatctagtaacactgcacagtgatacagtttaggtttactttctttttctctaacaaagaaacataaaagtatttttctatcattatcatgtgtttcttaagactgtgactcgggtcacatttctattaataaacaatgttccgtaaagcttttattgtatcattttggaaaaatgaaagattgtgactcccaagtccccatgatcctggtgaacatgaaatgggtgtatacacataggcgcaatccaggacacacaacgtttggtacacaaaggacgatcagaccagtcctacccagaacaattccattgagtagtttctgttgcacgtaccagctcggctgcccaggatccattctgcctttaaatactacaaagcaatttacactccaagtgccgcccgcttaagttcttccttttgctctcagaaatggaaatacttatacagtgagtgatgccttgttgcagctgcttcgcgagtccagaaacccatctctgagccgcgcgggattaagccctgcggctccaagctcattctctccagcagctggcaactggccggtcgctgggaggcgcgaacgagcaccagcacgccatctggaggcgttaagaagcagctgcagcaaatttataacaactgtgggtggaacaaggatgtcagaaaattctctttttaaataatcaaatggttttttctcttgttaaataatcacatggttttatttacacatttctgtggattaagaaaagaccaaaaattgcaggaagatctcattctgttgcctatgaatattctctgtctttcgtacttcacaataaaataaaaaatatagatttcacgtatgtacaaacaccacgagatggcaaattttctgcttcttggtgactcgtctcaaaggaagataattaacactgactactatcagaagtttcaagatttgggtatttaactgaaaggcagctttccaaaagagaaatctatccctctgaactaacgcaatccaagtgcgttaaacatgctctgctactttgaaaaactatgaaccttacctctggaaatgtttagtctgctttttatcaatgcattacactgactttagtatgagaacaaggaaaagcagtttcaactatacctcatgtgatcaggtgttcatatgactttaatatttcaaaaaaaaagctctttcaattaatttcccactattaatctccctaagcttctttcccttaaagagaataatttggtatacctggatgagatataagcttaattaattgaatagaacattttatggcttgtctactgcggcatgcatttagaaatataatcgttaaaaatttcttcattacctgcagatgagtgaaccccacccctgccacgactcctacttctatcattgcatcacgattttcaatttcactttttaaaaatacaaatttcactttaaaactctttaatcagaatcttatgtagagtggttgtggtgtttttttgttttgttttgttttgttttgttttgtcagggaaatgtgaaccagagattgattatgcactctgtggggccctcttgggaaacagaaattcctaatcacttcattttcaaatcagtttttgagaatgtccggcagaataaacagaagaaatttcctccatcagtatttcatctcaagtgtttatttccatttgtataacaaatgaacataccggtttttcaagtacataccactaaacatattctgaagaaaagtaaaatttttattttaaatacagatagtatgtaccaaatatttatactgtaatttttgtgagtttgttaaaggtccgaaaacagatgttttcacatatagatgtgtctaaccaaataaaatttacatgaatattcagatgtaacatgtagataaatcagggataaattttcacacataaacatcttgaccttacaaaatcattgtttaagtaaatattcccattttttacaaaatattgtttaagtaaatattaagcattgtttaagtaaatatataaaaatttaagaattcttttgaaaatattaagtaaattaaatatttaaatgtataaacagaaaaaaaagtgagacattaatgagaggagttaacatatgaatctcatagtcaaagacattgtggctatgctcatcagaaccagctgaaaatgataggagctgatgctgcatgcagaaaagatgacgacgtggttaagggaggaagaaaagtattatggtcacgtgtcgttttctgaaaggtctaaagttagtcttaaaacactgagaacagggaaaatataataaaggagtaaatcaccaaatagaaagatactaaggaagtaaaggatgttatttcattttccataatttaatatgtgtaactcaagaaaagaaaaagtttaagacaatgtcacaccgtgaggtctaaagaaagaaaataataggggccttttaatgtctgtctctttcagtgaactaggatgaagatctgtattagatttctattactgtataacaaattaccaaaa

SEQ ID NO: 1881101 - DNA, 4001 bp, Homo sapiens
atatctctgattcctgtttgattttgaaaatatgaacaacaaaacagattctacccttaataatctcaggtcataccccttccagggacaattatctaagttccaatataagccatgtaattagttaagggctttgtatattgttatctttttaaactataaaaataaataaatatgtaacattttataacattatacaatgttacatatatgtgttaaaaatcacacatactgaccacaataacttgatttctccaagaatatcttgtattgatttgaaaatagaaatacatttccaatcttcagcaatacttaccttgatggaaaataacaaaataataataatatagtaataataatattttctagttaataatggtgagtctcctaggttaagaatagaaaatttagtaaaactggatacatgattatatcaaatttacttctatataatttaagggcttaaacatttattcaatttcaaaggacttttggaatataaaagatgcactaactggattcttttctcttataaaatgagcaggcttaattaagaatcaaatgacaaagctatgttacacaggtttttactaaaggaaaaggagtaattgctacaattggcaaagaaagaagtctctcataggtagatattgcataatatctacacgtattgaaaatctaaccaccagaaaaaaattactttaaagtgtaaaatgtaacttatattctaatgtggatcttcatagaaaaagaaatataaagcacaaatatagactgcataaaattggtctttttaatatcttttaatattgtgcttacaatttatggtcaattaagttttggttaagtcttcaattcttcagagaacactcaaactagtaaaacaaattgtttaattttctctgatttttctagttatttctatgaggattctcatctatcagttttgtaatcttatataaataacgttggtgtagtaaattattagaaaaaattatgagatgtataatgtatattaaatttgtttaaattcgacccaaactattatgcattttaaaattttctctcattaagttcctcagtgatgttttgacattttattacttaagtaatatcgttaattttttttttttttttttttttttgagacggagtctcgctgtgtcacccaggctggactgcagtggcacaatctcggctcactgcaagctcccctcccaggttcatgccattctcctgcctcagcctcatgagtagctgggactacaggtgcccgccaccacgcctagctaatttttaacatcattgatttttatcttaaattcccccaatattttaaacctactgtatcctcttttgttatctaatctgtgtggcgttatcactatcgggacaaaattggtttctgcattctcttaggggcaggcagtgagtgaagtctattgatgtcaattttgtttcttctagttcatggttttcttctaccttgattagttgacaagctttgaaagactgaattactgtttgtaccaaaacaataatatcaaacagagtgtccctcctatgtgtattaattacaaaaaatacattaaaatgactgaaatagagacaaaaaatgatcctaggaaataggcactttctatatgtgtttcaatattttattatttctgatatttatagctactgttagttaaaattatgtgttaaaatttagaacatattgggaaattataaaaaaaggtaaaataatttacataattatatttataatatattacattggttaaatgtgtatagaaatggaggtaacataagaattccctgtctctgttgagcaaatatgaaagaagaaaagatttgtaatcacacatgaagtaaaaaaagcaattctgaatgttaatagtcagaaaatttctaggatgacaagtcttactgtctatctgtgatgtcaggagacagagcttcaaaattctgaagttcacaagtgcattcaggtagaggagtgtgaggcaggtcaggaggcaggagacaggtatggctttgttccggattacgctttctctgtcctggaagtcccagaatgagatctgatattaattttgacattgacccctgatatggtttggctctgtgtccctacccaaatctcatctcaatctgtaatccccacatgttgagggaaggacctgttgggaggtgatgggatcataggggtggttcccccatcctgttctcccaatagtgcatgagttctcacaagagctgatggttttaaaagtatttggcacttcccttttcactctcactctcttttgccaccacgtaagacatgccttgctcccctgttgccgtctgccatgattgtaagtttcctgaggcctctagtcatgctgaactatgagtcaattaaaccttttttctttataaattaaccagtctcaggtagtatctttatggcagtgtgaaaatagactaatacaagcactgttaagtacatttttaaaaactaatatatctggttaaagttggttgaacagaatcaggctaataaaatctcatgtgatgccatttatgcttttgtccttcaagggccttataagtctacaaagatccatccagagaagttcatactctggttaaaaaactatgcataatttttcaggcctgacaataggcaatcacaaagcctcttcctggccagacccatggggaataactgtcttttctaccacagacatagtacacagtccttgctttaaagtttctggggggagttgtggtcaaggactcaggccttcctcattcgtcatgcttttcccatatttacattcctaagcttggcatattccttcctctatctttaatctgtagccttggacacacgtctgcttcaggcacctctgctgagacttctttatggagaaatgagaaatcttgaagagtatttgcccgactgtgactcagtatgtaatacatgtctgctcctaactctttccccatgccctccccttgacctcaaagtctgtacatctgcctgagccttttgttctgagttccctcaacggtgagaccacccccatgactacactgatctacatgactctagctaaatgtgctgctccgtgggggaaaatggaacaagggatgagttggtgcttccactaatttaagactcttgcttataccatcatagtaagtaattaaaggtttaactcttgcatttctgatttgttgctttattcagctgctctgatacctgacagttaagctttctctcctagctaagatggaagagagacatacctttgaaaaagatgtacatgctgaaacaaaacatgaaataaatcacagggccatatccatttttaaatttcctaattctgacttaaaagcaactgttctgctgtggtgacagcaaaaagtaaaatacaaaaataaaagtgaaagtgtcaggagcaagttaacatctgtgttttaaagatagtgggaaacctggaaaatataaagcattttattagcaattaattgctatctgtgactcagatgacataatattggagtcacaggaaactctaatcaatgagacaatcttacattttatctctattcctctgctgtagccctgagctccagaagcaaactataatttttcaagcataatgaaggaaagtggaactaagtcataaaaaagtgtttaaattctctactaagtctgaatattctttgtaactatagaaaataaatagtcacatggttctgtaaacttttcaattggtcctcaagaatgctatgtcattagtttatatgtcatcttaagtttatatcctatatttacaaacaaatgttaaaataagcaaaagaagctgtttagtacatttttctattgtctgttgactccactgctataagatgtcttcccagtagactgattattttttatgttcaatatccagtccactaattcttcagtagctatgttggtttccgagaaagtctccatt

SEQ ID NO: 1881102 - DNA, 4001 bp, Homo sapiens
tatgagcacttaagtcagaaatactgctagagagagattaacctgattctgcatgcaggaataaaccttttattgaggaactaatttctcaatatgtcaagtttttggcagctttctgtagcatctattagaatgaatcaacattaatgaaggcttgcttctttgggccgtgtaaccttttgtctcagaggatttggaatattagattcttacctctcttcccaatggcagaaaaaaaaaatgagtttgagagatgaaaggacagaatagcattttttatcaagtcaattgttattttctacttaacctctctaatctgcttattttgggggaaaataagcaactgtattctttgtcaagattattaaatcctaaattgtgtccatatgcatgtggcttctacttgatacaatcagaaagaaaataacacctaagccaacaatctccaactatttccagtggggataaaacagttttaaagtcttcgaatagcaaatattgcttagccattagctttgtaaagattgaggaaaaaattaaaaagagaacactgaaaaaccctttgaaacgttcagttatggtacaactccacccaatggatttctgctgaatttcacttgtgttgagaagcactgtatatactaaatgccatctgaatttatacttaattaattatagttatgtaaaaagtaaagtattagttatataaatagagaaagaattggaagagaatacatccagatataaacagattttggtatgtatggaaaatctggataaaatatatattctacttttaaaatactttctacattttcatttatctatctgtatctattttacatctatttaaacttagtgaaaaagttcaataagcataattttacaagaaacattttatggatataaaatgtgaaacatgtggaagggcaatttttaggctgtcttcaccataaaaaggttacgcggctttagctcttgtatcatgtttttaattagttgtgacttgtaatctaatagttcaataaaatagaagtgagataattgcattttacttccaccttttccattaacttggtttgctattatggacaaataatttaatatctctagtttcttcttcagtgaaacgcaaacaactacattaacttttattttcactctagcatcaagaactaattgaggcaatgactggaaagaatcacaagtacgtgaagaaaatatttattaacattctgcaagataacattattactttatttcttggagcagtttataaatactagcaacttaacccactctttgataaataaacccaaataagcaattttggtaaaaaataagcaagatcatgataaaatcaataaaaatgaataaaataagtagcaatggaaatttgttacttgagcataagaaattatttgatatgcctcatgaattggttaagatgctaaaaggagcttaagctgctaaacaaacaaaatctaaatatagtggcttaaataacatagaagttaatttttccttttacttagggtttctctgaagatgagcatccagactggcagggggactatgtcactcaaatttcactggtaagaatttattcatatagctagactttgctgcaagggaggctgaaaaatgtaatccttaagtggtgtactccattgtccagggaaagaggggcaaaagggggttttgttttgttttaggctagctaacattcttctagttatacttacatcttggtctctgaaaatagttcatgaaatcattgcatcattggatggaaacaatatcctacatttattcctcattccatcccatggctttaagttcctttagtatgatgattattcccaagtttatatttccagctttaatctctgccttgaacttcagattggtacactaaacagtttacttacccattcacttcgatgtctaacatctcaaattcaacatgtcaaatcagttaatagcattaacatccacctaaaatctggaagcccgttttaattcctctgcttcagatgaagtcaatcaccaacactttctttttgtctttctttctgtgtaatagaaaccatgagttttagatgagcacctggcatctcatctacagaccatatctctagctccttttgtaggaggcagatggggttcaatgactaatctcttttcagtgggatatacgctgaagccatcatgcaactttcagatcatgcttattaaaaaagtggagcagcaactagaactttatacatagctggtggaaatgctttggaaaacagtttgacagtttcttataaagttaaatataaacttaccatactactcagcaattctggtactagatgtttactcaagagaaattaacaattcatccaaaggaaatgacaatgcttccacacaaagacttgcacataaatgtttacagcatatttattaataatagacacaaactggatacaattaaatgttcattaaagagtaattatataaataaattatgttatatttatccagtagaatagtcctcagtaatgacagggaacaaactggtgacacacatattaacatgggtaaatcacaaaaatgttatgctgagttaaagaagacttacatgggagagtacaaattgtgtgattccatttataatgaattctaaaaccagaaaaattattccttagtggctaaaagcagatcagtggtttcttggagcttcaggtgggtgagggtattgattgcaagtgcatagggtaggcagaaactttttgggaattttatgtatagataaatatatctatatttatcttggagcttcatgtaggtgagagtattgatttcaagtggatgggataggcagaaactttataggattgtagatatagataagtcttgatttatatatatatttacttgatttatctacatataaaattctaatatatcttcattctagtagtagttacacagacatacagcatatatttgtcaaagtcattgaaatgtaaaatttaacatatttgtgatttattgtatgtaaagtatatatatctgaataaatttgatgaaaagaaagatgactttatttacagtacagaccaatggtaataattaaaagtcaatcatgttccaaaaaggcaattctcagcctaccaaccaaaaaaagcccaaggccaaacggatttccagctaaattctaccagaggtacaaagaggagctggtaccattccttctgaaattattccaaacaatagaaaaagaggggctaatccctagctcattttatgagactagcatcatcctgataccaaaacctggcagaaacacaacaaaaaaagaaaatttcaggccattatccctgatgaacattgatgcaaaaatcctcaataaaatactggcaaaccaaatccagcagcacatcaaaaagtttatccacgatgatcaagtcagcttcatccctgggatgcaagactgggtcaacatatataaatcaataaatgtgatccatcacataaacaaaaccaataacaaaaacgacatgattacgtcaatagacgcagaaaaggccttcgacaaaattcaacatcctttcatgagaatgactctcaataaactaggtatgcatggaacatatctcaaaataataaaagctattgttgacaaacccatagccaatatcatactgaatgggcacaagctggaagcattccctttgaaaaccggcacaagacaaggatgccctctctcaccactagtattcaacatagtattggaagttctggccagggaaatcaggcaagagaaagaaataaacgtattcaaataggaagagaggaagtcaaattatcttcatttgcagatgacataattgtacatttagaaaaccccatagtctcagccccaaaactgcttaagctgataagcaacttcagcaaagtctcaggatgcaaaatcaatgtgcaaaaatcacaagcattctataaaccaa

SEQ ID NO: 1881103 - DNA, 4001 bp, Homo sapiens
gtgattgaggtagatcttgctagcagaaataaaactataaaatgccaaatgaaatgacagtgttttaggaaggtgggatgaataagattcttgtttcatgatttgcagaaatgtgattgaagaaatactgtcatcaaagaaacttttcttttctccttcccgccttccgtccctccctccctcccttccttccttccttcattcctccctcccttccttcctgcctccctcccctccctctctccttccctccttccttccttccttcttcccctcccctccctcctcccctcccccctcccctccctcctcccctcccccctcccctccctcctctcctcccctcctgtcccctccttcctccctccctccctccctccttccttccttccttccttccttccttccttccttccttccttccttcttttgcctttcacaatttgaagattaaagtttaagttgtatcctgggtgtaggctgggtgtggtggctcgcccctgtaatcccagcactttgggaggctgaggtgggtggattgtctgaactcacgaggtcaagaactgcctgacaacatggtgaaaccccgtctctactaaaaatacaaaaattatccaggtgcagtggtgcaggcctgttgtccaagttactcaggaggctgaggcatgagaatctcttgaacctgggagacagaggttgcagtgagccgagattgcaccactgcactccagcctgggcgatagagtgagactgtgtatccaaaaataaaaaataaaattaaataaataaataaaaataagttgtatcctgggtatcactcttttaggctgtctctaaaatcattttataaagatttactagttgaaaaataacaatgctgatagtaaagatcattttatattgaacaaataaaccttttgttatagtgtactaaaagagttttattaagtagagaaaaaatgaagtttacaattctgcacggaactactacccattttaaactattgttttgtatgctaatttctcgaaattaatacacatttaattttcaatgttaaaatcaagtatcttgacactgtttgagatatacagaattggctaaacaatagaatttctatcactcctttgatattctaatcccttacctaaacacaattcatatcttaattataggtagtaaatggaagctataaataagttttgtacacttttatgaaaccacgatgtacttagtcttgaaaattgaagatgcaaatatcagtttttaaaaagtgagagccaggttatatactaatataaaatataaaaacaaaaaaaattttcaagaagcatgcaaatctccaactgtatattgtttaattatcagcatgtttgagaaacacttacgagacagctgtgaaatttaggagtgaggaaacaaacattgggtttgggcctctatttaatctaatttgtggctttaatgagctggtataagtcatgtttttatgatagtaatttcttttaaactgaaacactaatagatattgcctttcagctatcttgcctatttttttcatgaaaatcacaaatgctttcttgaagagtcctgtgtctcttagacataccattactaaaggagtaagcccacctctctccatcacaacaatgatcacagaaactgcattgcatttgtaaccaggtattaggggagacggtggcagttgagtttgcttctctcttaaggcaaccataatcagtaatgtaggctgcatgactttatgtctctaaaggaaatttaatctggtaacactatctacgtttgtttggcttttttctctagctcaactaatgatgaagtttacttttaatttaattttcttacctttcagacatgtcttgcaggtgcaaaaagtcctcttgccttcataaagctatttttctgaagacatttttcatcattttccctggaggggatatgagagctgtccactaagaatctgcagcctcttttgggggtcttccacggattcactgtgaccaaggaaacaagctgttacctagcaacacggcccttcaggaggtattgttaccaatctcttagagctcatcaaaggaattcctgtgctcctggagcagctttaacagggatcattgtttctagggagttgtctaaactgtgatataactgaacctcaactacagaaacataaatgttagcagaggggataaatgtccatagcatccctggaaggttcgctgtcttcgggttccattattttttgaattgtttgcactggcttgggtttcttgaagttatacttgtgcaatatatcccccagtatttggtttcttgcttctcttctgtagaaaaagaagcaaaatggaagatatccaattcttgcttgaagtttgctcaaataaaactcctgtgatttgaagactgggaattctgccttgttcataacaagaaataaataatagatatttatttcaaagcaaattttttacaacttttcaggaaaaaaaggagtatatgtgtacttacttattgatccaactatcctgctctgagtgtctgctgtgtacatagatagcactgtgaatttttaacttcatgagctgataaaacgaatgtcctctaaacttgaaagttgtatgtctcctttcccaaaaatagaagaatgtagctgtgtttttgtgtactaagaaattgctgtctgccaaaatcatagtaaactctcccatagtctttactgcttcagagactggtctcaaactcctgacctcatgtaatccacctgcctcggcctctcaaagtgctgggattataggtgtgagccaccatgcctggcctaagttagtataatttttaaaaattttcaaatgcctaaaatattacatctaaactttctggatacttttcccgtgatagggacagagatgacaaatgttagacattttcctttcttttcttctctctctctctctctctctcgtgtgtgtgtgtgtgtgtgtgtatgcctataaactacagaaccaatgtcatacattttctttactcttatcttttttaagcatcctgggaactttcccaagtccaaaaattctaggccaagattatccaaaaatgaataaaacacaactaaacttacctttttagctttataactcacaacaattgatccagactcctaactgctttgggcaaaagctatgtaatactccagcgactcaactctgactttgcttagaattatcttgggtgcttttaaaaaaatccagtgtccaggcccttcctcaactaaacaaataatatctgaaagtgggtggggcccaggcattcatattttaaaatgttcctattatacactctcaactcctcacttacctgtacctacttctgtgaagcaaaatgtggttcaagaaaaacacaccattaggccgggcacggtggcttatgcctgtaatcctagtacttcgggaggccgaggcgggtgcatcacttgaggtcaggagatcgagacgatcctggccaacatggtgaaaccccgtctctactaaaaatacaaaaattagctggacatggtggcaggtgcttgtagtcccagctactcgggaggctgaggcaggagaattgcttgaaccagggagtcagtgattgcagtgagccgagatagtgctactgcactccagcctggtgacagagcaagactctgtctcaaaaaaaaaaaaaaaaaaaaaaaagaaagaaagaaagaaaaagaaaaaaagataaacgcaccattatgctgactggtctcactccaaaatgtataaccactcacctcaaggtgttgtctggcagtcacactaaattctcagaaccattctccaacctgccccatcccacccagtctagtagatgattttcagttgttcttcctttttttctaatttcccttatttctgcctccaacctactctcgcctaaacaatgagaaaaggatttccacagggtactatcatgcatgtatccacct

SEQ ID NO: 1881104 - DNA, 4001 bp, Homo sapiens
tggcccagccatctaggccagactgtatatgctaaggcataattgctatataactcaaatacttttgccctcaggaattgcttaaatcagcttctataatagaaactcaaaagtgcgaagagggagagaagagaaaggaaatgagagatgaagaaagcctgccattgaactaaactttcggccctggggaaaatgaccaaacttaagagctttggagaaatcccgagggctggagttagacagatttttcctgtgggcatccatggggaagtggggtatgatttggctcccttctctcacctccttcaatccctgtgtagacccaggaaaccctcactgattgcttcattttgtcttccttacttggtgaggctgctgctctcttcccagccttgggtgccttttgcctttcagttctcggggaggagacaggctggtccttcattgctggccccggccaacttctccgtctcactggaggtgggctgctacctgcccaccagggcttggtcctggaagcttccctcccttgctttctctgcttgagacggcagttgggggagtgctgacagccagcttcagaacagggagcctctgcctgatgaagcaaaggctctgtccatattactttatttttcagcaagccaggaatacacacccacaaatgcacacatcaccaatgaggtatgaatgccacacacactgtggtcccagtaagcacttcctaagtgttagccatatgattattacaatgccaaaaatatatgcccactctgcaggcgaatgacagacacacacacctcccaccctgtcaccaatacacaactgacactgtacacacacatttgcagcagatacagactacacaattacttgcccatgggctaaattttcacgctagacaaagcacaaacagacatgcacacagcaggctgctttctgttctgcaactccccttagccagatagtggagcagccgggcaccaaaggcacccagacaccaggcctgaccagcctctagggcttcctgctccagctgagcctccctctccatcctgctcctgccggttcctggtaagctccagtcccagtcttgaggtgatgccccctgagaatccccgtggcttggtctcctgccttgtagcctctcgcaggatgcctgtggggggcggggggcattctgagcagaagccacttgggcccaactatacataacaggataccaccctgaggttcctaccgcctgaccactggagggctgaagtgagaggcctgcaggctcattcccgtggcgcaaaaccgctcctggcccaccagccggcctggacctgccgccacattgctggccaggccccgagatagacggggggggggcagtgagggctgggtgcggggtctagtctcagctgagcagcagcccgcaagaaccggcggatctatcctatcagaagtcggaagtcatctatcccatcagaagagtgaaagccgaccaccccctaatccgcctgggagaaccagactgcaaccaggtcaaacgcctgtgtgcctgcgcggaagcatggatcttaattcgttatttggggatctcagtaaaggaagagagagaaagaaaaaagactaaatttctgcagccgcgaagtatgttcaatccttactgaaacctccaaatctcctacccatatctcaaggtaaatgaattctgactattaaaaataataaagcagtcacttctcacatttgtacagaggttagcagtttgcagcgcatttccacaaccagaattttatctattaatgtttggaacaaactcttggctgttatagttgactcaaaatcgaaaagtttgagaacaataataaaaacacagccagcccatacacctagtacaactgtgtatgaggtagaatacaaacttgaataggtacaaaaataaaccaagtcctacctacagtcgcgccttgtgaacgaaccacggcagaaaaagtctttctgctgacgttaaacagccgcaacgggccagtgatgacacagaaaacaaacaatcccaggaaaacaaagcagcagcgacagccacaaacgcctgccaccccggttgctctcaatctttgtttaactcattctgaaaaagataaaattttgctgaaaatcttcctcttttaactagctgctgaactaaggagcgacagaaataaagaagtccgtgttaaaagaaggaacacaaaatttattcgggaatcgacaaggcaaaaaacaaaaacaaaacaaaaaaacacaacaaaagtgctctagttctctctagaaaatttggtcccccaaacaacaagctacagtacaaccaggtctatggttttcgggccgggccggctccgggccacaagaccgcctaggtcggccgctgccgggtttcacatttctccttcccaaggtgggagaagcaggaggtttgaaaaacaaaaagcagggaggacgagccgtcccagcagcgtgggccaggcaggcagtgatctccctgcctccaggacttgcatcgaaagatccggggacatttgtttttgatttttttcttcagatagggagagggtgaaacttccccaattggtagacgaaaccatcttttattggatatattctcctaactctgaacacagctttttgaaggcccaacaaaaactctaacgcaaatcttccagaagagaagatgaggaatactaaagcttttgattttcatatttggatttagcaaactccaaggccacaatacttccccggttgcccggtgaattttttttcctttttttttttttaaatactctcttaaaaagttccaccgatctttcaaacaaaacattagccagccgccggggcccggaggtgcccgaagcgacgggactgatagcggaggaaacgcagcctccctccgcgcccgcccgcggtgtaaaccgagtacaggccgtggagccaggctgccccggctcccgctgggtcccaacccccgccccgcctagtgggccccgcggcaagcggcttctgaacagcttcaagagggttcgcggagcaaacacacgtattggtccgtccctttctcgggcagcgcggtcccgccatcagtcctgtccggcgcgtctagccatggactgcacggcagtcgggcggggaacgcggagagcgagcgcaccgacctgtgagagaaggccaagaggtctgcgctgccgacgcccggtcgcacctccgccccgggccctttccgcggtgaatttgggcaggagacgctggggctccggaaagagacgagcccagtagaaagcgcgcagagaggcagcttcaggccaggggagtgcaaggtcacagaggtcagggaggtgagcacaggaggacataaactgaggggacaaagaggagcgacaggagcttaggaaagcgaaaaagcacagagggaccctgggcgctggctccagaggcgggcccagagggtgtgaggtcaggctggcggcggcgtcgtcggctgcgaccggggccggcgtcgcgcgtccctgcatcctcgcatccgtctgcaccggcatgcggtgggctctcagagatcgaggcgcgaatgcagcgcgccggtcttgctgtcgtggtcccagtaagagcaatgcatcatggcgagctcgggctgccgggcacaagcgaactgcaggcccggcgcactggtgggcgcgggcgccgggggcgcggcggtggctgggctggcagggctgagctggcccggcggcggcgcggcggccccgtggtgcggtggggcaggcggcggtgcggcggccgcgtgcagatggtgtgcgtgcggatgcgggtgggggtgcggcggaggcgggggtgcggccggcgggcctcccaggccattgtacgagttcactacgccggggggcagcgccatgctctgcacgcgtgtgtacggcccgtacgaggcggccgggcccgccagccccttgaccacagcggccgcgccagggctaccggggccc

SEQ ID NO: 1881105 - DNA, 4001 bp, Homo sapiens
gggtgctgaggatgcacggtggaggaaggaatgggagaagagtttggatctgctctgaacacgcggggagaagacctgctcctctctctcaccacagcccaccatgccccagcacacagctgtgtctgctgtacatctcacacctgcccctcctgtcttccccacactcagccaccagtcggaaagctgtgacccctgcttcccagcttcccctctagacacccctgcacccccaggactcacggcacgtccctgcttagatgctgtccatggttcccccaccgcgtttaaaggctacacctgcccaggcgcgaggctcactgttggccctggctagctgctcccccaccaccccgcactgggcctccttgccctttttgtccttggaaccttggcacaggcttgggatgctccccagctctacacagccaccctgctccatgtcccttggaacctaggcagggcctcctgctgtaagcctcatgtgtttctcttctctttaaaggccgcagtgtacccacacacccagtgggcgtttgctaaaggcaggcacacaagagcaaagaaagggaaggagaaaggaacagcatgccctatcctgggaggtgaggcagtgggcaaggccccaggctctgggctgaaggcggcctctgcaatcctaggtgacaccaaggtccaggtggggtgggggtgagcggcatacctgatgggcacaagggtgtggacagggctggaagcaactgtcccagtgtgtcctgctttccctccctggggggtcccttgggcatctcagcctggtgaggcactttcctccctccaagtgctggcacgtgaccaagagagggtggcatcaggaagcacctgtgcctgtgtctgtgtgaatcagatctgcctgtcgccgtgagctttgtgtctgcctggattggtgcgggggtgtgtgtgtttgtgtaccggcgtgtgattgttttggtttgctgtgatgagtgtgggtgtatttctgtgggggccatgagtgctctgtgggggtgtctgctgtgggggtgggtctgggtccccacatgcccgcggagctgtgtgtaggtgtctgtgtgctcctcgagccttcatgcttcagcttcccccaccacagccccgccagaccctgcccagttccccactctttgctccccccagttcccatcacctagcaacaacagaatcaaagcagtggcctctgcagacaaagaaggtgtctctaggagggaagagctgggaggtgggaagtgggggaggggccccagaccaggctcagagcatatccttgctcctggcctccaccgcagaaggtggctcacccctctgcatggaacagtctctctccattccctctaccctggccttcctcctccttgcaggccccagaagctggagggggctggtcggggttgggctcacagacacagtggtggagctcacagaagtgcccccacccaccaggagcccagggtgggcctcagccagccgggggtaatgaggcatgggatggactctgcgggcaccaggcctgaccctgagtgcacccaggcgagggcgggggacactcagatctgcccctctctgcaggaacctggtttccccaccctggaggccagcgccaaaggacgttcacgtgcagctgtgggtaatgggtgggccatcctgagggttgggaatggaacaggcccaggtgcctcctctggccctcaatgccctgcaacctggcctctcctgggactccagtctcccccgcacacccctgccctgtccccacactccagccgtgctggccaatgggccagactctctttcttggggtctttgcaccgccctcccctgcccagcacacccttcctccaggttgccacggggctcacgccatcgttcctgtggtcatgcggttgccaccacttgggcaaagctggtcctggccactgtatggcggctcccctccccacccactctgtcccccacctctgcattatctcgcctgaggcacttagctcactctaagatggtcctagttactccctgattgtctatcctctgactcacccgtgatctaataataagctccatgatctaataatagccagattcatttagcacttactatgtgccaggcaccgttctaagcccttgatgtcttctaactcattttacccttgcagcaaccacacaatataagagctactgtctccaattaacacttggggacactgaggcaaagagcctggctgaatattgtgcccgtgaagacagagggacagcctattttgtttgctgctgtatccttagcacccagcacagggaaggggtcctggtacatttctagaaaaaatggaggggagcagagtccccctgagcacctggggtttgatgcctccctgcccagagcccttgctatagcatatgctggtgagggccgaggctctagctcacactccagaccggggtagggatccaatctggctttgaagacatcatgcagagcctctgctctggagatgggaacctgcagacaaatgcctccttatctcaatcctctgaaaacagtttgaccagggagacagcgttcactcatgaatttaagaaaaaaaaaatccctgatccctactttttgccaacttcaatgctgatttctagtggtaccaagaaaaatgcaactgagcctccatcctcaaggggctcacagtcttgtgtggagataaaaagtgagtggtcattcagattgcggtgaaatctcccaacgactgtcttctattcacagttatcaatgtcctggagcggagctgctggggaggaagtatggggagtggcaggagatgagattggacagggagggacatctctgagttcccagccagagaactagagggcaaacagaggccattcatggtcccatgccacaggagtgacacattcgcctttgtgctttctagctgactcctgtgcaggtgcaggtgcaggtgcaggtgcacacacacacacacatgccgtgttagtggggctaggtgccaccttacgaggcccccaatggaaaaaggtttagggcagggagtcaggggtttatacaaccattggaagggctggaacatcaaaagttgggacttggagtttactgccagctttcagggaagtaggatgttactgttgcctcccaggtcgggaaactgctgaaaattgctgaagatgttcaaggctttctgttgttattgcactcaataaatatttatagaatgaatgagtgagtgttcacagactctcatatatatttatatcacatggaactagtttttcccccaataattatttattagaaaggtgaataaaattataaataacaaaaacaataccttcaccattaacttaaaaaaattctaaatacaattctttggactctcttgatcattattcttatgaatacatagggatgcaatcaaaataaagaatataattttgcatcctaaccttatttgcttaatttttaaattttgaaataaccacagatgtataggaagttgcaacgataatataaagaagtcctttgatgtcttcatccagtctcccccagtggtaacatcttatgtagctattcaatactgaagccaggacattgacattgatacaatgcacatgttgaattctatgtcattttatcatgtgtgtagatgcaggcctgctgcagatccaagtcctgtgaccggggtcctgcccaagggtcctgcttccctaggcatcccagaagttcagcctgcatctcgaccagagcctgagagtagacacctgccggtttatctgtcccttcatgtagcaggtgacagaggtgccaggggcatggcaggggtactctgacacagcactgccccacggagcccatgtcccagggcagaagacccacgatgcacagccagccaggtgagagaagaaatgtcagatacagaacacaatgaagaagaaagccagctatgaaggtggccccgtcg

SEQ ID NO: 1881106 - DNA, 4001 bp, Homo sapiens
ccaaatattgattaaaatggatgttttagttgagagaaaaaatacctgcaaaacataatacattttagtttatttacagaaattacctcaaaaataaagttcagaagaattttataccaggaatctcaactttttaaagaagaaaggatagacacgagttgaaaaatattcttcacaatattgtatgtctggtgaaacttaacatttttaagaaaaatggcatgaataaaacaatggtattagtcttctttttttttttgaaaaacatatacacatttgtgatttggagagaaccagtttttggtagaccagtgggcatgggtacttagcaaatgcctgtgctattgctccaactattctgattcattctaagtgagagccaagcatatggtctggtttatgtgtcatggttccttctttttagcattcactctcatctataccctttcctaagggagagaaatatgctaatgttaagggaactcacataactccttaatgttggttggcataggcatgattctactagaaatcattctgccatgaaggctgagatgagtagtatcagtgcacccaatgaagggctctgacacatttgacaaaagcaaatgttctctccaaatcatacatgtgaatatgtttttccaaaaaaggagtactaataccattgttttattcatgccattttttcttaaaagtgctaagtttttccagacatacgatactatggagaagatttttcaactcttgtctattctttcttctttaaaaagttgagattcctggtgtgaaattctcttgagcttcatttttgaggtaatttctgtaaatcaactaaaatgtattatgttttgcagataatttcgttttctaaggaaaccaacaatgcatttaatcaaaagcaaatatttcttctgctgctttttgttggacccatgcagcataatttgaaaagaatgactagctgtgttaaagaaaaagaaaaattatattaataaaatgctctttttctacattggccccacaatgattacgttgtctgggtcaatctgtcgggtaattattactttatatccttctcaggatagtttccatatgttcccttttgcctcagagcaatatcctaatctgctggcatgctgtttcatcaggaaagcatgcttggcttctcataggatcaaatgcaatgattccttttctgggactaatgaccgccaagtgtcctgggaacaggctaactgtggcctgatctgttcaggccaggcccgtcttagaaccaagcaattattcattgtccttatgtagtgttcaggcacttacagtttctctgtttattcttctcaatatctcttccctgattgatgcataggacctctagctcgggctttcctcttagtttagaagttgaataccatggagtaagaggggtgggtgggtgagttgcaggagaccttagaggcagtgctaacttttgacaaaacagtgaagtagttgaacagaagaagaggcaatttctttctagaatttccactctttctccctctctcactctctctctccctccctcccccaccctctctctctcacatgcactcatacacacacacactcacacacactcatgcacactctccactcctttctcttcctttgcctccccatggcctctcctgaatcttctttttattctctactatctatcagtctatcttatggttttatttttttcttaaatatccactgataatattaaaagttatgatcccttcagaattatttgcatcttatctaggactcaagaccaaaagccttaagaacttaataaaagcaaagcaaaaaggttacagaaaaagaattgatttcacccttttctagctcctttgctttctgctgctctgcaataggcaggtggaggaggaaaggaagaaacgaaggaggaagaagaggagaaggaggaggaggaggacctggctccagctgcccacactctccttggatgctggagaccatgaggtggcaacagtgctaggcgactctggtgtgacctcataatggccttgtcttccactgcgtctcctcccagagcccaagaggccctgagcctgtggcacctagcattgaaatggggagcagacagcccagcccaggtgagcttggaagaagaccttcgtacctcagatgttgattacagcctttgggacattgatcagaagatctggttaagcttctgaccatggaaatgtgagggaggcaagatggctgactagacacagtgggaaagaacatctgccaccaagggaccaggaaatccagaggactggtgcattccaaacagatcttcagagaaggcattgaaaataaatggagggagaacacagatgctgggctgaagggcaaggaggctgggaacactagactgggctcccacacatggggactcattcctggcccccaataactcctggggaaagggtgagttgagcaggcaaggagcaacctgctctcaccatggacctctggaaatctggcagcaggagaccccacatccctcatggacacttgagttggcagggagagctgcttagagaggtagtaggagcagaattccagccggtatggagctcagagggttttgtgaagcaatgtctacagcagatcatggccagaagcacctatccctcaagggttgccttgcttccctaggatactttagccttacatgaactgttggatcagaatatagcaggatgatcatgcccatggaatggggccaatctgacctaagtgcacccctgtctgctggcctcttccggggccccagcctgggtgcacctgcttgtactgcagccttggatgcccagccagggtgcctctgagggaactgcatcatagctcctgcactggcagaccatgcctgaccattggagatctccagcagaacaggccctgctgacctgtgctagcccacccatctcccccataccacagcctcccccatgcattttgctggcatgcactcgcccacagctaacccccacattacttgattggggggaatgcatactttgcctcctcttccccgctggcgcatgtgtgcatgtgcactccagcatgccactgctgctgccatgaatggaccctaccctcctaccgtgacaccattgtcaatggggaatgcacaaaaggagaccagcagccctatttcctgtcctgagctgccattgctgctggtgcaattgcatgcacagagaacatcagccctgtgcctgccaaagccccacctccacactgacactgctgctggccacatagatgctggtagctcctgtaccccttgccatgccaccaccactaccaccactgtgaatgcccacacagaggccagcacctctgtggcaatcagtgccctgcctcagtctatgagcatgtacaccagtgtgctgtcactgctgatggcacattagaatgaggatggatcttgctgccagtgcccaaaaaagtgctttggatggcaccacctattggagtgttgtgaccagcagtctgggaacaccttggcctctccagggcagcaggatcctaaccttgagggggtcacagaacaaagccaggggcctgataccagcccctaaaagttagagtatgcatctcaggagttccgagctgaggctttgctccctaaaatcttccagaaatgaagccagttaactgaacttaccttataccataattaaactcccaaggatgtcaaagaggattaaaaaaaaaatccaaaggacagcaacttcaaagattgaaggaacatcagcccacaaagatgagaaaaaaatagcacaagaactttggcaactcaaaaagctagagtgtcttcttacctctaaacaactgcactagttccctagcaatggttcttaaccaggctgaaatggctgacgtgacagaaatataattcagaatatggatagaaatgaagatcatcaaaattcagaagaaagtcaaaa

SEQ ID NO: 1881107 - DNA, 4001 bp, Homo sapiens
agccacgcgccaagggcagttctggtttccacagataagcatttaaggaagaatgttcaggagtcctgctgtattcttcaccagacttgtctcagagcagctgctcacccaggagctccatggccacagggatgcccaggacagggacgactgcttgcccactgccgtgctctggggctctgggcagtccctcggcctcacccactgctcagattttctgcaggaaaaatgggagagccaccctttcaaagagtgacccgggcccggttcctcctcaaagcctttcggaatgaatctcccagttccccactgactggacatagaacctctgctctttccttctctaaggctgtgctagtccattattcattaaaagacaaaatgaggccgggtgcagtggatcacgcctgtaatcccagcactttgggaggccaaggcgggcggatcatgaggtcaggagatcgagaacatcctggctaacacggtgaaaccccatctctactaaaaatacaaaaacaaaattagccggctgtggtggcgggtgcctgtagtcccagctactcaggaggctgaggcaggagaatggcgtgaacccgggaggtggagcttgcagtgagccgagatcgtgccactgcactccagcctgggcgacagagagagactctgtctcaaaaaaaaaaagacaaaataattgtcttttaatgactttaaaagacattgaggtgggtgtggggctcatgcctgtaatcccagcaatttgggacgccgaggtgggaggatcacttgagcccaggagtttcagaccagcccaggcaacgtagcaagaccccatctctacaaaaatgtttaaaacctaaccaggaatggcagtgcatgcctgtagtcccagctactcaggaggctgaggtgggaggattgctttagcccaggaggttgaggctgcagtgagctatgatagcaccactgcactccaatcggagtggcagagtgagaccccaactcaaaataaaattaaaagacaagaggccaggcgcagtggctcatgcctgtaatcccagcactttaggagactgaggtgagcagatcgtgaggtcagtagttcaagacccgcctggccaacatggtgaaaccccatctctactaaaaatacaaaaattagctgggcatggaggcgcatacctgtaatcccagctactcaggaggctgaggcaggagaattgcttgaaccgggaggcagaggtttcagtgagccaagatcatgccactgcattccagcctgggtgacagagcaagactccatctcaaaaaaaattaaaagacaaaatgtggacacacacatggccccagcaagcaagattgattactaacttcgtggtggcgtgcacatgcacacgatgttccacaagctcatcatctattcgagtcgagagtattcagttatcagcctcagaaatccagaaggaacctcacatcccaggagcctctggcatttcagggcctttcactccaaggagccgcctccaccgggccttccccagcaggatgtatatggccctgtctgtgtgctaggaggagaagggcaggcccgtgtgctgtctggtgctaggtgtgagaccacagcctttctggaaaggctttgtactgtgctgctggtgtgcagaccccgtgcgtggtaggggcttcaagaatacgcatcaaatgaacccgaacccaaggacgcttgctcacctgtgtcatctgggggtctccttccacaggaagcacatctgggcagagtgaaggctcccagggctcaggtccagaaagagctggaggctcctgagagcaaggggccctactcggccatgagcccagaacaatgcgagcttcacacaccgcaggtgtgtgcgtgtgggagcctcttcctgaagccttggggtcaggggccggggcccagcaggctgggtttattgtccattgtctcaggccgggacaggaagcactttctgttcccaattgctcgggtggattaatttacagtggggagctcagagtcgcccacggcacctgttttcccctctgaggggccagcttccagcttggagggtgtttcaggaggggtctcctctgcagagacgtggcctcctccagagacccttggccacagcccctgcccgctccgtgctgggccgaggccaaggccctggcagccctgcctgcttgcccgggtcacgctgcccacccacggggaaagctgagccctgtggagtgcacaccatgctgtcagcagtgagccatggtgaggcagcctcagcaatgtgtcttctctttggttgggaatccgctctctcttccaggttcaggggcaggtgatgtatgcttgttttcatttggtgaagatcgtgagtcccattttacagataaggacgctgaggctcagcaaggttgactacacaggtcgcgaatgaagtggtgggatgcaaacccgagtctgctccaggtcccagagctctcaacctcaaatgtctcaggagccaacgaaagcttgtgactgagtgtcaccagctggtgtacaaagggggagtggcaggaggtggaggagaacccaggggtgcaggcaggggggaccctgtgccatctccaagggcagcactgctctacccagcctgccatgccttgaagtaaggtggaccttgtgtggccacatttttccttgttagtaactcagaagatacatttctagacacggggtaggtcacaaaagcctgtctgcaggcggcacattgctttccacctctgctctgtgccaccatgccaacaccaacagtgagcacctgctatatgcaggtgctgcccgggcacctccacaacggggacccatcctgtgtcttcaggcccccccaggcagcaggcactgtgcttcctgtggacacacaggggactgaggctcaaaagagcaggctcctgaccctgggcaccaggctggtctcggcttgctcactccacccctgcatccctgcatcggtttttcatcaccactaatgcaggaggctgaggaagaattctggagtctggtggaggatggggaagctgaccctatttctataggtacctccctcatttttgtaggatggctccaagtcagccaccgagactgccccctctgcactaaccattagccagcactaccaggattggccagcttgctctgtgccacttgttttatttatttgtttgctggagacagggtctcgctctgtcacccaggctggagtgcagaggtgcaatcatagctcactgcagcttccacctcctgggctcaagtgaccctcccacctcagcctcctgagtagctgggactataggtgggcgccaccacatccagctttttttttttattttttgcagagacagggtctcgccatgttgcccaggctagtcttgaacttctggcctcaagccatcctcctgcctcagccccccaaagtgctgggattacagatgtgagccactgcacctggcctatgccacttgtgtactccaccaaaataagcttgattccctgacttcggtggcttaagatggctgagctctcaccctctctgcccaggcccctgcccacctgccctctgccccaacagccacctctgctaggctgcttcctcctactcaggcagggtggatggttcattgtgtggccccggatccaggttcccccactgcctccctgagtgacagggctgccctttgtggagggggagattagaggcgggctggaggctgcgcagccctccctggatgacaggagacatcagccccgcacaccgcaagggcctggagcgaggaaagccttgacaggcctggaggggatccaagaggggagccaaggagggggcaggctcctcacacacaaaggccgggcctgtcttcacacctgcggggatgaacagagcccagggccgggagaggtgggggctgtggggggatgaataattcgctctgaaagaagcatgtcacaggga

SEQ ID NO: 1881108 - DNA, 4001 bp, Homo sapiens
gccttttatagaccaggaatgttctttttcttatccagagcacaagcaaggataacacattgcattagtaaattgggtcagagccaaatcatagtggacattaagatgtaggtctattaagaagtttctacttaatcttataagaatagaagacattggaagttttaagctcagattatcagattttgttttgttttgttttttaaaggcatttctgttggcatcacagaaaatgatttggaagaacaagactgtttaatacatttctggaacagtgagacacaagaggacaaggcacagaccatacagatggagaggaggggaaaataagagatgaatgaaaatgaagtgtgcaaaggcaaagcctgtgctcctccattccaaagcaggaattaaatggtttaagtttgtgatggcagaccatctcctaccactgctattcacttataaggaagaggacaagaaaatgtcctgccttcaacttatgtttgcaaagaatgttttaagattgagtttgtaatgcattgtgtatttctcagtgaaaagggatagtccagtttaacaactgtccatttcacatttagcaatctgtttacaccatcacagccccctattatacgccaaactacgaaaggccttgaatgtcagcccccaaaggtcttactttctctaatagccagcctaaggttagagatcactcttacttttgcacttaaataaatggatggtgctaaacttctgtcatttaacaagctaaattaaagaataattaacagccttaacagttaaaataaaaatatgcataagatgttttacaatcctataaaacctaatgaaatatattattcaattaaaaactttcacctgagaacttaggttcttaggtttatcatacaattcaatctgcacatcttctgggaattgagttaaaaatgcagattttgattccatgggtctggggtggagtctaagattcggcattttaacatgctgccagggtttgtccatgatgctagttcccagaccacactctgaataacaagaatgtagcaatcattgattgagtctcactggataatagatttttacttggagagggaggtggcacaagcaggctggaaagagtacaagggtgggagtcaaggataaatagttcaagaactatctctgccattaataaactgggtgacatgaggcagatcctatgatcatttggggcctcagtttcctcgatgtatatatctgcaatggaatagtgaattggttttctaggacataaagatatgtttttagcaaacatttaacaaaattcaaaccttaatgagcagacatgctatggctggtttagttgcagtaaatgtatttatttaaaaatgttcaatgttttcctgctgagagtgcatctgaaatagttaccatctgattataaagaaaatggaaaactaaatttcaagagaaaatgacctcttctcttcataaagttgaaggctaaatgaaagaacaaacaaagactgtggccgaggaaccataaatcaggagattaaaatattccttctatatacagaaataaataacctacttttcttccttaggcatggcttttagcaaaatacactgtttttgaatttgaaatgaaacagtttttcatttcatttaaacatgtggctctcaaccgatgggagacaaaagacaattaagtatagtctattgcttgcagaagcattcagattagtaggggcagtgttcccaagaaatcaatggggtctaatcagaacacccaaaatccaaaagtatacaccttgtacaaaacattatttcttcataatctgtaagtcgttgtattagtctgttttcacactgctgataaagacatacccgagactgggcagtttacaaaagaaacaggtttattggacttacagttccatgtggctaaggaggcctcacaatcatggaggaaagtgaaaggtacatctcacatggcgacagacgagaagaaagcgtctgcagggaagctcccatttttaaaaccatcagatctcgtgagacttattcactatcacgagaacagcacgggacccgcccgatgattcaatcacctcccaccaggttcctccggcaacatgtgggaattgtgggagttacaattcaaaatgctatttgagtggagacacagccaaaccatatcagtagtaaactagatagaatggatttttaaaaagtgaagaaagagaaaaagagagggaaggaaggagagagagctgtattatttaacttggcagagacttatagtgagcacattcattcacttgtcacaatctttgggatcagctgtgtttttgaagcagcccagtatccaggggtcaccttttgccagctgcctgggtcctgttgcttttgatcactttctctggcagatgtgatgtgattctatttgccagctcgctcctttgactttgctaactcagtgcacactgctctcatctcactagcagggctgcctctgggtgaaagcacttactcctgccaaaggcgatctccccttggaagggcaagcccctgtcatcacctgacagcccagactcccacggcagatgcagctctccctctggtcctggtgtcagattcaaaggcctgacaagcttccatcagcaaaagctctcttttaattgctatagatcaaaaagtgctgaacatgtccatcaaaatagagtagaacaggatagaggaagagaggaaagattaggcatttaccaagataacccagggtttcttcatgccacctggtcccatctgattaatgagggggtcattttcccaccaataccataaacaaaaagcaaccaatttcattgtctgtatcaatatacggacatgtattttctgccatgtattttctatttcctataatttgtccctacagttacctcatatttccattaggggacacccgccaacacacacccacacctacaagagagaaagagagagagcccttaaccgcatttctttttttaattttacatacttgttattcctttgttctttcctattgcattctatcgacatggcaaaaaacttgattttcatagctggaaatgggcttcactaaacagagtctaatagttgagtaaactaaggccaagagaattgatctgacttctgcaaggctacacagaagctttacctactaccccactttctatttaatgtacccttctatttcatgactatgctagctatatttaaataacttgatctaaaagctccagaggcaatcacacgtgctcgttggaaaccaagcccactatgccacattggccctgccactcaatagcttccttctctgtacagtgagacgtgcagccttccctacctcgcagaggagttgtgagcattgcaactactgtcttggtaatgctattcagtccaaacacacagtgagttctaatttatcgactatttcttttttttttgttaactttcatgttaagttcaggggaacatgtgcaggtttgttacgtagataaatttgtgtcatgggagtttgttgaacagattatttcattactcaggtattaagcctagtacccattagttatttgttctgatccagtccctcctcccaccctctaccctctgaaaggctcagtgtatgtttttcccctgtgtttgcccatatgttctcatcatttagctcacacatgcaatatttggttttctgttcctgcgttagtttgctaaggataatggcctccagctccatccatattcctgtaaatgatatgatctcattcttttttatgactgcgtagtattccatggtgtgtatgtaccacattttctttatccagtctatcactgatgggcatttaagctgattccatttctttgctattgtaaatagtgctgcaatgaacatatgtgtgcatgtgtctttagaatagaacaaattctatattcctttgggtatatactgagcaatgggattcttgggtcaa

SEQ ID NO: 1881109 - DNA, 4001 bp, Homo sapiens
aacagcacagtagggtgactatagtcaacaacagtgaattgtatacttcaaaatagctaaaagaggctaggtgcggtggctcactcctgtaattccagcactttgggatgccaaggtaggaggatcacttgaggtcaggagttcaagaccagcctggccaatatggtgaaactctgtctctactaaaaatacaaaaatgagccaggtatggtggctcatgcctgtagtcccagcttcttgggaagccgaggtgggagactcacttgaacctgggaggcagaggtcacagtgagccgagatcgcgccactgcattccagcctgggcaacagcgcgagactctgtctcaaaaaaaaaaaaaaaaaaaaaagaaaagctaaaagtgatttgacatgttcccagtacaaagaaattataaatgttcaaggtgatggaaatcctaaacaccctgatttgatcattacacattgtaagcatatatcaaaataccacatgtacaatcatgatgtatcaataaaaaaaataaaagccagaacccaacctctattcatttgccaaatgtgtactgtgcctataccacatgctaggtgtttgaggacatagctgggagcaaacaaggcaaaaatcaattatagcagaaatctgtgaaaaaagaaataggtcatccctcatcttggaaaagataagccacaaaaagccctttccaggaatatgtaataaaaagtcacaattcaggatccctggctgagatttgggatgactggagatgatgataagaactaaattggaggaggctttcaagaggaaaaagcctccagcaagagacagccccacagtgggaactgcagcctccccttctcaccaaatccctcccgaatggtgtacttcgggaccactcttcagtctctgtgcaaccgagttttattttagcccacgggaccctggtttttctggcagggggcactgcaaagacgggttacaggccgaacacctcacaacagagacagcagtattctctctaggataaaaagggcttgtgtttaatcctctgtcagggcaggggggaaatgcctctggaatccaagtctgtggaaccggctcagcagagagatgtggctttataggcaaacaacgtggcatagagagaggaacctggccaattctgtcttataagagtagttatgttatgcgttgcaaggactccacattccatggatttgtgaactcagatggaatcttgtttgtccaggcctgcatgaccccatttatctaaaaattactaacttcctagtttatagtttacaatcctgtgcccgccgcctccctccccccccccgccacgcccccatgagctttctctctattactctcagtctctcaggttaaagccttgctcagtaattcagctgtggaccagttattctgattatttcctcatctatcgtcttacagtcataataataataatatctgagataatatgagcatacaacaagacagtatgtccacaggagcatctctaagatcaggacagtgatttcttgctcatggaataagaaggatttatgttaaagcaagttataagaaagcagtttaatactttacgaacgttaagtttaaaaaaatcataactcgctggaatcttttctcctctctggatattggagaactcgcccaggtttgggaaacgttagccagctcctgcaaaacacctcctccctcagccctccccgcgccccctacgaccaggcagaaagggtgggaaggggagcacagctcagcatttatttctggatccagctcactaaaaatacctcggctctcctgtttgatcactctcccttttgacctgaatggatcgcgggagccgcgccgcccgccccaccttcggcccgttgccctttaaaggaaaagggcgtggggacggattcctgccgctcgagggatagaagggagctgggtagtcaggggccgcggccatgctgacgtcagggcagccggcgctcagctccgctcgctgccacagtgcagagacctccctgagggagggggacagcctcgcgctgggattggctggcctcgcgcgagcgccggcgcggagtggctggcgaggttttagagggagtcccgctctccaattaaagcggcccagctgcgcctggctgcgcacagagctccctcccaggcccgcgaacttggccattcagccgccgctgtccccgctgcgcgccctcgcgcctctgcctgagaagccaggcgctgttcccccaccccagaagaggatggcaaaggtggctaaggacctcaacccaggagttaaaaaggtgagtggaaagctgtttgtatttacccagattcttactttttcttgttccccttcccatctgttcgcggaaacttcccaaaaggtaatgagaagggaactctttaaattccaaaactgcatggaaaacaaatagttgggaatacatgtttgagctaacaggcacacacaccccaaacccaatgttgtgtaaaatatttgcaaagggtcttatgtctttggtgatgctagttaaagtttaattaaggttttacatatatatacaatatatataaaatgtatataaaatatatatataaaatatatataatatatattatatataatatataaaatatatattatatataatatatattatatataaaatatataatatatattatataaaatatatataatatatattatatataaaatatatataatatataatatatatatatgaaatcttatggtctgtaaaggaaaaacccctagcttcctcactccctgtcctcaggtggctgaagtaagggttgagagcatgtaatatttactcacagtctcccttttgctattatcccagtgttttgtgtgtttcccccaatacacacacacacacacacacacacacacacacacacacgcacgcagtttctttagttggtgatgttggcagtggcagcagttccagcataagggaactgatttctgtccccagggtctgcacgtttcccttacaagaagggctggcccggagcccagaaggtcatgggtaaactcctgcacaggagcctgcggctgtgcctatagctccaataccacttgttgcctacctgaatgcagctgggagaaggcacaggctggagacttagagaacatgtgaacgggaagggaacagagagacaacctaggctttacagatcgggaaactgaggcccggggtcacagagagttggttctaacaggcagctgactgtaaggcaagccctaggcatccagactcagtccctgccactttttaactgcacatgattcaccaggtcacttttctgagcctcagtttccttgtctctgatgtggggaggataggcctaacctccctcatggcagtggtagcagggatactgacactgtgagttaatttcccaaagcagtcattgttaaactctgatttcacagggtttagtcttgaagggcaaagtcttccttaaatatctgccattaacctgcagggtagaatgagagggggaaaaacaaaagacgtgagaatcaaactaaagacacaaacagccactcagaggcacagcatgcactgtctaatttgtagctgtgctcttctgtagaccacctgcccagaccctgtcacagagtccagtggatccttctaaatgtgggtaccaagtcacattgaatctgggcatttgtctggaatgtatcatgcctcactgcatttgccaagctatttgcagaatcaagtcatttcccctcctacagaaattaccataacattttagactcttagaagatacctattaattgctacctagtagtgagttatgcatgcaatgctcttatttctctatacatttttctggactccttgagggcaaacctgtcttgttcatccctgtttgaacatagcacaccatgccacacagcaggactcaaaaacctgtgggtgactcatgagaatat

SEQ ID NO: 1881110 - DNA, 4001 bp, Homo sapiens; identical to SEQ ID NO: 315885

SEQ ID NO: 1881111 - DNA, 4001 bp, Homo sapiens
ggtgaaaactcatctctactaaaaacacaaaaatcagccacatgtggtggtatgcatctgtaatcccagctactcaggaggctgaggcaggagaatcacttgaacccgggaggcggagccaagatcacaccactgcacttcagcctgggcaatagaatgagactctgtctcaaaataaataaataaaagctcatctttattgtttaaaatatttaaaagggcaactcatcctaaaataaggtcaggttggcctcatctccctactgctataaaaatatttccattatgagaactgttttaacctatgaggacacctcatggctgaattaaaatatacctctagtgcccaaaatctgtagaatcttctgctgtttcaaaatcaagtctgattgattggtgatatgaatgtatgggtagatatttagaaataggggaccatatgttctggtctgcctgagaccatccatatgcctgttgtcattattaatagtcctctcgcttgcatcctcacagtccgtctgcctattgtcgttattgctggtcctgtcccttgcctcctcacagtctgtctgcctgttgtcgttattgatgctcctctcccttgcctcctcacagtccgtctgcctgttgtcattattgatggtcctctcccttgcatcctcacagtccgtctgcctgttgtcattattaatagtactcacccttgcattctcaaaatgtactagtttgtgttgataaattatatggtcaccctacttagaaggtacaaagaaagaataaaagaagaaagttcttcaccccatctcagaataaccaagatctttatctttgctggggtactaccccaaggcaattttttttggataccattttttaaccttgacatagtggatacatcatttcttcctccatatatatttttcctccattaaaaaagaaacaaaaacttttttatacctgggttttgctcttgatttagctctcaaggtggtccttgtttactttttaataatcactgctcttcatctgtcaatatttaattggtatgatttatcccaaaattgtttatagaaagtcagttttttgttttcaactctagatctttgttcctgttcctcgagcctggtggtcaccctctggcttctgctaggcaatctgtttcctctgctggctggatttcttctgtgtatatggcactaggaatggaaaagtggatcttcaagatattcttttatgttatgttcttgtgaacaaagcacaaagtttgagtgagtgccaacctatgcagatggtagaagtggcattcctggctttggcttggaagaattgacgaccatcagaccttgaagcagaacttcacagcagcctgtcctcatcagcaacccaaccaccttcatcagcaacccaaccaccttcatcagcaacccaaccacctcgtcagcaacccaaccacctcgtcagcaacccaaccacctcgtcagcaacccagccaccttcatcagcaacccaaccacctcatcagcaacccagccaccttcatcagcaacccaaccacctcatcagcaaaccaaccactttcatctgcaacccaaccactttcatcagcaactcaacaccttcatctgcaacccaaccaccttcatcagcaaaccaaccaccttcttcagcaacccaaccacctcatcttggagaaggagaaggaactgcaagccaccaagtcttcatttttcagggtttgtaatcttcccaaagttttcctttgaaaataggataatgggtggaattttcagagtgattacatacctcaacatttttattaacatacaacaatgggaaagttcatcatccatatactgcagtcacttaaacaacagccaattattgcaagattagaattggagatcttgtcctcaaaagtataaattgtcctttgagttatagaaaataatggaattgggatttctacatatcattattatacctattttaaatttaatggcagccaggcatggttccagctacttgggaggctgaggcaggaggatcgcttgagcccaggagttcaaggctgcagtgagctatgattgcaccactgtattccagcctgcacgatagagttagaccctgtatcttaaaaaaaaaaaaattaatggctggtatatagtaaacttaattcactgttcccattgttctaaagaatttttttaaataatgtttcattaaatcttatgatttaaccgtgcttgccctttttgccagctatgtggcagtttacggcagaactgctgtcagtgtgctggtagccctctattcatccctcctcagagcccagcttccagaactgctatcactgtgctggtagccctctgtattcatccctcttcagagctcagcttctggttgtattctccatgagtttaataatgacatgaaaaaatgtggaagccgagagagtaaaatactctgccctgtaaaaacatggaagacatgcaaacagaaaaaaaataattgtattgttttagataatacttaagacaactgtgaaacaacaaaaacacaactattcctttgtgaccgatgaagataaaaagaaattctggtaaagacgggtatgcagttttttaaaatgggttaagaaattgttgcagaagaatttctaacatctgaaaatggttttatgtttaagaaggatggtctgaattgtgtactaatagcaaggtataagtttggtgtagagcctatccagtagcgtccactgtaccacttttaagtaagactcagtccacagaagctggaagattgccttcgctttaaatatcctttaccttctgcatttgacactcctcctgttactacatagattccggtccccagaagcaattttacactggtactagagcttaccagccccatttagtaatttttaatggctagatgaggtttaacaagaatatgaaaagaaaaaagaaaaaatatattcatgaatgataggcgatgcccattctttctctcaagctaatgaagtcctatggcattctaaccacaaccctcggacagactcctcctattcctccatggcattgtaaccacaaccctcggacagactcctcctattcctccatggcattgtaaccacaaccctcggacagactcctcctactcctccatggcattgtaaccacaaccctcggacagactcctcctactcctccatggcattgtaaccacaaccctcggacagactcctcctactcctccatggcattgtaaccacaaccctcggacagactcctcctattcctccatggcattgtaaccacaaccctcggacagactcctcctattcctccatggcattgtaaccacaaccctcggacagactcctcctattcctccatggcattgtaaccacaaccctcggacagactcctattcctccatggcattgtaaccacaaccctcggacagactcctcctattcctccatggcattgtaaccacaaccctcggacagactccttctgttcctcctttcctcgtccttccctgcttttcgtccattcagcatatagctattcagtactccattgaagaaattatgctaagtgagcaaagcaacataattactaagaattaattctgattatttggcactagagccaacagcaaccccagcacagaggaaagtcgcttttttttcaaatgcataaatttaaagtatgtatttgcatgcagttttaaatgggaggtatttgtcattgtgaaaagctgggaatctcaaacatagtcaacttaactaaaaagaagctaatacaggttgagcattcctaatccaaaaatccagaatccaaattgctccaaaatctgaaactttctgaatgctgacctgatactacaagtagaaaattccacatacaagtacttaacacaaactttgtttcatgcacaaactactaaaaatattgtataaaattaccttcaggcagtgtgtgtagttatat

SEQ ID NO: 1881112 - DNA, 4001 bp, Homo sapiens
agtcaagaagaacagtcaatattgtcaaatactgagtaagatgccagctgagagaaggtattgggtttgacaaaataattgttactggatggtggaggtagaaaccaaattgttgtaatctaaggagtgaatgacagaacaagaggacactaaattaaagctctgctgatgaagaaaatagtaaggcagtaacttgaggatgagtcattgtctataaaggatttttattccccaccatagtcctaacctaacatttgacatctatctagtaggcactcaatacctactgaatgcaataatattttcatttatagaccaggtctcctataaaatagtccagtgtttatgtccacataaaacagcacaaaacagattcatcattctgggtgggtagagggattgaaggaaataaagacatttcatattctatattatgttttgggttaattggcaagaataattacttctttctcaccccatccctgactatacacacacccaaattatagattatagaggagaaaggaattaaatgactcctgagaccagaactgcatagtccaaaaaaaaaaaaaaaattcagcaatcttactttattaaaaaattaggcatcaagatgctgcaatttgccttacttacatatttaattgctcttaggttagatatataatatgggaaacctggaaaaaaattttaatggtataataaacgcttacaacctaacattaagtgaaaaaagcagctgccttattgcatatgatctcaatttgggaaacaggaaaaaatataaatacaaacacacatgcacacacacacacaaagtcagaatactataagaaaataaactgaacggtcacagtggctcacgcctgtagttccagttactcaggagacagagacaggtggatcgttttgagcccaggagttcaagacccgcccgggcaacataaggaaactccatctccacacaaaaaaagtaaaaattagccaggtgtggtggctcatgcctgtagttccagctactcaggaggctgaggagggagatcagttgagacgaggagttcggtgatgcagtgagccgagactgcgccactgcactccagcttgggcaatatagagcgaaactcagcatcaaaaaaaaaagaacatctttctattctgaattttcccaattttctacaattaaaaacgctttaaagatctctataaagtcagtcaagggaatttctatctaagcacttaccagcaatttgagctccttctcttttggtctaggtggctctaaaataacaataaaggctacagtgattgaaattcaccagacttgaaatagactgcagccttcttccttcccaccttcttagaatctttgtcctattcatcttccttacgcttccccgggttctcttacttctggattctaacagtgagttgtgagaagcaacgcggaaaacggaatggagactccagcttgttttaaacgagctgtattaccccgcacagtgcaggagaaaagataattggctcaggtctcggctctgccatctaccacctgtggagccttagataagtcagttcttatctctgtcactcaacggtctcggtcttgtcatcttttacatggaatgtcatgaaatatacagtacattgcaggaactgcctcaggtaaagacttctagggttcagtaggtctcagtcgatccctctgagaaaggccgcaccctaaatgcacagactctgactctaaggggatggggtcggggaatctgcattttagtagcttctcaggtgattcagatgctcagtcaggattgagaaaccaggactcttcccagccctcctgttctctgatccacttctctgcttcctccacgtcctaacgattctccagttcccgcacagcaggagcggagggaagaggggagagaaggcaccgctaaggaccgctggccccgccaggcggccgacctccccattccaggggcgccagccggcggattacataacgggcctcggggcgcgttctcgcgaggtttccaccgccccctcctcgctccacgtcagagggaaccgggcggagcggccaacatggcggaacgcaggagacacaagaagcggatccaggtagcaaagccgagctctgggcagggggcttcggcgcgctggatagtggaaggggcggggaaagccccctaaaagggcgagcgaaagcaagggcgaggtggggtggggtggggtggggttccgccgcgaggcagctggctgcaggctgcgcgttgtgaggggcctgagggggggcggtgttggcgacggcggagacagagacggaggtggtggtggagcagcaggggaaggaaggaggcgccgcgctcagaatccggctgcggaggcgcggctgtgggcctggagttcctgtggtcgcgctgtcccgggcctgagctggaaggtcagcctcccctggggcgcagacgctgacccttcccggggctcctcccctcccttcaccccatcctctggccttagctggcctgaaattaaggccacggtaataggggtagcaggaggcggcggactgacctaaagcagctggttctttgtgcgcatagaccgtaagggggaatgatctggacttggtcagctgcctcggggcctaggcagggatctgctcatccagatgttcagttgcgttgcccttctttcccttcaatattattaacttaatagtccacttgaagcttgccggcttttttccgggcgacgtggtgtaaacaaccacaacctcgttggtgctgcaacgagctggtggagcccagaaacctttcacatgccagtgtgtcatcctcgtagtaacgtacataacatctccccctaattccacatgcgtgtcatttgtgcatttcttccttgcgattttccctggttcttgttctttgccaagaggattaattatgtagaacatcttggactcaggatatttattagtcgtctcatcagctgatgtgctgagaaaccttcataagccctcaaattgatcacatgtagtaaattgttactataatcataaattgttacattcatcattgcctttctgttccttactatttcattgcttagaatgattttttctttcttccattttatcccttctttttttttttaagtttatcgatttattggcgtacaatacagatgttttgagctatgcaagttaaaattcttctgtaaactttttaagtgctgtgaaaaagacacacatgatcagtaaatttggaattttggaatttggcagaaataaagtagttccgaacagggtgcagaagggaattagaaagaggcagatttcgagttcagacagataagactaggtcttaagatcagtagaagtttctaattatactgttcttaatctttcaagagttagtgttattcctctgacgtgggtatacagtattttattagattgtatattgaaattgtctgtcagatttgtacttacagaactccttagatttacacttgacagtacaattttatgcccttcaatacacattgttttacaattccagttgctctttaatattgttgtaagggctatataattcaccttttgaatagctgctcttatttagttgtgatcttatattaaacagaggctgtggagtaatgtgacagtggcagagagctaaaacttgagccaaactgcctgtttgtaccccacctccaccaattattggctgagtaactttgagcaagttaatttttacctccctgtctgcatcggtaagaaaacatatttacctcaaaaaaaaaaaaagcaagaaaaaagaaaaactttaagattgctgtgaaaataataggtgagtcaacttatttattaaaagttattaaaagtgtttggcacgcagcccctcccttctattctactccttacccaggatgaaggatttagattggattgttattttattttttgttaactactctttgatatgctgaagaaa

SEQ ID NO: 1881113 - DNA, 4001 bp, Homo sapiens
ttggcaggaactaaaacctgccctttttagcattctttgggtttctgcaaaggctcagggggctgggacttcactagcaatacatcaagtgtgattaggtttactcacacgtataaactgaagggtttctgcagtctccagcccccaaagtagccctgctctatgtggctacctgatatcccaaattctaccattagaaagcccccttttggtatttagcctttgttcttgttagtattcaaattccccttagaaaggagacccacaaagccttatgagtataagcatcttagcatgtatgcatttgttaaattttgtcttaagagaaggctggggtaccaacaacattcccaatttcccataggagtaataaccaattcctcagccatggaatgatggtagggttgggattcctcatgcaaaaattaattctgtgcctccagacagatccagatcttactcatgaaaagaatatcagtgggacagaatgtcttttcctcaaaatcagttatggtttatgatttgagaacaatatatgggctcctgttatgcataattatttgggaaattgtcactagctctttgtaattgttagttcaggagtgtgttttttaaaaaaaaaccttctgactgggcatggtggctcatgcctggaatcccggtactttgggaagccggcaggaggatcgcttgaggccaggagttcgagaatggcctggccaacatggcaaaaccccatctctactaaaaatacaaaaattagctgggtatggtggcgcatgtctgtagtcccagctactcgggaggatgaggcacgagaatcccttgaacccgggaggcggaggttgcagtgagccaagatcacaccactgcactccagcctgggaaacagagcaagactctgtctcaaaactatctcaaaaaaaaaaaaaaaacttcatttttctgattatctttcactgccatgtaattgtacatatataaattactctgcatacagaatgaatagtatacatggatgaaggaacgaatagatataacagtctgaaagtttccctaatgctggcacctgtaacacatcactaacagggccttgtagaagttccttattggtttgagaagataatgtataaactgggagtactggtggaaaagtattgcactcatgttttctactttttggttgtgtgtgaccaaggggtatagatcagagaactgtaaaacttttcagcaaaaagaaacatcttctctgaccctcctatttcagaagtgaggaagccaaagttcaaagagaacagatgacttgcccaaagccccatgtcttcagccatgcagaagacagacgcccagacttcctgacactgaggttggtcttctggttcacttctctctctcagagctattaatattatgctcacattatagtcacgaggaagtcttgttggccggacatgggggctcacgcctttaatcccaactctttgggaagctgaggtgggaggattgcttaagtccaggagttcaagaccagcttgggggaacatagtgagaccccttctccataaaaaataaaaaattagccaggggtggtggcatgcgcttgtagtcttagctacgcaggaggctgaggcaggaagatcacttgagcccagtagtctgaggatacagtgagctatgatcatgccactgcactccagcctggatgacagagactgtctcaaaacaaacaaacaaacaaaaaaacccttgtttactaacacttgagtacagatcattccttgacatgctgaaacttagctcttattctgtaaaatatctgcacagtttactggaagaatctgaccatgtggagatggcatcattgcaaagcaacttacaattctttgatgccttaactaaagatgtaagttcaaggattggctttactacctgacctaacagttttgatttctacaagtgcaaacccatgctgcctcatgatgaatccaatcaaaccaaaggactcgtatctcgtttgatctgattctggtgagcaaatgcagtaccccgacctggctcccagtatgctatctcaacatcagatgacagatttttctcttattgcatttgatacatttaataaaccctgtgtttcatatataaagtcctttgggaaaataaacagcacctgcagcttatctcctcccacagacactgaaaaagcaatttcttcttattgaatgtggatgcagcataagatttcatatgttcacgtacagggctcacatgaggggggctaccgcacaaatggaaacaccaaggtgctgggcacctctccagctttacagactgcacatgctttggtcatgttcatatttaaataagaatcaactggtatttctgaattagaagaaatctaagggaacatttttgctcactccctcattttagagatgttgctaaaggagaaatgaagtgacttgctcaaggtcaaatagctgaagtcaccaggccagggttaagagccagacccgtgggctcctacaccagtgctctttttctctgtcctctctagtagggtccatgaagaatctgcatgcccggctctctcctctccaccgctggcaactcgtaaaatctgggtgtcacacagctcgctcccaagcattgtcagaaataagaagacaccatcagaaaggggaaagctggatgggcaagaagacaggaaaggaaaaagtgaccaaatgaagctgagcttctggcctgctacagttcatcatttctactgacagcttgaaaattaggaaagacacagaagttgaccaggaaacaataagaattatcagaatctccattagctattttttcaaaaaacgaaattgcacaagccaggctgggcaacatggtgaaaccccatctctacgaaaaatataaaaaattagctggcatggtggtatacacctgtagtcccagctacttggggggctgaggctggaggcttgcttgagcctggaagattgaggctgcagtgggctgagatcacaccagggcactcaagcctgaatgacaaagtgagaccctgtctaaaaaaaaaaaaaaaaattgcacaagattattcttttggcttctgttttctataatattgtgtgcctctgcagagacagggaagccaagaaagtcctgtggaggaaatctatatggatttcataggtcggttactcactttcttttctcacagtacagggagcttagttgatggtgttaagaacagaaattgtatttccagtaagaaaacacaatagtgcatattggaactcaactcaataatgcatattggaactcacttttgaactttagaatatgataaagcttgatggtacataagcaggtctgtgaaacacctacattaaccacaatatgctacatctgacagattcatctgggagagaaataaggatctcagaaacttctgcttctgcccataaagtttataccaatatggtccaagaaagagatccctaggtgactcgattttaaatgccccccgagtttttatacatagatatgtaaatgcatacacaagtttcttctgaaagaatgaatgatgataccctctggagagaatggattaaacagcatgtttgtatggaggtagactttactttctattcctgtactattttataatagttatacactcatgtatttctcatgtaattttcaaaactctaaaagaaatgaaaaaaattacttaaaagaattacttatggctaacacattgatcatttagggattgaatgctggtctaggagccaagtgatctgctaaaacctggctgtgtcatttaacctaaaaggttctctactgatttgtaaaatgaggtggctgaattagatcatttctttgattctatgatccttctgggtaaatgagaaagccaattagaattagatgaagcctaaattaaatagtgctttaaaagaagtatcattttctaacattaaggtaaactgacagtttct

SEQ ID NO: 1881114 - DNA, 4001 bp, Homo sapiens
ttcaactcttcattactttgtcattttaagctccacactggcatttcttacattactctaataagtaaaattgaataataaatattttacaaagctcttcattaacttgcattccaaattgaaggggaaaagtgattcttttatccatcccctcccccttgctgatttgtttgcagaatacaggtgctcagtattttattttataaagaaataacaatttctttatttgaaaaagtattgcctagacaaaatatgtataatgaagctgccagagtgtgatgtggccacagctgtacacaatatacatttgtgagctcttaaatcgtgggttctggaataagatagtgtcattcgcggaaaattgaagtagtaattgtgctcactgattgtatgaaaagtgaaaacagtgctgttacacagaaagatgaattctattggtctctgcttagaagctgctatgctaaattaaacctgatactaggcctaaggggattgcattatttgaggaaaaaagaaaatacaggtaaaccctgacaattctcatcctctttctgtttttcctttattgccatttgttctgggaacaagggtatactatttctcagaggttctttcctggcacgagggtctaggccaggccataagctcatctcagcttcgttcagttcctggccattcatggatccctctgtctcacctggtctggtaactggcttctaagggaatccccagtgaggtttgagctacccagtcctgagagcctgggccagtaattttccatttccaggcctcagttgttttaattcaatgtcaataaattttggttaagaaatgaagagttcaagaaataaaccagatttttaaaaataaaagagctcttctagagctgtcagtcaatggttcaaagacaattgtgtcctttctgaggtctttagcacaaagccgctagagtaacacttttcatttcaagagagaatccagtgacattgtccctgacttcacacttcctgaaaaccacttggcaactcaacaccaagagcttccggttcttagcaacctgtttcacttcttgaagctctttactgttggaactctgcgtgtctagggatccagacttccgggttaaagaatcgtaagatgattacagttggaagttggaccaaagctagggtaagcagccatatgcctggtcttttccatgctcaaggcagcctcccttcaggtaaccgtgtcttcacttggattaccaaatttgaagtcagattcccctctggtttctaaagaatttgaattgggcatcacagagctacggatgctctcttgctccagctcagcagtaatggaggcagcaggagcctgcagcacagaacaaactcattaccccagcagccaccttagcctggcttgggaccaggaactgaatatgggctctaacagttctatgacgctatgaatctgaaatgttattactgtgctttgcatggcatatgaaattacattctagctcaccaactggtctaagattgccctgggcaaagagatgttacttctcactcaattccctgttaggagcacaatagtactaaaataaataaacaaatgagctcggtttcagaaggcctagatctgaatcttggatgagccacttaggggttgcataaacttcagtttcctgatctgatctgctttggccagcacacaggtcaagcggtttgtgctaggcacatggtaagtgatggtcacagcatatcagggggtgtggaagcagcaggctctgcctttccctgtccctcatttctccttgacttcctagggtgtcgtacttaccatagcacatgatgtggagaatgctagaagagcagttgggtgaagcagggccaccaaatagtccttgcctcctggagacctctggaaatccagatgagtgtggtctgaggttgggcctcccactgtgcttgctcctctcaggcctacccagcgctgcctctgaagcctaactcagggccctgaaactcccccttggggcttcccttctccccagccctcactcttggtgccctgcctggctaccatggtaacaggttccagggtaacagaggagggagctgggtcctgtttactcccagtcctgccgatgaggattctgaccgtagacactgaattgtcccgtacctatccgtgctctttctgtgttctcaccagggctgagctcgaactgccacctctgccagcaggaccatgtgtaccagcttgaccacttgtgagtggaagaaagtcttctatgagaagatggaggtggcaaagccagcggacagctgggagctcatcatagaccccaacctcaagcccagtgagctggcccctggctggaagcagtacctggagcagcacgcctcaggcaggtgagaggttcagtggggagggaccttgcagacagcccctgggtcacagctgtggggtactttccaaggagagacagagcccagtcgcgggcttattctggtgtcagctcagatggggaaaaagacaaagacagccggctgggtcagagagttcttgcttttaatcctagcaataccactaactccctgggtgaccctgagaaagttatgttccatctttgggtcttagttgtccacattaaatgaagagctgtaatatcatctatgtccctgcaatctctgacatttagagtgagttggaactgaaggaaggaggccatgaggtccattggggaaagttttaatctaggagttgggggaatgcagggggtacagctatgctctgttcctagatatgtttagtgaattaatccaatttgatctgaatacataaacatttattgaccacctgctgtgtgctacgaactggctctatatagctaagtagccttgtaaacttggcaagtctgtttccctttctggctctcagtttttatatttacaaaatgagggggttggtcttagataatagatccaatccactctagctctattatctatgcacctgtgataaaaagatttagctttgagcaaaactttctttaggaacttagagcccagggtcccactctttataggagctgcacatctaccacagggcaaagagtccttgaggccaaggggacgaggccgtctaaagtccacatgcctttcctccttttagatcatgattggggactgggactacagaaattcctccccagactacctcaagtccatctgtagtgtctgtgcaggcctttttcctgtgtccttggattcaagagaggccagtaagtggctgtgctctggagatgtagccagaacatggacacaaaggctgggttgttcacgtgtatgtgtgtgaagcttctcatggtgcagaatggtgctgagggtgggaacagaggaggcaagatgtgggtagggagcttacgtttgtactcttgtcccaagacctggaattattggagtaaacctgccttgtgaaaaaaagacagaaaaccagaggttggctgattcatgtcagttccatcaactcaagaagcatctattgggtacctgttatgtgctgagcactggctctgcctctaactagctgtgtgtacatggatgcctctcttactatctgggcttctgtctcttctcagtgaaataaagggctgactagatgcttcttaagctcgcctgcccccagatctgatatttttgaatttaagatgtgaggcctaacttgatgtaggtgaagcaattctgggttggtttgatgtaaaaaggtgtagaaggagactgaaaacataaagcatttgaactgcctggtggaagaggtgcagatgcctggaaacttgagtgcccaggatccagagtttcggggctgagctcagcaagctcatgtctcctcttgcttcagaggtcagctcctcttactcctggctggtgacttgtggctcccagctggcctcaggaagagctgaagaactgctgcccatgagcttatttgtgcacaggctcactctgtct

SEQ ID NO: 1881115 - DNA, 4001 bp, Homo sapiens
aaaatacaaaaaattacccgagcgtggtggcgggcgcctatagtcccagctactcgggaggctgtggcaggagaatggcatgaacccaggaggcggagcttgcagtgagccgagatcacgccactgcactccagcctaggcgacagagcgagacgtctcaaaacaaacaaaacaaaacaaaaccctgttaagatctagtgtgctgagctcttcaaagtggtaaagtataggttccttggaaacagaagggtctctgatttaggattggtggggagggaggactgtaagccttcctggaggaagggacatcttcacccagagtagaattggattagacttcaatgagagggcagggcaaggttgagggaagaggcccagaactgaaaaagtatgacagaatccagcagtagaagtaaattgaattgggttggagggtgcaagtcattctaatttcatgtgtagcacttgtcactttcagatcatttcttgtttactgtctgttcttctaccctcataccctcacagagaataggaggcctggcctgctgattccttagtggctggcatatatgtctgttaatctttcttgagagccagccttgtgtcagatcctgttctaagtgcttccctcgctccccacccccgccattcaacaaaattctacttcttcagagctggttcaaatgctttcttctctatgaccacccccccccctgccccgccccgtctcttttcctcactcctactctcagaattaattacttctttcagaggtccctcagctattgatccttccttgcagcatcaatttaattatgcatagtgtcagtttgcggtttccttgtctcctccatttctcattaagttttaaatcatatgaagacagtgcatgtttgtctgtctctgtaagccctacaacactttgggcaggcttttacacacaaaacggggctcaaaaatattttgaataaatgatttagggagaggtccacaaacgccctccactcccaccctagtcctcagagcaatactttaaaataaaaatctgaccatttcaaccttgttaaaggccgatcttcattctgagaacagaattctaactcctaagcacgatggtgacctcagggcgctgtgtgaacctgcacccgcacccctgtccaaccacgtccctccccacacctggtctaataaaacgactgctttaggtgacctgcacgatcggctgtactgattcatgccacaggcttttacctcaattactccctctgtctggaatgtcctttctttccttgcctggcctgattcgggcatggccttctcaagcaagctttccgtctttgaatctaggccctgattaagaactttttaaaaaagtactaagttcagaaaagtttaatatggtgttcccccatttatgtgattaaaaatgaaaacaatactaaagtgtaaaatgtaatctttaaaatgtcacacaactttacatgcatgctagatttagaataccatctgtatttacgattttctcttattgactgtctccacgcgcacccactctgcagacgccctaaagagtgtctatcggatcaccctcaagttgggtcaaacggctcctcttctcggcttttcgggagcaaccctatctcaacattcaccatcttaagatgagcagactgcaagtttgcctctcccaccagtatgggagctgccgaagcggcaagaacagcgtttccgtccatcgagcgccaggtcaccagtcagctccagtcctattttgagttgaagtaaaagctcctccctagatggccagtgcacgtctttaaaaagcgactcctttcccacaaaggaaatacgactggttcgcatctatcaagggttggcgttgggataagagggtgaagtatcagctggccctgattctctgaattcccggacccaataacgcgaccaagcaccgtgactcccaggaaaactagcggagtgagcgcggctgaggaaattactgacaccggaagtcacgtgagcggctgcccctaaggtcgctatctcgacagtcgactattcagccttgcaggcgcctctggcgggcttcactgagatccgctctttcggtgctcgactcgcccgtgctgctgccgccgccgaaggaggggcaaagctcaagatggcggacaaaacgccaggcggatctcagaaggccagttcaaaggtaatttctgacaaaatttcgtaagtcagcggatctaccactgtcgtttggggcccacagacgcttctggcctgtgagaggcgattgggattggggtctgcattctagtcgcgacggtaggcccgggcgccgccgcaccgttgtgcgcaggttgagaggcctggtatctccccatagtcccagccgggattcagctcgagactggcgtgcccagtgggtggaggcgtgagtgcttcggcccgcgcttggcattggagtgaaatcaggaattcagattgaggtctgaagcagtgaaaacgctctcctgtatctcagcttcctgcgccctgaggccgccagacagcgcctgggagagaggcgggaatcgcttcccggtgcttaaatgtctgctgcttttttctcggttttggatctcactcacttccggcctccctcagtttccctccaaggaatgaataacctctagggtcgccagctgtgaggggaggaccactagggcaaagacacggagtgggaaatgcagaggcgggagcagctctcctttgcagtgctgcatagccaaggttaatgtacagtctacacgtggtctttaccttaacgggaagtaaaaagcacttttgagggtagaggactcgtggtctctttctttatgttgaagaaacagtgaaaagagaagctccgtagacttgtaagctacatacgattagtaaattgcatttgtgtttacagggaaccctgggcacgtattgtgaaaccagtgagctgtggtagtagttaagcattagtacggttgggttcttagttgccatcttgggcgggacatttaatcgttttttggtttgggtttctggtctcgaatatattaaaagtaattggtactgccacgaggtagttaaactttccgatgctgatgcaagaagctgtgtaacactttcaggtgctagggactgttaaatcttaaagagtgtgtgactgtaaatcggctattagaaagttaaatttacggtaggagagaagcttgcgtttacagttctgagaaacatcataactcgttttctacttgctttctctaatccgactgtttatgccatttggtgaacgatgtacaccaaaataattaattcataattagtaatggtcttaacagacatcgtttagttacatagaaactttggtgaggggccagtttcggcttctttacaaggtattgtgtcagttttttttccccctcctcagtacattttctcgtctccctctctttgggggcgagctctaccaactcttctcaacagactcctgacaagaacataccgttagggagctattactaaagctagctacgttcataacaagtcgtgcataagcctcacaatttttgtttcttctcaaagtaatattttaagtattccctacttgaggtcttggatacattgaaaacatttcaatgtctgtgttcaggcttccttctaaaatagtgcttctcatgactgaatgtatggctgttctcaataaataaattattggattatccagtaatcttttctgtttatattgccttagattataatctcttgatgctattagcagatttcttactgatgtctgtgaaaggaatcagaatatcttaactaatttggaggctgcataatgtagtgggaagattatgaattttgttaacaagagatttgggttcaaatcctgacttggtaattaattatatttgcgataataaggcagattgcttaaactctggagcctcaattccctcatttgtaatgtagatataattcttttt

SEQ ID NO: 1881116 - DNA, 4001 bp, Homo sapiens
ggcgcggagccccctggcccgggcctgcctttgtggcgcggcggcgcggccgcctttgtccctccggcgcgcacgccccgccgcgcgccgccttctgcaaggatcacccccgccgcggcgctacctggccctttgtcaccagctgccaaagaattcagaaaatcaaatttatttcccgattacggccggagcgcccctttgtgcagaggggtctctttaactgctgagattccagcagacactgtgcagccctttatggcgcaaaataaaagccgtcccgcttcttgccccggcccccgccgcccctcccggctcccctgacttccaagcccctgtgggaacctgggagggacgctcttctctcaataaaaacgcttatgagcccgaagacattggggcttgagtgtcttgccagctaaaggggataaatcaatgggcatcttgagttcgggagggtgtatttccctttttttctgggaatgaatagatgaatggtaactccgtttcttaccagcccagcactgtccgaaactcgcctggacaagtccaacttcattcttttcagtacgactagctcctgtgcgctgcagaagactcgggctgatctgaaagcgcctctcctattcgagactctcaggttttaagtaggtcttccgcacctgcagatgaaaaaagatgtggctattattttcctcgattacgttgacattgcctgaaaatgaatacaaaacattgccttgcaaagattttttaccttttctttatttctttcttttttgtgtgtgtgattgtgcagggaaataaatgtatgtcttttatatttttgagaaaagtctagagtgaccacatgttcacagcacgcattcccacacttcttgtccactcataaagcaatggataagagagacggatatgcacaaatctactaacccatcaacatcagcccaataataaatgctcccatgaaaacagttacaaaggccatcataatttgtactctcattataaaatatttagcagtataacttgaattatatagtcatggaaggaagaaatctgtattggaagaattaggcccattaattgtaaatcatacatgttataaggcttttgcaagctcttaagaataataatacataatacatagatatttagcacttaggattttttttcaccatctctttttttttttaatcgtgagaattgaaagacgccactcagtcattctgtgactacaggaagtgattataaatcaatgccacagttgctaacagacggcattcctctctttatacacatctgtgtgtctcctcacacacaggcgtacatgcacacacatatgcacacacacacacaagtgcttggcccactcagcctccccataatttcacaaaagagtgactctaatgtttgctgcctcgtggggagccggtgggcacagcagtggattggatacctacaccagagaaggcctgagaggcgtaatcaaataagggaaccacttgaactgaactcccagcaggagcgggagggaggccttgagaggttacacgtagtttttatccagccttgcaggagagcaccaacttcctgctgctagaaatttgtctgcaaattttttcctcattcagacagagagctggggtccaggaaacactgggttgatatgataacttgattaagtctggggacagatgacacgggagcaccaactcgactcaaaggaacctgtgctctcctctttaacctctccttgggagcctacaaattatatctattaatgcatcagccccgggaactgcacaaagacattgtctgcctaaatgtatgtcagtcatttgcaggggcctttgtggaattcccaccacattttcatgtctcttcgctatttgaaaaaataaaatgtaaactgatgggctagacaaaggctcacagtctacctcctctcgttaaaatcgctttgaaggcagaagtcaagttcatcagcaaaagtgttcaagaaattcttgaaatgggccctgggcagctggagcatatccaggggagagaaactacaaggaagaagggtttggaaactgcatccagtgaagcatggatggaaaacccagggatttgcctggagaagagaaaacacagagaggacttgggagctgaagaagtgccaacgggaagaaggatgagagtttgctgtgggtcccgggacagagcccagggagagacaggcgttcgccaagtgccagcaaagtgactggatgaaaaatgggccacgtgctggggccgcccctgcggatgtgaggaaatcagtagcgtggccacagctgcacaaatcacagctgcctctcctggtgtctgatccaggagacagccggccattgagaggctggtaaacctcagctccaaataacgtgagtttttaaaatgtgagggttaatttaacatacagtaagttttgtatccaccaccccagtcaagatatagaaaatttctaccacccctgaaagttcccttgtgccttctttccagtcagcccatcacatcccactccacctcctaggcaattattgttcttttttttttttttttaagagatggattctcactctgttccccaggctgaagtgcaatatcaggatcatagctaactgcaacctggaattcctggggtcaagtgatcctcctgcctcagcctcccaagtagctaggactataggtgtgcaccaccacaccaactagtttgttgctattttttgtagggatgcggtctctaactactggccttaagcaatcctcccacctcagccttccaaagtgctgagattccaggcatgagccactgtccctagctggcaatcgctgttctgatttctatcactctcaattagttttgtctgtttttagaactacatttaaatgggataatacagtatgtactcttttgtgtctggttccttttatttagaggacgctcttgagattcatccatgttgtttgctcatttttgttgctgagtagtattccctaggagggctataacacagtttgtccacccattctcctgctgatgtgtatttaagttgtttccagtttgaggatattatgaatatagctgttatgaacagtctcataatacttttcatttctaagtcataggattagggtatattccaaatgccttttttttttttttttgaccaagtcttgctctgtcaccaggctggagtgcagtggtgcgatcttggctcactgcaacctccacctcccaggttcaagctattcccctgcctcagcctcccgagtagctgggactacaggcgcccgccaccacaccaagctaattttttgtatttttagaagagatggggtttcaccatgttggccaggatggtcttgatctcctgacctcgtgatctacccacctcggcctcccaaaagggctgggattacaggcgtgagccaccacgccgaggcccaaatgccattttaaacaagactgcaaagcaagaaaagcctgaggtcatgaaaggtgttgtcttcagccaagactgagaagagtttctgggacttgacagtttctagctattgtcctcaccttccccagacagcacaagttgcatcctcgttcctctcactgatgggcagggggcatatactgagattgatctagggcggcctgggattcttcatgagcaagaatatccatcttagcaaaatgggtattggcatcattccagcttactcaaaatatgtgtattcccatctactgagctcccactatgggctgggccttgtgggtagacaaggggccataggctgagagagatgaatttgatgagggacctgtctttaaagtgcttgctgccaggtgcggtggctcacgcttgtaatcccagcattttgggaggccgaggcaggtggattacctgaggtcaggagtttgagaccagtctggccaacaaggtaaaaccccatctctactaaaaatacaaaaattagccgggcat

SEQ ID NO: 1881117 - DNA, 4001 bp, Homo sapiens
atgtcatcctctttctgtgtctgcttgtctctgtgtttatatttcccctgttctaaggacaccagtcatattgaagcaggccccatctaagggcctaattttaacttggttaaatctgcaaagaccctatatccaaattaggtcacatgccgagctcccaggggttaggacttcaatgaatcctttcgggggttgagagagtaacacagttcaacccgtatcaggcagcatattgaagtttagcctctaccaagatgagctctaagcatgccagtctcacaatcagctctgtggagaaggggccctgtggcctcacaaatttggaaaaatccttcatgttagatgccctggtggtaattcacaggtatcatgagcatggtgacatgctggaaaggactgcggcaaagaaacctgttgactcgaagttggcatttcccaaacttatttgagcatgggagctgcgggggtgatgtggtggtggcggtggtttgaacagtgttctgtggaacacacttggggaaactcacataaccagagcatgactttgaagccaggaaggcgtagactggcatcgtgactctgctattaaccgaatatgtgaccttgggccatgaatttccctctctgagtctcgatttcctcatttctacaataggaatgaaaatttctaatcaattactgagggataagttcactgctaaaacaaacaaaccccaaaaagcataatggctgggaaacaatagagtataagttcattttcttgctcaggacagggcagagaacatgctgtccgggcagtctttctccacacagtcattcaaaaccccaaggcgagagatgctctgccattttaagtttgtagcttccaaggtcatggtggggttgcccctgttccatccaggcggaagggttggagcttggagactgcttcctgggaagtttctagtgggaggctctggagtggggcaacccactgcactgctcacattccactgggcagaacccgatcctagggctggacttaactgtaagggggtgggaaaattagcagctatttccttgcaggaactcaaccctaaaagaaggagaagtacacccttgcagtggacacctagccctcttctagtttcttatagtttattctactttgcaggtgtgttctgagggttaaatgaggcttttgacataggcagcatccttagtatcacacacaactaaatacagggccaacagtttgaaaatggaaaaagatatgaatgggaagcgccttgaaggatgaaataggagccaggccctggtgcacaatacaagtgtgggcccccccgcgcctttcttacccaggcaacctgatggccccggtctggtgtgtggtaggaaaaggggagtgaaatcctcagggtgccattcaacctcagcagcttcttcccatgcttcctttccagccagatggagaagctgcagctccagactcttgacagccgcacaacttccaaggcagtggccccgcgggctgcaaaccccaccttcctgcagttgcagagccagctaagaggtgggcagcatgccaggccccatcagcagcccctggagcacacaccaattgcagatgctcaggagactcgggggaaggaacggggttttcaccagaacaccacaggcaggacctcccagcaaaggcctccagatgctgtgaaaacctaaggctcgtcctcctcctggcttcccaggttacccagccacaacacacaggtgagaaccatctcaagacctccccacttttgggctcccttaccctgactcatcggtcgtcaagggaccaaaaggggtcagtagagcaaggcccctgccttcaaagaatgcatgcattttttaccttcatattaattattgaaaaaaccgtacctcaaatcacacccccaacctctcagcatgaacaagctccagcagacttctcccagcagcccctcccgcctttctctgcatgtaggtcggcttttcagagctgccatcaatgtggacataaagccctgctttccacactcctccctccgctttgtatacactttcccatgcatctgggtcagcctggagctgagtatttcacagggcagcaaaatatacagaggcatattttgttttagaatcttaatacccagaacatctgggtaatactcagacaactggacagattcttgctgatgctgcaagtctccaaatacggtcccttgcagagagaaaatgctgtattttgcatctgtacctaggcacatgggttttctcaagcatagtggactttggagtgtgacagttagtgatttctccccgggaagtggcatgacctgtaggagttactgttggctgcagctgctggtgcagcccaaattatttattggttttgattcgtgcaccgttccctgcgtaaattaaaatgtgacattattacaccctccgagagcccatcggcgaccttgagcactctccccccactctgcagccattattcagcataatttgactggtttcaggcaagttgggagggtgggaagggatgggtgggggcaggggaaggcagagtccaaattagaaacagatttaaagagcatttgcagggaattaggcagtgggccaggcgcgcttgctggcagcatgtgtaacccctctttagggactgtcagctcctcccaggtttccacagcggatgtttcccggccggagcacagctgggtttcagttgtcaaacccacagccaagacatctgagaagcgggtggagcatccatgtgcacgcatgtgtctgcacccggccatatgcacacacactcgaccctgaggatactcccagcacagctccacacatccacacccaagacggcacactcaggacatagaaggatacaggggcgcacagagagaatcaggacagacacacttacacaggtgcacacgcagactccacttgtgccctgctgacactttctaagagggattccagagcagatttcctaatccatcctccctccctccacctcaagtcgggctgtgtgacatgagttagcccctcgacctctctgaacctctgtgtccttaactgttaagagtgaataatggcagctgcaaccgtcaaaatgggataatgaagaaacatggtgtacactctgcagctttgttcggatgtgggacagggcgagcaggatggtggccgtgatcgtgaggaagacagtggtggtgatggtgaggaagacagcaaacctttggctcatggcctttctggaggggacataaagcactttgcagtcgtgctgcttactatgatgaaaagaatgagagacacccatatggggagagcagggcagagaaggagcaaggcaccctttccccagggcccctgtggtggggtgggggacagcagtcagcaccagcctgcacagctctgggcaccttgctgcacaggaagcctgacgctgaggcctggtcagctggccgcccaggaggccttgggctggactgacgtggcactgaggctgcaactactctcctagctctgctccgccactgccccttgttgccctgccattcctgtcacagtccctcacaggagctcggccttcaccccactctgggtgaggagtagctcctcctccttctcctccaagcttccctccagccatccgaattcccagagtcccacccctccctaagtccctccagccttcagatggatccaaaagaaccctttcctgggaatctaccgtgcacaaatgagcccttgttctgggtgctgtggggagggggaggggggaccggtggtcagagaccagttggatgttgcccctgccccggggacattcacaagccagtgaagggatgagcacgaaaccccatggggacccggtcagaagatgccaggagagggcacaagcaccgggtagactttgggaggtccaaggccaggaaagcatgtcctactgtgcagatcaaggcgctctgcaccaagtgacctgt

SEQ ID NO: 1881118 - DNA, 4001 bp, Homo sapiens
tctttaaaatttatttcaaccaaaatccaacaccaaattctatgggtaatatcttaaggcagcacctagtatagtgctttgtatatagtacacattcagtatgtaatggttaaaagagtgaatttacagtctacaattgcaggacttaattttggctaattgcagtggaaaacatgagaaaagatatagtccaagtaagaatgacacttgagggttcaggcccgcaacaccagctaggtagacccttaggtggcccagtggtatacaaagatttaagcattcccagctgagccccttgacaatagagatacatcattttattttgtatcacttagtactgtgccaaatccaaaaatactctctcaagtgcaagagtattcaggagttagaaatattgaaagttccactattcaagcaaattaggtatagttcatataattttttcaactcaggatcctcagtcactccatagagtaagcaaagtatgcaattactagaattattagtctcaatttacataagatcacactgctggcactaaactccagttccagactcttttttccactattgaatgccacagaaacataaaaaaaaaaaaaatggaaggatctttagaaaccatgtagctggattttttttaagatgatgaaaactgaggcccatgaagagagtcacattagctcaaggctcctactaaagccaaataatttcgtgcaaaatcatctccctctgattatcattatctacacacacaaatacataatttttctttttgcctttctgaaaatctggaggtctgaaaagactttaagatttctctcaagttaaaaatacacgtttgtacgtgtaaccagagggcaagttttctatggtccacatgttttcttaaaaaaaaaaaaaaaaaggaaatacaggagatgtgcagtgcgtgtgacaggcaaatgttctcgaactttattgtgtagtgtaacccctatggcacaggcccttagaattcagccacattaatgaagagatatttttatgtagtagaaagagcacaaactttgaggtgttttgttttgagacagagtcttgctctgttgcccaggctggagtgcagtggcgcgatctcagctcactgcaacctccacctcctgggttctaagcgattctcctgtcagcctctggaacagcttggattacaggcgcccgccaccacgccaggctaattttgtatttttaatagagacggggtttcaccatgttggccaggctggtctcgaactcctgacctcaggtgatccacccgtttcggcctcccaaagtgctgggattacaggcgtgagccaccgcgcccggcccaactttgaggttttatctgccacttactatgcagtcttggctagaacacttaacttctttgagcccgagtttcctcatcattaaatggagataattcaggtttgatgtgaagatttgagaagaaggtatgtctgacacactgccgaagatcgataaatatttgttgaatgaataacacagccagccgaagctcaacaaaagacacatacacaaacacacccacacggttgggtagttgccgtctcccggggagctccagaagtgtaagctctcagccctccctctgacttcagaagcctgaagctactaagcccgcagcccggtgcgtctcttcgcagccttaatcagtgcccgggcaaaggcctgcagagaattctctgggcctcgcaccaggccccaagaacacactggagactcgtttcgccttctccctcgccgtttcccccctccagggccagagtccgaggaagcccgatagcggttctcggcctccgaaacacaactacaacactggggagcttgccctgcagttagcgtccagcggggattaggcacttcgttttcctcatcgtttcaatctctatcttctggtcggggtccaagctcagcggcaccacgtcacggcccttagtggtctaggccacacccctccttcccgacagcctcaagtccactaccagcggtctggaaggccacgttgcctaggaaactggggcggggcttgggaaacgacggccctgcgcgcagtttgcgcaggcgctccggccctggcctctgactatcgcgagaatcggctcccggaagttccacgtcagtcagtctgacggtcagtggatcggtgggtttatctcaaggcctgagtagccggtaacaaacgagggttcccgggattggaccgacgcagccatggtaggtccagatcccgtagaagggagcggggtcccataggttacggccgattcctggagcttctggactgagggccgcggtaagcagtggtctgggctcccgctgcggccgccgcctcaggccttgcggggtcttggtcgtttgattccaggaagggagaaggcggtggggcctaggggaccggggtgatttggggaggcaaagcctgctagtgaggggttttgtctcccctggcgcttgtggcgcttgccagagctcctgcagtctgcagcgggatcggtggtgtagggaaacacagaagccgaatgtgttgaactccgtaggaggctttggtaaaactaaagtttgcctttaaaacggtggtagttaatctacactcctgttgggcttattctggggatagtgtgtgctggctacaaactataaacaagcaaagaagccaaaaacaaatgtatatggagtcaaaaatggaatttcaaatgctttgatatctcagctgttaggtttctaaggggagaagaagggttgggaggaagggggtgctgtttataacactggctggtgtgcttttatgcatttgcaaatccagtggctggtaagaatagtaattgttagagcactttgttattatcaccgtaaccctaaaaaacgccctagactagtttgcacaagagtgttataataataaggaaagaaaacgatagtataagaatatcttccgtctctattgaaaatgcaaaaaaaaaaaaaagaaattagccgggcgtggtggcgggcccctgtagtcccagctactcaggaggctgaggcaggagaatcgcttgaacccgggaggcagaggctgcagtgagccgaggtcgcaccactgcactccagcctgggacagagcaagactccgtctcaaaaaaaaaaaaaaaaaaacttgttatgaagcacagaatcaaacattttggagcttgaagacgctagggattaagtccctcatcttaagttaaaaaatttttttaaattatgtttctacaaggttaattgtggcaaagttggaactaggaaaaagttaggaatactcccagggaaaatgcacagagaaacaaacatttttgcataaaattcagtgcattcattcacagacacccccccccacaatccatggaccttctttttttttttaatttgttttataaaaaatatggaacgcttcacggatttgcgtgtcatacttgcgcaggggccacgctaatctcctctctatgtgctgccgaagctagcactatccgtggactttcttgggcacccaggttacagtccctgaacaagacctcaagcctcttaattagagcacttcgtattactaactacctgatgtagtttgggtctgctgtggttgcagtaatggacgtttttggaaaaggctcttggatctgcctaatttcattttcttttgccgtctttacatttaccagtgtatttctataatgaaatattgccttcattctttatatattttaaatcctttgtggaaaatacaaaacgtgaattcattcatttgtacatttaccatagaatatttagtgtctgccatgcactttgctaaacatggctgcctaattctcacagcagctgggagatagagttatatgtttgtgaagtggttactgtaggtcaggcactgctctaactggctaactctgaatttaattcttacagcactaagaggtagataataataatattcctgttttaca

SEQ ID NO: 1881119 - DNA, 4001 bp, Homo sapiens
tatataattccgaaacattttaattaccattatatttaaagtaagaaaggagggggaaatgtagcttttaaagactctgagcagctcacctaagatggcctttcaaagataagtgatataaaacattaaagagcctaaagcttacatagtccagccttggtgtgtaaataaaggaggcagagcccagagagtataggcttgttcagagtctcacagtgtgagggtatagccaggaccagaagcctgcaatccctacttccaccccagtctctcatcctacacagcacagcttccaatgtagaagaaaatggctctatctttgtttgttatatcagattgtttaaagtatttaagatatgtgctttagatatcattacactggcagataacaatatacagagtaataagaatttgaagataactttgagaatcacttattataacacatacattaacaagagagaatgaatatttactaagtatctaccacatccatggcacatggctattccctatagagactactgaatgaataaatgatagcatgaacttatgtaacactcgccataagccaggttggtctaagtgctttacattcattaagacgtttaatcttcacaacaactctgtgaatatctgttattatcaccatccccagtttacagataaggaaattgaggcacagagaacttcaccaagatcaggcagccagcaaacagaactttacaactttggtcatctgactccatgggctatgcaaactatgatctacctcccatcttaaggaacagaaacataggaaaaggtgaatggtaatgcggatttaaataacagttaatgacaactataatggacaaaaggcaatatccaagaggcaagtgaatagtataagtcagaactctttgcgtgcaagcaccagaaactaaatttaaaatctcttaagttatctcaaaagctatttatttgctggcaatagtagaaggcattgtgggctgaattttgtccccccacaattcatgtgttgaagtcctaactcccagaacctccaaatataaccatatttggcatagggcctttaaagaggtaatcagggtaaattgaggtcattcggatggatcccaatctaatctaactggtgtccctgtaagaaagtgagattaggacaaagacacacacagagggaaggccaagtgaaggcacagagaggaggcctatatgcaagcaagaagagagtttccagagtgaaaccaacctccatgacacctggatctcagatttctagtctccaaagtcacaaggaattaaattcccatttttagccacccagtctgtaatactttgttaatgcagcctgagcagaataaaatagaagaatactgggtgtttcatagaattaaagagttacaggaaacagtcggagccaggaatctcaaggactagaacaaggacctcaacacctgcagaatacacacactatcctccccacacttccagcttcagaatttaaaaatgccaaggatggcctcaactgatccagttgaggtcgcattcccaaccctaagccaatcatttaattctcctagttcagtgatgcatctctaccatccttcgccggtctgtgtccccagatcctcctgtggttgagtttcccaagagagtaaacctggtttctgccaggacaagagagaggctgctgaaagatgaggaaggaatccagaggtctgactgctttctccaaggactttccataaacctcctgttttcagctccgcctcttaccttttctttcagaagaatctggtgcctccaattctggggactttacgggtgctgtgccatgaactagcttccttcttaagctccccatctgctggtactgcagtttcagcccctgtccatgtccatctccaaaaatgagatgacatggacttttcacctattctttctgtcttgtggacttgggcctttttggcttctttgctgtcattttagtagcattttgaaagagatgaaagaaaaacacaggtttttaaactgcaatgtttaaccagaagtctattttgggaattttcaaataatcctctgtgaaggtgccacagtggcttacttctggcttgggaaggtggcagtagcacagaggacagacaggagagcagactaggaaaagggtaggcaggctctggcctctgcccccgcatcaagcagaaaatcttgctttttatgttttatacattgtccttctaagatttcatttgaagaaagagactttaactaaaaatagaaaatcttaaaaccactgtgcaataccagcctgcctcctacatattttaaagagtttaaattatggtgtacatacatgtattctggttttttttcattagattgtgttacaaacatgtttccatatttatgtggctttttcatcatcagtttcttaacctagtgcctggcacatgataggcttttagtaaatagtgattgattgaatgaatgaattatatttaacagctgcttctaatttatttgtaattacagagaataagctcttccattcattcatttattcacccaacacatatttattcaatacctattatatgtcaggcattgatggatggtgctgagaatacaggaatgagtaaggcaaaccgtcctttccacacagagccaacagtctaacgggggaatctgacaagtgaattgacaatcacaatatgtataaaagctatgggaaacaaaaagcatctacaggagcacatcataggggtccctaatgcagacctgaaagttggggaagtctccctggaggaaaagacttaaagtgaatcctaaaaaactaacaaaacagtttctggttcagcatgtaagaaatttggaagttgccactctgtcctaatgagtaaaaagctgaacaaactgaaaaaccaaattagccaggcatggtggtgcacacctgtggtcccagctactcgggaggctgaggcatgagaattgcttgagcctgggaggtggaggttgtagagagccgagattgcaccattgcactccagcctgggtgacagagcgatattcttgtctcaaaaaaaaaaaaaaaaaagcagtgaaaaatcaacaactcttcttagctctataagagaagtgatggcacaggacaaattgcttcccccaaaattgggaagaccaacaggcaaatacagagaatcacaacttcaagagcagaaacctccatgggaaccagtgctggcacagaaaagtctgaacttgtaactgtgaattgctggagccagttctcagacaagtgtgaacaagtctgagagataaaaatccaggggaactgaatcatagagaggtccccacacttttgtgggttttacctccaggagcactaccaggtctcacagtgaatattagggaaaaaaatcccctcctgcttccagcagtgggaggggaaaaggagccattttgaaatatgctagagcattatgttcttaacaaggtctgtcctcaggagaaactatgtaaccagagcctgacctgctggggttaaatatccaactcaagtccattccagccatcctgtcccacctaaggtgaggtgggggaagggacctagaggcacatgaagttcacaatccagagtaatgggctcactgaaagactgaggagaacacttcctctccccacagatcttaccaccacctaactaaaggcctgttgacagcagttccttttacccaggacacgtatcattcctgctatccaaaaaagaaaaacaaaaacaaaaacaagacatacaaaaaagaaaaaaaaacccacagtttgaagagacagaacaagtatcagaaccagattcagatatggcaaagatgttgaaattatcaaaccagaaatttaaaaccactatgattaatgtgctcagctttaatggataaagaggacagcatgcaagaacagatgggcaaggtaagcagagaaatggaaattctaagaaagaaccaaaa

SEQ ID NO: 1881120 - DNA, 4001 bp, Homo sapiens
gtttgtggttaaataaatgtaggggaaactatagattttatcactcatagagaatcatgagacatattagcatatgaaaggctctgacaatttcttttaaaaagaaacatcttcaagaatatttgacccagtgtttcccaagttcatttgatcactgaaaccttttttaatgccatgcccgtaacattccatgggattagtgttctaaaaacatattttgggaaagccattctaagtgatagatgttcttcagaaagacgtgagtcaaattcttgaaaataagatagcagcctgggcacggtggcttgcacctgtgatcccaccactttgggaggccgaagcggatggatcacctgaggtcaggagttcgagaccaggctggccaacatggcgaaaccccgtccctactaaaaatacaaaaaaaaaaccacacaaaaaattagttgggcgtggtggcaggcgcctgtaatctcagttgcttgggaggctgagataggagaatcacttgaacccaggaggcagaggttgcagtgagccgagatcatgccattgcactccagcctgggtgacagagcaagactctgtctcaaaaaaaaaaaaaaaaagaaagaaagaaaagaaaaaaaaaaggcctttacacaaaccagagagctgggtatttatagaaactgttaaattattttcaaagagttgtttcataacgtaatttaaacgccatcagtgctaccagtttctaggctcaagagttttacgtgctcagagttacgtgtcttattaacatgggctacatctctgcagccccagaccttccctatctggagcattcctctcccgggcaccctcacatgttgttcagaagccttttcaactgttttctaataccctgtcccctttggggtaaagcacatctttatgccattatggggctggccactgcagtttgcaaaatcaacttagcacagggacatctgttctactctgtgtgctggtgtcataaaaggtcccactgggctgagcaatgcacctgagagcagtgttaacagcacctcacatctggggtggcctggaggctgggccagcatgaattagtgtaatgaaggtcttctcctctctcacacgaggttggaatctcacaccagatcaactacctggattagagatacaaccaaagagcacagtaaactgcatggacatttaggaccagagcactaatataggttggctattaaatctggaaacaggtgaatatataataaatggtttgttggtattaccttatgatgcatgataatataatatctacatgtccagacttcatggccactctgtagcagaagctattatttatatcaagcagttattaagtgtcaggaggtcctcttctaaatgcttcacctgaattagctaatttaattctcacgatgccatgaggagggtactgtcatcatttccacagtaataggtcaggaaaccaaggcacaaagggcttcagcatctggcccaaggtccgctgttggtaagtggtggggctgagctcggggagccccactctggaaccggtactcttacacatacactacggccgcctctccaggtgtcatgaaagtctcctaggctttgctgaatagcagtcaaaaaaaactgggatttagccttctctatcttgctatttttgtttccatgggtggcataggaaaaatcattgtaattaacatctgtaccactctttgtagtttggtcctcatcacgacccattacagcaaaccaggcaaggcctatatttccatttccagatgaggaagctgagcctttaacaggatccctacctaacaaatggcagagccatgtcctctgacgtcaggagcttcatgattttaacttactgcttgtgttgggttctgtggtagccaatatacaaggtggtcccgagtgatctttgcctcttgtgttatttcctcccacgctgaacaggactcacttgtataaccactgtgacattgtggaaatgatgatgtgtgacttctgaggtgaggtcataaaaggcattgcagtttctaccttgatctctcctggatcattcactcaggaggaagttggctgccatgttgtgaggatgcacaagcagccccatacagagtccctcctggtgaggatccaaagccacctgccaacagcccgtgaagaactaaagccttctgcccacaaccaatgcaaccagtgctaatttgtcagccttgtgagtggggccccttggaaacagatcctccagccccatgcagatgactgcagcccaagctgacatcttgactgcaaattcatgagagaccccaagtcaaattcacccagttaaatcactcctgcatccctgactcacaggaattgtgagataataaatgtgtattattgttgtaagccacttaaaatgatttttaaaagccgagcttggtggcacgtgcttgtcctcacagccactcaggaggcttgagtccaggagttcaaggccaacctgggcaacatagttaaaaacaaaacaaggctgggcacggtggctcacacctgtaatctcagcactttgggaggccgagacgggcggatcacctgaggtcaggagttcgagaccagcctggccaacatagtgaaaccccatctgtacaaaaatacaaaaattagccaggcatgagggcaggtgcctgtaatcccagctactcaggaggctgaggtgggagaattgcttgaacccgggaggtggaggtttcagtgagctgagattgcaccattgcactccagcctgggcaactgagtgagacttggtctcaaaaaaaaaaaaaaaagaaaaagaaaaaaaaagcagttttttaactattttttttttaatgtgggagaagtgttttatgtagctgtggataactaatacaagttctcactccaaagtcctaatcctgatgaaggtttaactggctgtggtcttaagaaagtctcggaagcactctctgcgattcagtttcctctcccgctaaataataatctaagctgatttctgagtcacccttaaagtgaataatgaaccatggcagctgggttcagggaacactctctgtaaagctgaactcctggcacacataggctggttcttggcaaaccggcaccatgtacctgtcaggatttaaggaacatttcatttgtgcatccaatctaccaacacgtaaagacctaatttaggtaacaatagaccacgatcgtcactgagtatcacttaagttccctgctctgtgccaagatacccccaaagtaggggggcctctgctcacaccgttaggttcaccagaaatgccttcccttaccccacagctaccacaactatcccttgcccaaagcccatctcacctgcctctgaagcttcctcaggcagctccagctaacactgccctcaggaccacccacagcaggagaagccgcaggtgtgtcagcagacgtgtgctggtcaatgtttaacaatcagctctctgcagagaaaaggcctctcttgacttctgtggtgttaatacttctaccgtagctggtttaaagctaccagcattgcatccctgaaagcagaattggaaaaagatatgcacgatcagtctcccaagccaataccagctgctccggcacagccctgtgtttctgactccttctttctcactgtcctcgtgattactttgaaatatccctggaacctgccctttctgcattcccagcatctctccctcagcccaggccttcatcccacctggactattgcaagagcctctttcaccttctgtctgccttcagatcctcctcacccccatccttcctccacaccacacagcaggaagttcctataccatcgcctcagggcaccaggccctctgtcctcaaaatccttcaaacccacggttttcaacgggaaggtcaaagttgttggatatacaagctcttaatgacagacccttgcctatatctcatcttcacacacacac

SEQ ID NO: 1881121 - DNA, 4001 bp, Homo sapiens
tccaacacacacataaatggcgtttgttatatatgattccttctgtgcctcctatttgtactcttacctgtaaaaagcaatttatacaagtatcttttttaaagtatgcactgcatgtaactcttgttctttcaagcaaacatacacaggcatacacacagaaatccacacctacatcacacaaaaagatttagaaagagcgcagaaaaacattctatggaattaatgtccctgtgttaaggactcagatatattcttaactgcaaagcataattagatcttatgccattagttaaaagagagaatgcatattcttagcaattatactcctattacaatttccatcactttaaaatgtgaaatttttaaaaatgctattaaaataaaatcatcaggagatgagacacatttaaaattagaagacacttttataaaagcaaactttctgaagttgaaataaattttaatactttaaatcaatttttccaagaatgctagagtctctcttaactgacaaaattcaacatgcttttcttgtttctccatctcactgtgaccttgtataaggcattaagcactaaatggaaaactcttctctttacttgacatgtggtattgcttaaggataaagcaaacaacatgagttgccctttactctcatttggacgaaagcctttttatgaattaaggtaccattacaatggaagtacatagcagtaatttttttgaactgtctaggtatgtggctttatatttttcccaatttcaaagaatttgaaaattaatattaaccctttaattgtgcatttatattttatacatgcatattttaataaaatttacatatcacaaagccctaaaagtatctcattatttactttccttgtaaaatagtaccagtagcactaactgtgcattttaacacccaaagtatacattccattgtttttttaacactaatgttttcaactttactaatacctgtggaattgtttggaagtagaaatacgtaagagcacaacatactttgcatatgtcacttacattactagcacaaataagaacaaaacatctcttaaacatgaagtgtaattctaaaatgcttctctcttgtccagttctgagcatatcaaagtagttacagctggaagtgttcttgaggacactgtgctctggaaaagactgtccaggttaaacacctggtgccaccactctttagcgatcatgaacaagttactaaactgctgtgtctccattttcttatctataaaatggggatgatgatgatatgcatatttcacaaggtcattgtcaagattcaaagcaaaaattcctgtttaatatttaaaaaccatttcttagatacagtatatattcaactttttgacaaattggaatcaattattttatataactataaaatataaatacaaaaaaatgtttaaaaaccagaaaaaagttagatgtggaacaaaaattttaggtgtggaatagatgcctgagcccaatattctcattttactgtcagaaaacagactcagagaggtatagggacttctgcaaactcacatagccatttactagcaggtctgacacagaacttaactgtcttcaattctggctcagaattgaaatcaggagaactgatttctaactcacctttcaaaataagtattaacaaaattaagctcttttcctttgttgatcattttaaaattattcataacctatagacctgatccatagattacataattaatgcatttttgcagccacactaacatatatggttaatggtcatttagcatagatatcacattttttagagtgactgggaaacaccaagaaacataaatgaaccaaagtcaagaagccttttttttttttttgccaagagaatcctatgccttaaatcttacctttttcagccattattcctgttggtgggtggctaggtcaggccacgcttacctctttcttttgttatccagcgtctctttgaactttaaatagagagaaatctgaagattgcggcagctgcccgtctcctggctgccaattgtctgcagagtgatgtaagtcatgggaaagcagaactcctctggctctttattctattattatggaggaaacgaggggctacatgacctaaacaattaggtaagctgaattatcctaatgcagatattcgcaggtttttaatttgcaccatgcctttaggtaacatgaagaaaatgttctataaagaaggtgtacagaggaaaaacaacattccacctatacaagtgctatcaaggagaagggtgatatattagaaagaaaggattttgatgttggagagacttgggttcaaattccagctctttctgtaatgaaagccaagttgcttaacctgggaatcagcttctttagttttaaaatgaggataataatacctactcatgggagtcgcataaagatgaaatgaaagtctgtatgaaatgtagacagttctttattactttacaggtggaaaacataaaatgaaatggtgcccctttctttgaactattctaaaacaaaaagtgttaatataaatgtactagaaactaaaacaatacagacgtcgcctagaatttttaggaagcagtcataagcttgttgtttttattagcaatgtataaaaataggacatttcatttttcaaagtccaaactggtttatgtaactgacctagactattctctatattctcattggaataactttaaattggggatctggctggaaaagttttgcagagtgaccctgtgagcatcttcccaaaaaaaatttgacataagattaagacctgtaaaggcaggtctggcctgatcaaatttatctccacagagttccaagagtgatattgccttgcaaatgaccatgttccatcactgctcaaaaatccaccaatagttcttcatctcctagacaataaaaatcccaactctttgtttagacacctaaaaacccttatttctctactcttccatttgcagtgataacttcagtgacactgaactccttgctattatatgaattcagaatcctcccactctcacaggcaagaagaacatttgactttctacctcaaataatgtacctatagattagagtgtgcagccaagaatctggcacatttatatcatttatgtcaagttgtcatctctctcctcagtctctctctcaatatattatttaatattgaaaaaatgtctggctatgtcaggtaagcagaaaaactacgtattgtttatgcaacaaaatcccttgcttacctggcaaagttgggtatttttttcaatattaaataataatacgttaaacaaaggttaactgaggccaaaagagagagaagaaataaaaatgttattgatctcatttaaatataaaaaatgttaattcagtaagttcaaatgaacactaattatcttaaggaaaaaaatgatatttaaaacaaacagtgtggtacccacaaagagcacaaacatacataataaaataaaataatttgcctgaaacatatgaaaaggtttctacattttaaatactcatttccatttcaattatattaagctttcttcttgacatgaaattgactattattaacattattgctgtcaatttggagtttgaggagggattagtttataattcatcatttattttccttacttttctatggaaagaagaagagaaaaaactaacttaatcaacatgaatttctcagacttcagaaaagaattcaacctagaatctcatttccttggttatatcatcagtaaattttttaaaaaatataagttttataatatttaatcaggaaaggatgttttattcattaatagactggtttcactttgagcttataaacccaagggcctatatttgaccgttttctaatctttctcttaggacatactaattaggaacattttctacttttttactttacatactgtcttaaacatttagctctc

SEQ ID NO: 1881122 - DNA, 4001 bp, Homo sapiens
aaatttttcctgatgaaacaaattttggagacttttgggtggtcctcttccctctttgcagctgtgcctattcttattcatgtgatctggcttctcccagagccctgtatcctccgccttgcctgcctgaaagcctcagaggtggtggagattcttcagcttcatgcctagaaactcaagacttagtagatttggtgtccacaaagcctttctttaggcttaaaaagtggctggtaggggagttaagtttaggtctcagaggagctctttcacattaatactatttcaattacttaaggagtttaggagttttcatgtgatatttcagtaacaatatcaatcatatttacataacaattttattggatattcaattatagttctaaacaacttgaattagcttactggaaaatagcttcttcacaagtttctgctgtattttatcaaccaatgacagtattctcaaaagtagatcctttttttatttttgagacggagtcttgctctgttggcaggctggagtgtaggggcgcaatgttagctcacggcaacctccgcctccagggttcaagcaattctcctgcctcagcctccagaatagctgggactacaggcgcccgccaccatgcccagctaatttttgtatttttagtagagacgaggtttcaccatattggccaggttggtctcgatctcttgacctcatgatctgcccacctcaatcttccaaagtgctgggattacaggtgtgagccactgcgtccggcctaaagtagatctttattgagggaaaaaaggcagtgaatcaacttgcttttttcacaataatttcctgtccacccaaggccacagatagaccttctatctgcagaattgcaaaggccaccatttttacaagtacattttagctgataattgaggccatgtcttatctggggacaacctgtaataaaattttgtaaaaataaaataacacaacacttttctcttcctttctttcttccttccttccttccgttctttctctctttctctttttttttttaaaggagtcttgctctgtcacctaggctggaatgcagtggtatgatcttggctcactgcaacctctgcctcccaggttcaagcaattctcctgcctcagcctcctgagtagctggtactacaggtgcatgccaccacacctggctaatttttgtattcttagtagagacagtgtttcaccttgttggtcaggctggtctcaaactcctgacctcaggtgatccacccaccttgacctcccaaagtgctgggattacaggcgtaagccatggtgctcagccggaaaaacaacatttttctctacttcagatacagtaactgtatctagatagcaaaagcttaataaatgttaaaattaaaacaaagaactactcacatgttatctgtaaggtagcaaatatatcactttcattcattcatttttttcattcactccatgaatattgattaatactgtgtgtttggtatactgggacctgcagagacccttgtgaagaaggagcagtcaatcctggatgactagggataagattttatatatttagtttcataactgataaagaagaaaaatgagcagtttgttttcaagttactgaaatggtaaaagtatttcaacttacagaggtgggtgacacaaactaaaatgcactatcaagaggaattaagacacaagtggcctgggggtggtggctcatgcctgtaatcccagcactttgggaggccaggacaggtggatcacaaggtcaagagatcaagaccatcctggccaacatggtgaaaccccatctctactaaaaatacaaaaattagttgggcatggtggcgggcgcctgtagtaccagctattccagaggctgaggcaggagaatccagaggctgaggcaggagaatccggaagctgaggcaggagaatcacttgaacccgggaggcggaggttgcagtgagccatgatggtaccactgcactccagcctgtcgacagagagagactccgtctcaaaaaaaaaaaaaaaaaaaaaaaaaaggacacaagtgaacgaaactaaccagacaaggaaaacggagcctctctttcttcagtgtcacggaaaagataattgaatgatgagaagtgcaaccgatgggagtgcaaagcccctccaaggtgagaatcagacttgcattttgttgcttttgctatgaagaacgcaaacccaatactgccagctaatatgactttttaaggaaaactcaaaagttcatattttatgtgaaattaacaaatctttgaaagttgaccactaattaaaattgttttacagcgctgctaaaagccaaaactatgacagccaattcaaacatatttgtggctacatttggccaacagcctgccatttatgacctgaagtttatagtatttttacataataatattttccacatggattatctcatttaatactaaaaaatactcctgtgatgtgggtagcagtattcttattttactcttgagaaaattgaagctctgagtctaaagtcttgctcaaacttaaacagcctataaggataagaactaagagtcaaatctagactatctgacttccaatcaaattatttctattccaactagcagaagcaaactagagtaatttttaaaattccagctagcagaataaacattagagaaatttttatattccagcaagtaggaaaaaaagagttagagagactttttttttttaacttgcccaaaggcattggttaatacatagcagaacaggtacatgaattcaatctgcatgatactttctttattgcttttatttgagcaactagctgcactgaattccagtaccaaatgaaaaaaattttttgattttgttacttaaataacagttatagttgtacaattaatggttgaatcatcattatacgtgcaatagactacctttaattaaatccattttaccttttgcatatagggcaaattaagcagaatcaatatcaggtgttattaaaataaacttttgcctgttttccttctacgctcctaaaacaaccctgtcctcatcagccaggagacccattcatctaccagcctatatgttgaaatggattgatgaaatcaatgaatctgtgaaaatacaggacttctactaagccaagataagatttaaaacataattggggaaaaaaagcataattgaaaaagtaagaaaaactcagaaatatttacttctacaggtctaggtcttatgacaatattgacacagaattgtgtaaatgactttatggcctttttaaactttatgtaatcacatgttaattatttcaaacaatatacaaaaatatattatgaaaatattccattcctgtgttccagtattctcagttcttttcttaaaaacatcatcaaaaacgtcataattaccagctattttctgtatcacaggcttcacttctttcaataagacttaccttgagtactctaaattttcaacacaccctgcgctctccagccttatttcatgctcttttttctcttaccacagattttactccctctagagtacacacacacacacacacacacacacacacacacacgttactcttaagaacattgaagctcagagtctcaagtctcgctcagacttaagcagcctgtaaggataagaatatatatatgttagaggggtataaataacatatataaatttattaattcccttattatttatatttattattatctctctcactagaaagcaagttgcatgagcacttgtatagtctgtattttaaccatacactttatatgcttaaaacaggcattgtcattcaataaatattttttgaattaagtggataaatggctggatatatccagaaatagcctatggctagtaaagcataatatgtctatctcctgtatcccttaatgcttttctacccaaaggttaatatgtgtgtatgtg

SEQ ID NO: 1881123 - DNA, 4001 bp, Homo sapiens
ccttggcaatttattcagcttctctgtgtcttgaatgcatcatctatacatggggataaaagccatctctactccataaaactgctaatgaggattcaatgaggtaatgcatatggagtgcctacaacagtgcctggcacacattcaataaatattagctattatgattatatttacagccaagtccaggaccctctcctctcagtcctgttctgcatctctattcctcccatgctggagtattcattctctcctgacccacgctttctttcatttccacctcttacccatcagttctgaaaatgatgtcaaggtctcttcagtgccaactctgctctgccctcctttttttttttttttgcatttgtcattagatccaaactgctttcacaaggttcagctaattccctgactaacctgtgcctggactaaagcttttataacaatgtgattctaaaaaagttcccacagaaactagagggtaacattacaaatttacttggccttaatccagaactattttaacaccatcttttatcacataacttactccatttcaagtttttttttaagtgtggcctccttcacatcttgtgcttatactattttaaagagaaaaacaatttaaggtcttataaaacaattttgtttgccttgaaatttatttagaaattttcgaaattttgtgtatatgttctctgagctttattctgagtccagaggaaaagaaaatatcctctttcctggatgggctgtgccatctcatcttgggctgtgaagtctgccctaccccatgccaccagtctcaggggaaggaagctgccagagaacttggctaaaaaagggggatggggagtaaaagatccaaacgattaaatttccagctctcaaaataacccctgactactcctgtcacctccaaatcagggcttgcacacttcttcatgctggcaaagtgccacccctctggcctgatcccagggggccctgatgagctatggacgcccctttatctctgcaagacagccacgtagagaagctggggagctcactgaattaagggtggacatgcaagatgtattttctcttttcttatactcttaccattcttctccttaatctctcttctgtcttcccctccatctgtctccaggctcctgaaaggccccgtgatagtgttttctaaaacttagtaatttgagtaccactatcacgatgttcctctcccctgctctgcctacccctccgccccaccatatccaaattccacctgttctatttgatagcttactttttcacttaaaaatgcaaaatctagctcttgatgtatatcactgatttaaatttaaaatcagtttccttgccataaatagaaagctccctgataaatgtaatgcaaataaaaacatatagtagtggaattttagttggatatggctgcttgctgcaggcctgtgcctgaaacctgctgttaggttaagaaatgctggagaagtgttaaaaacatatcagcatcgcagtgagacttgatctttgaaagagagacacagaaggacaaccgaaaagagagcagctttctcaagaggtaaataagtttgttgaaatctgataggcttcatcccatttccttcaacaactgagtacactatttgctaactgtactaaaaaacgttttgcacattttttcttattatttgctcacagcttttgactaccagagaatgtttcggatacaggactaattcctgtggatgacagaatgcgaccgttgaatgggacattgggtgtcatctggtccaaatcttgaccccttttcattttccccgaaagaaagacttgcggctcggaaccgagggcggcatgcccaaggtcacagaaagggtggtctaatgttttggttcctgcagcccagagaacaagctatcccatcccacaggagccttggcgaaaagctccccggccggcgcaaggccagacttctcgcctccactgtgttgattgcggttgccagggcagcggcgcattgctccccgcctcgtcctggtgacgtcacagagcaatgtccaatgggaaagcagctcggtgtcacgcacctcctatcccggcgggcaccgcctgcgccgcggcgagtgaggcgtcgtccgtactggaggctagctcttgtcgcggccgcggcgagttaacatcgtttttccaatctgtccgcggctgccgccacccaagacagagccagaatgttcaggatgctgaacagcagttttgaggatgaccccttcttctcgtgagttacgggagccaggagtccggggtcgcgcgggaattaaggtatcgaggggagctattttaagggaaaagagcgagttttagagggcgagagagaattcggagtaactctggaggcggtttgaaggagacgaggatttggaggcctgggagggaagagagaggaggatttaggggtgtgtgagacagggaagagacggatttgggcgcatgaggtggagagaggagggtttggacgcgtgaggtaggcggagggaagtttgggggcgtgaggtgtggggaggagagttaaggctgggagtggggggagaagagttgaggccgggaggtggggggaggagaattgagggcatgaggtggggagaagaggttgagggcgtgaggtgagggaagggtttgggagcatgaggtgggagggaggagggttgagggcgtgaggtgaggggaagggttgagggtgtgaggtgaggggaagggttgagggcgtgaggtgaggggaagggttgagggcgtgaggtgaggggaagggttgagggcgtgaggtgggggaagggtttgaaagcgtgaggtggggggaggagggttgaggctgtgaggtggggggagggtttgggagcgtggggtgggaggaggagggtttgggggagtaaggtggaggggggagggttgagggtgtgagatggacgaaggaggatttgggggtgtgaggcgtttggaggagggttgagggcgtgaggtggggggagggtttgggagcatgaggtgtgggggagagttgaaggtgtgaggtgtaggaggagggttgaggacgtgaggtgggaggaggatttgggagcatgaggtgtgggggagggttgagggtgtgaggtgaggggaaggagggttttggaccgcgaggtggggggaggagggttgagggcgtgaggtggggggacggtttgggagcatgaggtgcaggggagagttaagagcttgaagtgcagggacgagggttgagggcgtgagttggtggggagggtttgggagtatgaagtgcaggggaggattgagggcatgagttggtggggatggtttgggagcgtgaggtggcggtaagagggttgagggtgtgaggtggatggaggaggatttaggggctgaggaggatttgggggcatgaggtgtgggaggagggttggggagaagggttgagggcgtgagttggtgggaagggcttgagagcatgatgtgggaggagggttgagggcgtgaggtagggggaagaggtttgagggtgagaggtagtgggacgagggagggttggggcgtgaggtggagggaggagggtttgggggcatgaggtgtggggaagagggtttaggggcatgaggtgtgggggtaggagggttgagggtgtgaggtggacagaggagagttgatggcgtgcagtggggggaggagggtttgggggcgtgaggtcgcaggaggatggttgaggacgtgaggtagagagttgagggccccaggtagggggaggaggatttggctgcatgagatggaaagaaggcccttcctcacactcccggggtgcctgctgctttccatttggccggactttgggtgcccgtcatggcttcctgtgtgcagagttggcctttgcagcttcaagggctttgcaggtgacataactaccatctcggtgaaacttatggtgagaattatgttcacataattgcaaa

SEQ ID NO: 1881124 - DNA, 4001 bp, Homo sapiens
atggataaattcagtctgggaatggtggctcatgcctgtaatcctagcactgtggaaggctgaggtggaaggatcatttgagcccaggagtttgaggctgcagtgagctataactgcactgctgggctccagcctgggcaacagagtgagagcctatctctaaaaacaattcaaatcctgcatactcaaaagaaaggttggagaaacatctcgaaattacagttgatgaatttatagtttagcaattcttaatttgacagtgccgatcaaacttgggcccaaatcttgagctcattacttaacacctgtgcagccctgggatttttttttttttttttttttttttttttttttttccccttatttctctgagtctcagtgtcttcacctgtaacatggagagaattgtatcaaccttgtgcattatctgtaagaaagaaagataatccagttaaagcaccaagcaccagggctggcacctgtagtcagtgctcaatcaatcacacctgttagggttcttgacgatttgggaaccggagtttctcgattttgctattcacacacagaatgctcttttaccattaaaaaagattttaaagttgtaaaagaaggagataatttggccaccctgtcatggtctgccttctcttttccaattttattctgcttcttgattctaattggactagaatatgtagttgtttgctagggcagctgcaacaaactaccacaaatgaagcagcttcaccaacagaaacttattgtctcaccgttttggatcccagaagccagagatccagtgttagcaggggtcctttcttctgattgctgcaaggaagaatctgtgtcattaccctctcctagcatgtggtagtttgctgccaatcttcagcattccttgtctggtagaaccatcactctggtctctgccttcatcttcacatggagttctccctgtgtatgtggctgtgtaaatattttccctttctacaaggacatgctcatattggattatagcccaccttactccagtgtgacctcatctttacttacatctgtaatgaccttatttccaaatcaggtcacattctaaagtactggggattaggactttaacatatgagaatacatttcaatgcataacaaaatgctataagactctcattatttccatgaactttctggactgtaaactctaaaggaaacaagcaggacctaattacaactctggttgtcagcctctttaccttgccagcagtctgcactggagcatgaatacgtagcattaagtgtatagggaaaagaatctgatcttcctaccgaacagcaaatcttgttctagaattttatctgattgtttttaaagtagaaacaccacaattaatgtcttgcactgtttactttcatctattgcaaataacagttcaactaaaaaccacttcactgacaagacgggaactgagaaaccctatcaaaggaaatgaaaaacatggcacagcttgatcaaaaacctaaggatgagcttcagctgaatacatgaatagctgatgttgctcaaaacatgggagccagctctgaggcttggaacaatttttattacgaaaaaattttctttgggtagatttttttttatttggtttcctttttctgttgtttgaagaatgatccatatgcagatttttttttttttaaggcagaaggctggatgcacaaaaggtttgcagtgaaaagaaagtacacctctctctgtgcctcccagtaatccaattccactccctggaggcgatgcctacctaccgccaattcctttagtctctgcatttaaaaacacagatagattcacacaaaagacagcaagtggactaccctgcgcctggcttttttctctttaccttgtatcttgaaggttctgccagatcattagctgtttcacttaccataacagctgcactcactgtgttccagagtcatgagtcttctcgggtaggaattttttgtttgttttgtttgttttgttttttgttttttgtttttgttttgagacacagtctcacccagccacccaggctggagtgcagtagcatggtcttggctcactgcaacctccgcctcctggcttcaagcaattctcattcctcgcctcccaaatagatgggattacaggcgcctgccaccaagctgggctaatttttgtatttttagtagagacagggtctcaccatgttggccaggctggtctcaaactcttgacctcaagtgatccattgtgtaggaattttatgtataaaggagcagtgttctcacagtcctataatgtgccacctccctgccccagctccatactgcttcaccactgccaaggaactggaaggcagggcttatgcctacaatacaatgtcaaatggaatgacagacagacttgtactggagaagttctgtttggtcacctgtagtttaaaaagaaaaaaaaaaaaagccagttcaggaatcattgctcctctaccaagcttccctcccttcccttcccctcccctcccctcccctcccctctcctcctctccccttccctcccctcacctcctcttcttctttttttctttttttttttctttttgagatggagttttcctgttgttgcccaggctggagtgcagtggcatgatctgggctcactgcagcctctgcctccagagttcaagcaattctcctgcctcagcctccctagtagctgggattacaggtgtccaccaccatgcccagctaattttttgtatttttagtagtgacgagggtttcaccatgttggccaggctggtctcgaactcctgacctcaggtgatccaccgactcggcatcccaaagtgctgagattacaggcatgagccaccacatccggcccaagcctttcttacttcctttgctcctttcactcctaaaaggtgaaggaagtgtaaacttttttctaaaaataacaaaaaaaattgtaagagtttatttgtatatttaaagtggcctagttacctttgctaatgctctaattttttaaattatttcattttaatttattctattttatttcactctgtcttgctctagaaaagactcacaaaggctctagtgtcttgtaaaagtccagaatagcacagatttttctatttgcttggaaatttacagattttttaaactgcttttaaatattaagaaggtctttctgcagagagtaacaatgtggagtattacgtaattattgttccagtcctctaaaatgctttttcaaattgtacctattcagttcagttgattaattaaaagttaacaatctcctgtgtcaaatcttctaatagatagaaaattaatcattcctttttatattatatttatcatgctttttattacaaaagtaatatattcattgtaaatttatctaaaaataaagacaagcacattgcatttagttacccaaactggcattgggatttttcatggatactcccaaatattttctcatgcacgtcatatgtttatgtttcaataaactcaggatcatatcacatgtactaaatggcaaactgctttttctacctcatcatgtataaagaacatttcggcatcattaattctacagcacgattgttaataactacattgactctatcatagaactggagtgtgatttatttcaaatgtcccactgttgaatatttaggtggtttatagtgattaagcattcaaaacaatattggaatacacatacgcataactttcttgcacattttgccaaattattctcccaaataatttaaacatttgttcttaacatttgagagaatgaatccctttgagaatctgatggattttgcatctcttctcaggaaagggcaaatatgttcaaatttttatgcatcttcggagccttccgaccaaaacaaccccagattgagaacgcagtagcattttatgtccctacaaaccatatgaacgcccttttgctcacactatcc

SEQ ID NO: 1881125 - DNA, 4001 bp, Homo sapiens
tcacttgaggtcaggaatttaagaccagcctgatcaacatggcaaaaccccgactctactaaaaatacaaaaattagccaggcacggtggcaggcacttgtaattccagctacttgggaggctgaggcatgagaatcacttgaacctgggaggcagaggttgcagtgagctgagatggtgccactgcactccagcctgggcaacatgagtgaaactctgtctcacaaaaaaaaaaaaaaaaaaaaagtccatcattcttactaatggaggccaaatcatctcagctcttctttggatgatcagtatgctccaagccagtgttatccaatagaccagaggtccccagcccccagaccactgaccagtagtggtctgtggcctgttaggaactgggttgcacagaaggaggtgagcagcgggctagtgagtgaagcttcatctgtatttacagctgatccccctggctgatctctgtctcctatcagatcagcagtggcattagattctcataggagcaccaaccctagtgtgaactgcatgtggaagggatctaggttgtgtgctccttatgacaatctaatgcctgatgatctgtcactgtctcccaccaccctgagatggaattatctagttgcaggaaaacaagctcagggctcccactgattctacattatggtgagttgtataatgatttcattgtatattataatgttcataacaatagaaataaagtacacagtaaatgtaatgcacttgaatcatcccgaaacttccccctaaaaatccatggaaactggtccttggtgctaaaaaaaaattggggaccactgcaatagactattcggtcactgtccaatcaaacattctgcaatggcggacttgctctactctgcactgtccaacatgggagctgctagccacccacatgggctgttgagcccttgaaatgtggctggtgagaatgaagagctgaattttcaattttctcttattttaacaaaaaaaattttttttttttttgagacagagtctcattctattccccaggctggagtgcagtggcacaatctcgtctcactgcaacctccatctcccaggttcaagcaattctcctgcctcagcctcctgagtacctaggattacaggaacccgccatcatggccagctaatttttgtatttttgtagagatgggatttcaccatgttggccaggctgatcttgaactcctgacttcaggtgatctgcccaccttggcctcccaaagtgctgggattacaggtgtgagccaccatgcccagccttaattcatttctaaatcacaaaatctaaacaagtggctaggagctaccatagtgtacaaggcagctgtagaatcacaggaaattgtcaatgaccctgtcctgcttcaagttgacttttccccctcatggtgacactctagattctttcctcttctctcacattttttagattttcaggcttagaccatgaaaataagttctgtccttccaagaaagtaacattcataacacttactgtataccaggctgatttcagtgctttacatgtattaatttacaacaactctgaggcaggagctgtgattacacccattcaacagatgagaaaactaaggcacaaagtggtgctggaacttctcaaagtcacacagtttgcaggagacagaactcggatttgaactcactttgggttcagcaactcacagctctcacctatgacataatattacttctgtggtcaaaacacttagacctggatttcacaggaatcttgtgcttacctggctgctagggaggttttcatcatcttccttatctcacagttcaaaacccagggactccatgctcttgctctggtgaccgttcactggcaggaggattctgggaaggttctccttttctgtcatttttcttattcgtggttttttgtttcattggtgtttatctgcagaactttgtttccttctgctcaattcataatcagagtgcttttcctcttggctgaatccataagtgtttatgcaaaaagaggttgggcatagagccaggcgactgatgacacccggctcatctggcaagtggatatcaaattgttgtgtctcgttctgccattcccggctcctgctgtggggctgggccatctgccaactctgcaaggagctggcgggaaaccgctgccagcagagtgaacccacggcccgggtcagtccgcctcggcatagcactccagctggcccccagtgccttttggggacacatctgtattgccaggcagggctgtgggagggccgcctgcctcctgtccatcacaaggaaaacctaaccttgtcctgcttcccttccaggcagcctatgtggagattgctgcattaacctttaatatggctaaaatttttccttcaatgacagtaatgctgctagaacccatccagatacccaggaactaatgtgccttggcagatgatgctggaaagatgggattcccggcagcctttgcatcccttgctcacagcccacgagtgtctccaccgtccagcagggcttctctcacggtcagggcagaaagagagagagtctatctggaacaggctcggatttcaaatgagtgtccccgataattcaacatgatcgatggctgaggtctttcaccaagttcaggagttctagttctcagagagaggcagccagccatgactgtaagacctgggcaaaccatacaaactagacggcaggtctcacccctccccagagagctccagagactatcaaagagtgaaacagcagagggatggtctgggtggggtcatcgtggccgacaagggtctgtgacagcaccttgttaggctacccccaagaggaaatttggagagagggtgggagggcagctctcagtgcaagccaagtctcctggaaaataactttcaaactttggaggattgtgagcaagatgggaccagcaacttctacctaaaagaatgttaatagcaagataactcatcctaatattggtccaagctaggtctttattatgcatcataaaggctctgagaataaccatctaacctccaaaagggctgcgggctttgaagaatctcaggcaacttgcttccttctgctcaaggactcccctggagcacagcaaagcaaggaaacacttagagccaagcttgagttctgaatttcaaacacagggagtccatctctttctacccaattgttccctagaatcagtaactaactccttccccttaatggcacgtacttcctaccaaagcacaaacgtgatgggctgtccatgagcctcccacaaacatgtgcaccttttgacataaattctgtcagccaaagagaccagacaaaatgcaaaaccaaagtggagcctttccttgaattataggttctaaagagttttggactctctacaaaacccaagagttaggaatggcctgtaagaagcaccagcccttgttttaaggaggcaatttaagaataatagccatgctgatgccacactacgctaagggagaataatgaacctaataaaactagcgattttccaattgcttttgctgctggaaacattgattatgctaattaaagggtagaatagtaaatactcactcttttgcatccaattaagtgttcagattatttctcagaagtgtttgttgaaaataatcatgggtcccaaataaacagattcaattgtggtgcggtacatgtgtgagtgtgtgtgtgtgtgtgtgtgtgtgtgcgcgcacacatgtgtctttctggagctcattttatggagatcccgcatagctccccaaattcctatgagaccaaataagaaaaatcacagtttcctaagactacagcttgggatatccttggaaaaggtgtgtattgagaacacagcatacggaaactatttcacattggcaatatctgtgatttaacattgcaaacatcagaaatacaacttgttcttcagagcc

SEQ ID NO: 1881126 - DNA, 4001 bp, Homo sapiens
agccccagctgagcccacggagaccagaactccccgggcaacccacagaacaatgaaaaaattactgtcggttgtgctgcctttggcccctgggttttgggaaggcttgctatgccatgaaagctaactgacgtaccccctcctgcttctccagccccagagactctgtttcctcctgagagggagaagctgtcactggctccacacctgctccttcacgtctctgagaagctttgagaccctcagggcatttgataggggcacaccaggctcttgcaaattaaaagcattgactcctgaaatggaaaaactaagactctaactcttgttcacctgcagtaactttcctccataaggccaccggatgtctcatggtcaagttttttttgtttttttttttgagacggagtctcgctctgttgcccaggctggagtgcagtggcgcgatctcggctcaccgcaatctccgcttcccaggttcatgccattctcctgcctcagcctcccaagtagctgggactacaggcacccgccaccacacccagctaactttttgtatttttagtagagacgaggtttcaccgtgttagccaggaaggtctcgatctcctgacctcatgatccgcccgcctcagcctcccaaagtgctgggattacaggcatgagccaccgcgcccagcccatggtcaggttttaataggggaataactactagtcaaagaggaattaggatagacaaaaaaataatttttaacacaccaaaatacgatctcatcacatacttattgagtgcccgctagactccggatgcctggtaggagccaaggacacaatgaaggcgaggagacccagaccccactctcctgggctctctgtctggcctgggatccagctagccctcaggtcaccacaagaatggtgactcatccatccattcactcttccgctcgcatggcaagtatttcctgagtccctacagtgcgccaggaactctaagagtcacagggcataccaccgtgagagcaccaagatgtgcaagcccctcgggagaggggacagggcagggtcatcccatctggggccaggaagggcttcctgagccagtgcagatgacgctcaaacccaaagaatgtgatgcagttaactggacaaagacttggtagtggggtgcaggggagcagaggagaacgttctagaagtgctaaggcccagcagtggctgggagggcctgaaagaaggccagagtgtctggggaacacagatgtgggggagccctggtgggagcctggaggaatgggcagggccagcttgaagggtgtccttggaccctgagtgaggattccaaaggcttttggggagaccaggtgggcattaaccccgtcaggccactcccacctgctccacctggttccaggtaccagagacaccccatcagcaggcacaggggccccagcagcagccacatctccacagcctgacctcccacccccacagctcaccccaagcccaggtgttctgaaaacagcccacacctctgcacccccagcgtagcccacccttttggtcctcttcttgttaaaagacttaccctaaagaggcagctcagactccacctcctccaggaaggcttttctgatgctgtgcaaccccaagctggatgctactgatggtttgtgctggcagagctgcccctatgtcccttgattctattcctgtatcactattgacagtcccacagagcagtgacatccccgggtcaggggctctgcactcacctgggatgctcgaccctgcatgggtcacagtggcagctccagaaccgctaggtagggtgggggctaaatcccggcaggccgggtgtcactatgctgtgctgcattggcactgtgttctccttacacaggtgacctgggcaggggctctgaggagccggtggcgagtctgaggtctcaagtgcccaggccctgtgtgcagctacagagttaggggccggcaagtgcaggattggctgtggagaggcacaggctgaatttggcccagcgtaagcgttctgggaatgtgtggtgttgctactgggacttgggctgccttgggtgtggctgcataccgtgggcccagggaggtggggagtggggactgcggggagtctggggagtcactgaagatgcaggtgctgaaagacacagccatcttcaggcaagcccgggctgaagggtgcaggaactcagactgtcctgggggttggggtgtttcccagaggtgctcgtgctgggtaaaggccaggggcaaagggaggaagcccagcccagggttcgtccatgccacacctcagggtcaggctcccagggagccatgctgagcatggcagtgagcacagaggttggagcaccacgtcctggggcccacaccttcacctcttcatccataatagacacagtgggaccccctggccagtggggaggaggaggcacagaggctgcgggaagctcccagcacaggaccctgggctccatagtgtgggtgccgtttcctgcagaacagggactcagacatggacaaccaaaagttatcagaattggggtgcttagtagggactagatcctgtacagccagccaaagagtaactaagcgcccactgtgttacaagtgctttgtctacttagaggtgaaggcacttacctctgtggcagatgcagggatgtgcctcagacctgcttcatggaaggatacactgcccagctgctaggggctgtaaccagacgtgctcagcatcacccccagttgcagacagacagcacccctgtgccatcctccccaggcccatgtcctatgactgagccacacaggcctggacaaccccctgctcaggacagctctggtctactccagtcccaggcccaaagggagtcctggctgtccttgtgccagcagtgaagctcggtgtctcctctgcctgctcctgctcctccctccctgccccagacccggtccaggccctcctgagagcccctgtagctggtcccaggcaccgacaccaggcttccatggggctgataaccagcgggcgaggtgacaaaacaccaagtcagagggagctttccaggctctgctgcaggagctgtgcaggcgaggcagagagcagcctgggggtgtccagaaggatgtccctcgaggacagacactcacatggagccctggaggctgcagaggacacagccctgctgtgacagccaggaaacagtatcccaagccatggggacagcaaaggctaggccgaggtctgatgcaggaggagctggagggcagagggcgggcggagcaccgcctcgggaacgaaacagctggggaacctggagggcacctggatggttacctctaggtcactgtggaactgatctgcctgcatcctccctcctgtttctggggctggccaaggcacgctggagctggggctggggctggggctggggctggagctggcaggccgaggttcccaccccacaggcaccggagatgagttggtaagaaaagggcaccctctggctgcactgattctgctgagggctcggaggctcatctccctgggggcagccccgggcgcagctgctctaaaatcacccactcagccatttcacaggcagaaatccttcgcttcaggcatttgcatccaaagctgtccgcagcctactccccaccgtggctgggtttaatctgctagcactggggctgtggggctgggacaattaattaaagatcccagggagcagccagctctcattaagtcctgcatcagatgggaggggtgctggggaagaacactcttgccgagactgcacttttgccccagccaagtattttctcatctattatctccatcgatcctggccgcggctctaagaagaggggattattatcaccattttgcaagtgcagaaatggagactcgggttaagttgtgtgttagagtctcccagctccaaagcagtggggctgagatccac

SEQ ID NO: 1881127 - DNA, 4001 bp, Homo sapiens
ccgtatggtggcttatgcctataatcccagcactttgggagcccaaggtgagtggatcacctgaggtcaggaattttagaccagtctggccaacatagtgaaatcccgtctctaccaaaagtacaaaaattagctgggcatggtgatgcatgcctgtagtcctgagcagctactcaggaggccgaggcaggaggatcacttcaaccagggaggtggaggttgcagtgagccaagactgtgccactgcactccagcctgggcgacagagcgagacttcttctcaaaaaacaaacaaacaaacaaacaaacaaaaaaaactcttccttttattgtgtttttcttgtcatatttcattggctagaacatcctgtgctatcataacttttcatttagacacacatcattgaggtttgagtgaattcatagttagcaattatgtcctagagtagtaattccaattttgtcataaaatataaaaactgcagactgatacaagtaattcatattaggtacaactattgaagaacaaattatgtcatctctaaataatgagaattgtttctctctttcaaatatctcttcgttttggccaggcatggtggcttatgcctataatcccagcactttgggaggccaagagcaaatcttctgtaaagtgaaatattcctccaaaaacaaagaggaaaattattgcagttccatttatcaggtgcttccaagaggtcagataccaggttcagaggtaaaaactcactgtatttgattctcacatcaaatttctgaggtcttaccattgtgccccttttactgccaaggagactaaggcctagaatgtaagtaacttgttagacattgtcatagcatggcgataaatgcagacccttctgaggagcacacagcctgctcactttatagcactagcatgttttgatgcttatggccccaaggtaagttaaaatgtctttcatttttatgtcagtaactggaaagtctaaaagttaaattaaaaagaattccacttgtgaggaagatcatatctggatgtctatctcatgtgtatctccacatttagtgttactgtcgatcaggggccagcatacttctttaaagggccagagagtcaatattttagactttgtgggttatgctgtctctgtcggaactactcagcactactgacgtggcatgaaagcggccgtcgacaagatgaaagtgaatgggtgtggctgtgtttcaataaaacttgatttatggacagtgaaatttgaatttcatataattttcacatgtcataaaatattattatttcaaccactgaaaagcttataagccttacagaaacagcccatgggccagatttggctcacaggctgtagtttgtcaaccctgctcactacactgaagtcttagaactttgacaaaacagagagggagaggtgcatgcaaccactgcttctacaactcgtccttccccatgacaacaggtatttaacaaacatttctgagggcctgctactgcatgacagccccaatttgggcaggaaagatacagagacaaaacaaatgtttttctggaggttttgtagtctacttggagaggcgttgcagggtggaagaggtaaaataataataataagaagaataattacaacgcagtatgcaaaatgctttagacttacagcagagtgtgcagcagccatcgacttcagcaggcatctggtggatgctgggcttctagaatctcaggccctctggaagtgcatctcaatccccctcagtatcttgtagcaggctaagtctttttggagagactcaacaagtttttaggtcgtgtgatggagttcctgattgcacactgctgtgctggaggcaattcagagacctcagagcagcgagcgagcccagcatctttttaatctggcgccatctgcccgcctacccctcccaaatgcacattttgatcctctgaagcttggcaaagctttcctcagctgatctcagctcctcagaatgagagttaatggggaattggagggctgtgcactggccccagtaaagatgtccagagcgtgaagtctttctgcaggctgagcagaggaggggtgctgacggagtggcacgcacaacaacccgtttaacgagtccaccggcaacccagtgctcctgagggaaaacatacattggcagcacttccccgtgcctgtctcctcctttttctcttgctgacacgtctcacttgaattaaatcctgggctctgccatgccaagagtctttggttgtattcctgctggccttttccagctgcctagcttccaagccatgtgcaacacattccttcactagctcctgttcttaaatgtagaggttctccggggctctggcctcagcccactgattttccagtgtttacacgcaccttgagtgatgttatccttgcttgtagttgtattaccatctgggtgctgatggcttttgaatcagtattgccagtgagacctgccccctagcttcaggtttcttcctcaaactacctccccaaggggctcacctcttccttatcaacacctgcttgcccctgctccccctacccctgctttcatttttttctgtgtgtgtgtgcttgtgtgtgtacagacacgcatgtaatgtaggacctgggagtctttcattgtcctcctttttccttttcccgcccctctgctaattgagacccaagtatctggaggccttgattcagggttgggctgtaaagacaacttggattctattcaaagagtcttttactttagttcactcttgttgttgttgttgtcgttgtcacagggtcttgctctgttggctgggcgggaacatgcagtggtgggatctcggctcactgcagccttagcttcccgggctcaagcgttcctcctgcctcagcctccaaagttgctgggaccacaggcacacgccaccacacccagctattttttcatttttaatagagacaaggcctcaccatgttgcccaggctcctcttgaacttctgggatcaaacagccctcccacctcagcctcccaaaagtgctggtattacaggtgtgagccaccacacctggcctagtttactcttgatatagctaattagcagccccaaagatatataggagacaaagcagtttgatatagctctctgttacctctttcttctctaagcagagtgccaggggtgtctttccatatgcaaacctgatgatgtcatctgcctgcttaaaactcttctgtgttcccccctgctttaagggctgacaggtatggatgggatgcaggttttgcagtgcgccacccccaaggaacgccattctcatcatagtctatgtgaataacacctcctacagctgcaggagcattgtacagcctgtactgctgtctatggcagctctggccagtaaggtctagcagtgcttggccttagactcctgtcccaccacatcacatatgaccctctccctggtagataatcccaaggtttctgagtcagtagttctggggtcaggtataaaaatctgccctcctatcacattcccgggtgatgtgatgctactgttctggggaacacactttgagaaccactggcatagccatagcttgacgtaacttgatgttttttctgttacgactctttactcacttagggcttccaggacatgcctggacatgggctgcctaacccaattttgcaaaagctgggggtatctccattttatagaaacaattaatgatcccacttactctttttaaattaatattgaactctccatgaagcccataaacacattccttgtggaagaacttgaaacagtacagattagtctaaagttccttctttctctcatctttgccccagaagttaacactcttgtcagtttggtatatatcgcttttagactctattctgagtttgctggtagaaaatagccttcgtgctggcatttccccctcctcttaccatgaatcacat

SEQ ID NO: 1881128 - DNA, 4001 bp, Homo sapiens
tatttttaattaaaaatttggcaaaatacaagttggaaacagattcagaatagtctgccttttatgcctagttaagaagtttgaaattatgtccttttttgctttaaaaattaggagatttctcataataattgcaatttctagcttctccttgaaatcgaaacatctagcaatcctgaatctgtaacccatatggtaacattcaactgaagtctaccggcagctgccaccattcacagagctttctccacacctgaccacaatctcctcctatccctcttgccttatacccagcctatttcactcatttatgttacctgtttggctcttgagcttactcttttcacagaacttttctctgcacctggccacaatctcctcctatccctcttgccttatacccagcttgttttaatcatttattctacctatttggttcttgaccttactttattttcactctgctgcagaacagggagctaacagtaaatagcccattatcagttacatgttttttaaatatattttggcagccatgtgagctctttaagtgtagaaatagctcaggttgtagaatattatgtgtttagtaatgtctgaaaataactttatgtgcttgttaaaagaaatatatatatattattgttctataatgttcttggaagcataacaatattttattaaaaaattaataaatttggtcccaaacagaaggtaaactaatgttgttctagtatagttccaatataatcaatacaatatttccatttgcccatgggaagtagacttcattgtaaagcagataattcttatttactaaaaaaaaaaaaaaaaaaaaaaaaaaaaaaaaaaatcagctcatgaggcaataaaatcattctccagaaaacaggagagatggaatataccaacatgtatttacaaggcaaatcagtgtttatgatgcattgcagatgatccttgaatgtgcaatgtacattacattttgccggcttcatgaatttggaatatttttggcatactgtctttatacagtattctctgaatacagaaatcccacagtacaagctaagtaagaaagatgattgtttaccacccccttttccagaggcatttttatcatgtcttagcagcagatatttatacatctaatcctttctccaagatgtcagagctctgtgaacaagtgggatttttttctttccttaacaaccacctctgtttgaaatgaagtgaggtgtgtttgcagtgccaaaattaaatattcaattttgtcaagtactataatctgtgctacagaatggatagatgggaaaatgctgaaatcacagcttttccttattatcatgttatgagaaatgttgacaaacatatggaagaagtgagagatggcaggagcaggttaggaactagtagctgcagaaagaccagagaaaactgtcagcttatctctcctggcatttgtgcttatgtaccaaggaagctattacatctcttctaatttttttaaccttgcctgataattcaaatagaagccttgttgagaatatacctgctttttaaaaatttatgggaaaaacagcatctttgcatttctgctgaataaaatgacaggattggctccaggtttccattcccagtaagagccttcaggttcgtctgtgacagaactctcaatagaggttatttttacctggcatggctgtgctgttactgatgctgctgctctcgatggctgagataacttctcctgtgggtgtctcggacagaacgaaagctgggtcaaggtggaaaggtgaaaagaatcgtgagtaaccagggttttcaattcttggtgcatttctgttttttcttcattatatttaggaatgcatcagggtctgcgtagctttgcagttcttagcatttccgagaggttgctttagaacttaaaaataatttttcacattaaatgtgcatgcaaaataaatgggctccacattccgtaagctccacacatctgcaatattgttctagatgttattgcaagagttttgtttggctttttctagttaactcttagaattcctgggacttgcaaagactttgagcagatagatccaaaggccatgtgtgtaatttaacatgaagttcaaatatgttgctaaaatttgttgatattcaaatgctagatatgtaataaaattccttgcatcttagcactttgtcctgagggtaacaagaaaatacaatgagaaacagcaaatattacagagactctgattagaataacttaaaagctgatactttacaattggtggttgataaatatattactgtctagagtcactaacttgtttattcactttgtatggaaatgcaatacctccacaatttgatcattaaatatgtctgtgtatttaagaaatgtcaaaaaccactattttagtctttaggactgaatatgtctcatgtgttacaggacaggattatgaatttgttgtttgcctgcctctgaactaactggcaagaatagtcaatgtcttttctacagtttatcaccctataggtcatcacaggtggaaatgtgcgtgcgtgtgtaaagcttagaactttaaaagtagaactttagaagtcctatgtctatctatatttatcttcaaaaagagacatagaaatggacgtaggaatcagtttggagagaggaaatgctgcttttaaaatgttgctgaatgttcagaaaaggcatgccaataaacttattttactggaaattcctccagtaaaagaagaagattcaaagtaggcttgaagctaattgctaatcttatgacttttgttttaatcatactttggcctatttactgttctgctttactgatttgagtggaagttggaaagctgtggtggagagatcaatggggactgcaagcagcacaagctggaacaatcagagatttcacttgctctgctgccaaccgaatttcccagtaccaaattattactggacctttatccctcttttgcgtctcttcttctttcctttctttcccttctttctctcctttctttttctttctttctttccctccctctctccaccccttccttccttccttccttccttcctttcttttctttctttcttcttcctctttctcctttaatctcttgttttctccttatgattcagaaaaggcatgtctataggtctgatacttacaccattctgaaataataaatgattggtcttactgaccgtattttccctggacatacaggttgcctcaatgttttgtttttttcatttgttttatttttgtttttatttttaccataaagtccaaacctttgtcccccttggaaagtcctgaagaaggaattcattaccttccaaagtccaatattgattagatttatcccacacattgtgcttgaatctaatcactatagtacataaaatttattataactttttgcttgttttgcctgaaagtctatattttatgtccattacgtgaaaatacataccattattgcaaggatggacataaccacttccatttaaagatgaggaaactgatatgctaaaaagttaaatgactttgtcagaaacattcactccgttaataatttacagacacagttctataatcaaagtttttagacttctaattcagtattctttctattgcacaaaacttcctcagagaactatcctgctgtgggaaatcccatacctcagtttctcagtaagcttaggggccatatttttaaaagtctcaaagagaatatatatgtgtgtatatatatatgtgcaaataatgcttggaaaaaaaattgaaagttgaggtgagatggtaagaatgcagcaattgtgataaaccagttgttcttaatgtagaaattcaattttatgtttttaaatgaattgactttctaagaggtgactgagctataagatatcctatattatgatttttgtggtggtctccaatgccaaaaagcaacagaatagggag

SEQ ID NO: 1881129 - DNA, 4001 bp, Homo sapiens
gaacagaaatatcgttataattaagcattaataaggctgcactttggcctcatcccttccttgttgctaaaggtcacttagcactagattctgaacatgtgcatacgcatcattcctacagataggatttttgacattggggtcaaaaactatttaagagttgatttgcatctccattgtttctatacacaggatctctcacactagaaaggcttttgcttaaggatcccttaagatgttttgcagatcttttattccagcaaccaatttgaagaccttccacagaggaacaggatcagcatgagaatatggctttttcatctccaggttccatgaccctgtactctttgaccaatcaataatgtccatgttttggcccattctaaaccttaaaaacccgaagtccaaattccttagagagatagatttaaagtttgttctcatctccttgttaggtgaccctacaattaaatctttctctgctgcaacctggtgtcttggcatattgaattgctgtgtgcactgtgcaattaaacaattatggttacaaccatatgaattaatcacggattaaatggcgttgtctagtctatgacagaatatgaataattgctatactactggtattattatttaacgtaacagtgatcttcattccaacctagtggttgcaaatggaacaatcttcattttaccacagagaaactgaagcccccactagtcttatatttttctgaccctgtggtttcagggcatgcaaggcaactctcagttttcttggttcagttgggcccacaaagattaggatttcacagcaaacaaggcaggcacaacataacatatttattttaacactatagtctccaatgaaataggactctgaggtcatcccaaacttgttttactttattatatagatgtacgtgtgtgtgtgtgtgtgtgcatgtgtttgtatatatatatacacacacacgtatatatacacacacatacacatatacatatatatgatttatcatatataatagttatatagagaaaacacacacatatatcatcaaatatgtatctatatttagtgagatataatttacatactataaaatgcatctacagtgtacaattcaatgacttttagtatattcattcaattgttgtaggactttctccttagttcagctaaaaatggggtccttgtcacacaaccatgaaatattaggctcgcagatactttgaagggtgaaaaaaatggaatttgttgggcaaaaaggaaaaaaaatgggaaacagggactctcagcagagcaagagttttactagtataggcttcctgctttacagattgaatcccagataccaaccaggaagaggaggagccaggctcctcccctctgcaaatggggtggacttctgtggctccaccacagtgtgcattcctcccactgtgcatgttggttgaagtttctctggggaccccatccacctggctgtctcattccctcctataaagaagtacatctaactgccattagaataagtataagaataaggatgaagactgatccttaactgtttcctgctgatagtgggggctgttttggggaaatggcagtcagagctccctcggaggcctatctcagggtccctggcaaaagggaccatcgccggaggctccagttgcatgaccgtttggagtttgatggcttgaaggcaagaaaagacacactgggttattagaaaacgtatcaaaatgaaacactgggaggggtgaggaaaatttaaaaatactgagaccttttactgtttttcacagagagagggaggccaaaaatccgactggtaaaaaacttcacccttttgtcagcatgttgagtttctgggttctcttcccctgagcccaatcctaagccaaccagtttaagctttgggaaattaactctttccagtttagaggatgcatctgagggaagtgtcccatagtatgaagacataattacctatctgtgaagagaagacagagaaggagagaaggaaaaaagaaggaatttttttcaaaggagtcccagggcttcaggatgcatttgaaaggggtacagactgaagatgaatggctacccttctagaaagaggagagcaggcatctctgattcccttcctcttctagcagatacccagggtacctgagggagagaaggaagagcatctgtttccctcttctgtccttacatccccaagtcctggcaaccttggcaagtgccaccatgggtgttaaaatggctttcacccatgttaacagggcagggagggaggtgggaattattcactcttacccacatacaccctgtctaccctgctgtcagtagccttgaattacctatacctcatttatgcccatggatactagcatggcctttatccgtgaaatgggaagcttggcttaattggcaggaatagccatactcacctgggctgtgccttttaacgttcatcattgtctgcctctggatccttcagatccagttttctttcctagggctttgactggaagcttggaattgagtttgggacaaaaatatgtctcaaggggtggggttgtatgaactccttatcatagccaaatgctaaggtgaaactgtggaactgagtcctcctccaacaagggagagaaaaggatgtcttgtgacacataaagataactggtagctatagttatgcttgctaggatttaggtgcattgtgtttggcttttgttagctcccttggtcttacttttccaaaaggattcctccaagtgatgggcatcttatttattcccatcgcctggcaggatttgcaggataattgctcagaactagaatattgatccagattttcacattacccattcttctttttctttctgagctgtagtgagagattgctggttgggtcacaggaacaaacagggttagtataaaaatgtaggcaaaaatgtaaaaaactaatgagtttagaatttaatgacaaacttatgttgagatttgaaacataatttcaatctctccagtcctcatttttataaaaaaaaaagtcatgataagactgagttgtttgaaaaatagattttattcttatacttggcctgattatttgcggaaaatgcagccagaataactatttctacataagccttttggattggctttgatggaactttgtgctgtaaggaatcacagataaaacctcttttttttttttttttttttgagaccgagtctcgctctgtcacccaggctggagtacagtggcgcaatcttggctcactgcaagctccacctcctgggttcatgccattctcctgcctcagcctcccaagtagctgggactacaggtgcccaccaccatgcctggctaattttttgtattttttagtagagacagggtttcactgtgttagccaagatggtcttgatctcctgacctcgcgatccaccaccttggactcccaaagtgctgggattacaggtgtgagccactgcgcccagcctgatgaaaccttttaaagctgagcccagtgatgtgtttttatcctcaaatacctgtgagttgggtgagcctctcctcttaatgtcccaagatgaacttggagcacctaggtctgttagaaagtgatattctgtatttaccacaggtcaggaaccctgtacaaggactgcataggcaagagtatgaggccaatttgtttttccccaagggccttttattggctctgcaatttgagcttgactccttaaagggaagcatacccttccagtcaaagccttggtaaaataaccagtttctccaattgtgtcctgttgcaaaacaaaaatggattcttattgcactgatgcaaagaactatatggtcataagttaagaatactcacagatagtttccaaattctagaggaaccaggcagagagaaataaacatgctccaaattttgttcataggagtataacttacttagttattaaaggc

SEQ ID NO: 1881130 - DNA, 4001 bp, Homo sapiens
aaactttcctccttaatctccagacttagagactcaatcgtaaaaatagataacatttattgagcacctactgaatagaagacattttagatcttagctcatctaatctgtttatcaacgttatgacataggtttttttttttctattttacagatgagaaaaatcgaggcccagaaatatgaaattacttgtccagtcacacagctagtaaatggcccatttgggattccagccccacttggcttgtgctttcaactattttccatattaccctattggaaaaggatttaaaagaggctcttgctacatcagggtccccatttgggatctagagattgcttggtttcatctccccttccacctattctctgtcttgctcagtctcagttctctttcttctgggtggaatgggttgtaagcccctttgcaactcaggcctttgtaactgttgaataggcaaatgaaggaggaaggctccgaggatggaagccagctgtgcacttcgctgatgatctgggatgcacagaggtgggatggggcgggtgagcaatggaaggctgctaatgagcgtttcccagtgttgcctccgagggcggctgcagcctctgcgctgctgtttggggttgttggagccatcacagcacagccaggatttgcccttaggcttggtgacaggttggatcaccttcactcagaaggcctggccactctttgccatgtctgatctgtggtgtggatgacggcagctgacatggactcctcgccacctggaaatgcataaagtgcagcttagccccaggccaaggggagacgttctgtgcagcccccagagcctttgtttctcatgatttccttcaaccctgcccccaactccaacccagtgtcacagggatcttagtcccacctccccagggtctggcccaggatccccatctcccgccagcacttggtgtttgaaacctcctcgcatagctgtggtttatttaggcccctgccacccacctgggcacctcctctgcatggctccccatttcacagaaggtgctgatgcctttcttgtgattctgccagcagagaaattgaggtcagggagatcagccaagcacacttttcggtggcttttaaggaggagcaatcagttagtgatcactgtgggcagagggctaaggggatggcttcaaggagagaaaaaagagcaatcggatggttcctgaattgtagaaatgaacacagtgaaagtaccaggctgggcttgggggtcagaacctccctcaagcccctgaacatcagcttccccactcaggatttctcacttcagtgactgacttcatcatccctccaattgcccaggccagaaatctgggagtcgtccttgacttgtctccctcaccccacagtctaattggctggcaagtcttgttgtatctattttctgtctcttgagtttagtcctttgccgtggccactgcccactaccaagggcccaccagctcttacctggactggttcagccatctctttccaggccatggtcttcctgcttcagctctcctccctcagctcccccatccattcccctctgcagtcggaagtcttctagaggtgtacatttgaccttatcatgtcagctccaggttagagcctggagttactataacgattacctccagggcgaagttcagactcattagccttccaggaaaagcagctcttcttgccctgcccctgtttgactctctgtgatgggggtcccaaaactaccttaggtttgataattcacttgagggactcacaaaaattagaaaagctgatatactcatggttatggttcattgcagcaaaaggagacaggttaaaatcatccaaggaaaaaggtgcataggtcggagtccaggaagacaccaggcataaatttccagttgtcctctcccgggggagtcacttggatagcactgaactctcccagcaatgatgtgtgacaaaacatagcagggaaacccaactgccccttggtgtccagggtttttgttaggagaagggagtcagtcacggaggtatgagtcacccacgtgactgaccttggctactcagtctctatgcaacccctgcatgcctggaatcaaaccgatacagcatgggctgggactccaggtaaacaaaaacaggcctttatcatgaattacactgttagcataaactatgtggggtggcccaaagccccagcgatacaaagatactctattccatcaggcacgatattccaagggctcagaggttatttcccgggggctggtcaagggccagttctttctttggaaggtgcagagtttgaggaccccaagctagtggagttaaccttttattgcatacctcacatccacgattctctccagtattaggccattcttgcattgctataaaggaatacctgagactgggtgatttataaagaaaagagatttaattcgctcatggttctgcaggctttacaggaaatgaggtgccaacatcttctggggaggcctcaggaaacttacgatcatggtggaacctgaaaggggagtaggcatatcacatggcaaaaacaggagtgagagaaagtgaggggggagatgctacacacttttaaataaccagaactcacaagaactcactgtggtgaaaacagtaccaagggggatggtgctaatcattcatgagaaatctgcccccatgatccagtcacctcttaccagggctcacctccaacactgtggattatcgttcaatgtgagatttgaacggggacacccatccaaatgatatcatctcccatatctcccacattccagccatattatttagcttgcacattcatgactctgcctttgaccatactgttccttctgccttgaattcccttctgcctcatcttccctagtctaactggagagctctcactcatcctgtcctgtgtggagccttccctgatgccccaggcaggctgagtttcctccttcccatgtacataggcactgtcaatgcgtgccgtaatttgtggattcttcagcatcctgtggatgggttcaggtctgttttccacacaataggaaacaccattagctcctttagcgtgagaaatgtgcagtccattaaaatgtttattttatgtttttccaatgataaaagcaatacttgctcatggtagagaaatttgggcagcatattccttttcagctttttctctccaatgttttccgtgtgtgaatcattataatccgggagaccatagtgcctgggcctgggcttgcctccacagggctgctgatgttgttccagtctctctaaagtggtgaatgagggcgactccacacctatgctctcccagtctccagagacttgtgggatgggctgggaactgaggacagagtgtggaggagggggacgagaaacttctttttttttctgtaggaagaagaggtggggtagggatggagtaagggaagacttcccaaagaagtcgacacttgggccagaacttgaaggaactttaggattttgctcagggatgggagggaagaactttgcaggccaaggtcgtggaacaaaggggtgactggctgagctcaaggcagtggggctcccctcccctaagggtccccagccctgggatgtgacataccacttgactttcctttgatcctacacaggagttgtttccagggggccacccttactgagctgctgaccccaagttctgttttagtcacagggcttcttttgtttgttttgtcatttggctctggatgtgtgtgaaatcctaattcaggccccagatagctgaccgactaaaacctaatgaaacaaaaagatggaggaaatgtgccctaaaacagttgttgagtaaccccaggtagcttcagtgcatgccagctttaagcctataaatacatcgatgggcgcctctttctcttctgaaacagcaagccccgaggattggagccagccagtgatattccgt

SEQ ID NO: 1881131 - DNA, 4001 bp, Homo sapiens
agctttctgtcctgctgcccctgctttatgggatttttagggtttggagaaatatccattgtctctcctaaaattcttgaatgcccatgtaagattgaatgctatttcgataaataagccatttaatagtgacagtttatataccagaattactcagttggctgttcttgaattgttcattttatttgtcaagttcaggggaagttagttttggccaagtattttttgaattttgttgcaaaatcaagttccaggtggtgaggtcccaaataacagaagatatggcaaaagtctcaaaagcattacaggtttaattaaattagtgtttattgaccaccaacataggtatattctattatagataagctagagtccattctttgagagaaacaagccaggcaattcttcgaggcagacagttacagaactgacctgtacagacaggtacagatggtataccaagcagggttcctgacgtcattgttgcatggtcgacatccaatttgactgctacatcctccttttcatggagccttgaccacttctgcccttctctctacatctttttcctggcttccaagaactaaaagactgttcccagctgtcctaatgatcctacttttccaccattccaacatatcccttgatctgaaattgccctttccttttccttcttcaattccctccaaacaagacctctatttcaccttctaagttaggtgttaggagaaaagcaatcaaaatgcctccagactaaatcaattcacacagaagtataggtggtaggaggcttaacttctatggcagcttttagaagacctgttattccaaatggatctttgattggtgggatgtgtgaaggagtcatttttgagacgtagggaatcatacttttttcttatctgtttatgctggccagaggccctactttcaatttattttctgcacaaaaatccccttctgaactaaagccaatgcatgctatttggtttacttataccttagtgctgtgattctctagcttaggtcaccaggtcataataaaggaccacaacaggaacctggcttggttttacatttcttatagtctgtagttgagttccttctctaaagccatgttcacacatctgaaattttcctagatagacttttatggcttctggtaaagataaaagttatattgattttctgttgcattgttaacttatcaaatagcaaaatatttaatttggaagataaaaaatagttttaaattttttcttaaaaatggtggtagaatagtgaccacactgcataccctcttatgagagtgaattaacatggagaccacaaacagaggagttaattacatctttgtggtattacatcctaacatcaactctgcatatggataaacctgcccttagaaaatccctaacatcccccattaaaaaaaaaaaaatgagcaattaagagccacaaacactgtttctcactaatcctgttacagtgaggtctgcctcccatatcagttcagattgctgtttcttcagttgcccaccagataaaaccatgatttgcattcagggactacattgtaagaaaagtacgtttcttttaatagtagacacacttggccctggaattcctttcagttaaatacctacatagatagaggtcactgtatatttgcccccctttgtttaaagagctaaaattctgtcctcacagtgtctataagctcgagaatcacagcactaaggtataaataaactgaagagactgtccctcatgcatgctgtgacagaaatcagctttcagactaggtgtgctgagtcccaaacctgtgctacatccctgctacaaaaactgaaaagcaagcctaaaattcactataggttcctagaaaatcaaaccttagatataagaccaagttatactatcttattctctcagcaaatccttaatatgtttcttctctgtgccaggtgttagttaagctcaggtgatacaaagttgaatgagatagcacccctgccttctttgtcccagctcatagtttaatgacataatcaggtggtcacaatacagtgtaatacagtgctgtgacagagagagaagctacagactgagggcacacagggccagggctcctaacccacctaaggcaaagggtaaggcaggggacatcagggaaaactattaaagaaggaggcatcctgagagctgggattgtattttttatttatggttttattttttacctttgtattttgatgtaatttcaggctaacaaaagttgcaagaacactacaaagaattctcatatgccctttaaccagatgtactaaatgctattatatcaaatatgcttacatacagatatgcacatacacgcacaaacacacacacacaaatatacatttcttttttcaaaaaaaatttggggctgggcgcggtggctcatgcctgtaatcccagcactttgggaggctgaggtgggtggatcacttgaagtcctgactaggagttccagccagcctagtcaaatggtgaaaccccgtttctatcaaaaatacaaaaattagctgggaatggcggtgcacgcctgtaatcccagctacttgggtggctgagacaggagaatcccttgaacccagggtgtggaggctacagtgagccaagatcgtaccactgcactccagcctgggcaacagagactctgtctaaaaaaaaaaaaaaaaaaaaaaaaaaaaaaaattgagagtaacttacagaaattatgatgccccatttactcttgaagattctggtgtatatttcctaaaagcaaggacattctcttctgtagcctacaagtaacaaaatcaggtaatcaatactgatacaatactacgatcttatctacagaccttattcaaatttcaccaattgtcccaatgtgtactctacagcagaagaaatccccagctcatatgctgcattcagctttcatgtgtctttagtatcctacaatctggaacagtttcagattctttctttgtctttcatgaccttgtaatttttaaagtgcagagtctagttatttagtagaatgtccctgaatttacgctgggcacagtggctcacgcctgtaatcccagcactttgggaggccgagacgagcggacgacctaaggtcgggagttcgagaccagcctgaccaacatggagaaaccccgtctctactaaaaatacaaaataagccgggcgtggtggcacacacctgtaatcccagctactcgggaggctgaggcaggagaatcacttgaacccaggaggtggaggttgtggtgagccgagattgtgccattgcactccagcctgggcaacaagagcaaaactctgtctctcaaaaaaaaaaaaaaaaaaaaaatgtccctgaatttagtagaatgtctctggtttggaactactctaaactgtttctcgcggttagatttggcataagcatttttggcagaaatatcacgaaggtatgttgcgctttttgagatgagtttcaaagagtgaagaggaatcagcccacataacctattgccatattaatttatttttgcattcagacttgggaggatggaagacagaaggcaaagggatagcctataatactattaaataatatttatcaagtagttaccaagcactgtttggaatgtgttacataagttaacttcatcatcttcgcaacacccttatgacatcctcaccatgactatgcttttcccatttttccaatgagaaataatcaggcacaaaaagatgatgaagctagcgcatggtgcagccagtattcaattccgggcagattgactcttgcccattctgtcagaagggacttagtgaaagcaaaacgcttaccaaaaaaaaggcttgtgtcttcagaacgagttggcttggaggtgtgtaactggtccaagcaactgggtgtggctctcccgccctctgctggctgaatcccttattgcatccttttaactgct

SEQ ID NO: 1881132 - DNA, 4001 bp, Homo sapiens
gactggggttttagtcctgcctgtaatttccagtgagaccctgaggaaggccaaacctctgcaggcctgtttcttcaccttacaaggacttcgtcatctcccgggacctttccagctataaagttttctgaattcattgcatggtactgtgattccaaagtggatcaaatcttgtgaaaacaggttttgaaataagccttgttaaatagattgtgttatctagaactcacagtgctcaaatcctggcctctctgcttgagtcactggctctacagccttcctgccattcccacctgcacagcaagtgatcacagctatctttctttctttctttctttctttctttctttctttttttttttttggcagaatttcgctcttgtcgcccaggctggagtgcagtggcacaatctcagctcactgcaacctctgcctcctgggttcaagtgattatcttgcctcagcctcctgagtagctgggattacaggtgcctgtcaccatgcccggctaattatttgtatttttagtagagagagggttttgccatgttggccaggctggtcttgaactcctgaccccaggtgatccacctgcctgggcctcccaaagtgctgggattataggtgtgagctatttctaaggcattctgaaatcctgggcctatgttaactctatgagtataaaattcttaccgtttggtttcactaagtctttactgttgttacctcttcctggcaagccaattttgtctctggcctagcaaccttagctatagtgtctctttgacgttaacatattattttttaatattccttcttttatttccttcacagggtacatccccagttacttagacaaggacgagctctgtgtagtgtgtggtgacaaagccaccgggtatcactaccgctgtatcacgtgtgaaggctgcaaggtaattgccctgggtccacaagcacagagcttagcccagctccagtcccctcccagtcctcttccagaatgcaatgttaagtttaaattcaaattaaaatcaaattctaacatccatggtctgtgatcatccaggtgtctggttgtgctcttcatttttgacatgttcaagaactgaatttttttcccaaatcataaataactaaatgagtgtaatgtctggtttctttacttctgcaagtgtttttaaaacaggaagagaatcaataaaataaaaagaaattaataaaactcttactttgggtttaaaaagcataggtcctttttaacatgttgtcatcccgagaaatgactgtttctcttcttgttttatctacagtgttggaggagacagagtttactctaccacaggctgttttctgctgttagtctgagtgaatatgctcattttcaagggttccaatagggaatatctttgaggctacttagattcagttatgttctgaaattatccaagttggcttttcgcacagcctgcagtgactaagtagattctggtcatccatcggctaattttgtgctgtacagtcctatctgcaggaaatacttgacaagaatataccagtgatcagtccattcacttcctgaaactgaacctaaattggcctacttacaagacttcatcaacaaaattcagataaggtttctggaaaatatcttttggtccaacaatctagccttgaaaatgaaatctaccataaaggaaaaagcttgacccagtgctgtatttcgtgtctgttcagctaatgtttcataaataaagaagtatttaaagtcagggaaggacttttaaaattgtttacttgttaaataccttgtcttttttacctcttatatttaaaactaaattatcaagatgtaaaccctaaagcaaaaattgtattaaatgtataaaacatttcaccttccctcctctctcatccaccttacctctttttctcttcttccgcttctccaactgccccgctttgttcatacccttgctcgtaaagcccccaaatcaacatgttagctcagtttcaaattaaggtgttttccttttccctagtggaagattttccatgcaaattccctatgtttttgtacgtgacattaggaaacatttaggagaaggctgctaaaaatgttgagataatacatccattggaaaggggtaatttctaaggttgcaagacttgctttttggaatgtggtgtaacatgttcttatttatccagacccctttgatctggaattcgtagtcctttaacaaagactgggctaaaggttgccattacatctatgaaaataatgtcttagggaatttaatgaatctaattacaagtaagttctggctatttattaattagagacttgcagacagtctcttgaaagtagttttattggcttgatttgaaagtaataaaactacataactttaggtacctactctcattccaaaagttcgataattcaaactagacttttctctaaattagtcccaattcataaggctttccctaccttagttgcagcactgagattcttctaaatcggcgcataatgggaaatttcgaattctgggagagagatcctgattccatttaatatggaattcaatttaatacttaattccccaaaatgactctaaagagtgaatgtgccttacagaggacaatacgttattagtgactgacttaaacaaagagagaattgagcctattaacctatatccctgcctcacatatgtcttcaggatgatcaagaaatcaactagcctgttttccctagatcacaggatgtttggagcctggatcagctgaggttttcttaaaagaagaaatcgtgtagcaaaatctagattttttttcagattctgtgactttgtctcaggtcagaatcctgtttctagggttgccttcattgtaaaatcagagaagagccttcccagggtacttgtgcggatcacttaatataatgacaaagcatcttggaaaaagacaaacgagtttttcaagtgaaacacggtttttaagagtggtgaaagatgaaagggttaattgtttcctatatcgtttattcaaacctgtaatttaaaaatatttctaccccatacttgcaatgtgtatggagagaatcctttttgccagttttcaccctgagaagagtgaaatcttttggagatgtcatgtctgttgtgatatccaagtttttacacatcttttgtagaaaggatattgatactgtcccacagcaaactatttttagagaaagaatcaaagcttttcaacagctgcctgaatagtgaactagaagagtgagttatctccttttcacattgatcagtgaatcatctcaaagtactaaaaaatggatacagttcttctcagaatacaaagaaacatgtctgatattgatttataaaagcaagacctcttcttaccaacaaatcatcaatgaaatatatgtccttatttattgcccagggcatctcttttgtcagctcatctctaaaaggatttttttaaaataagtagactgttttaaatgtcttcaagtccacttccaagagttaatttctgttactttttaaaatgaagtggttccttatcatacatcaaaatatgctttaattatagcttaagaaaggccaacattttaagaagaaaatcaagaaaaaacaaaaaaaagaaaggccaacatctttaaaaggatttggtccatgaagtgcccaagacaagtcatcagagataggccacagaaaagatggcatagtgtatagtagagctagctatctcaactcttttgtggaaataagcaaagtataaattatttcattcatcccaataaaaagtgaacagagtgactttttggagtgtctggtgtgtcacacctcattctctgcttagcgtggtcttactggtcaatgtactccttgccctaaacccacccctgaacatgagtcagcatcagagtatgagggagacaagggtctccccaacttcagatagactaacaatcttcctat

SEQ ID NO: 1881133 - DNA, 4001 bp, Homo sapiens
caagcatcctgcacccctccatcttgttcatctttatctgttacaagtaagcaatatttctgctgatggtcaaaatatgtgaaagccaaataagaataatgatggatcacgtgatatggtgaaggggcatggactccacgatgggttcatattccaattctgtttcttaccagctgtgtgagtgtaggcaaattacttaatctctctgagccttcatttcctcgactccaaaatggggataataaacactgcttattttattgagaggattaaatgggttaatacagacaaagcactttgcacacgataggtacctaatggatggcaactgctgtgatcttggtgtactttgcaaattgatctaatcttgtaatccaattgctgcaggtcacaggaaccttgatctgtgcttgctgcaaggatcatcaaacatagagcggagtcggcctttgatctgaatgtcaggtgactccatgacataagaaatttcaaggcacagaaacttcaaaccagccttagtgaccttgcctggaggatgacaggggcagagaaaccctttgtttcttcccttctctggattgttagattatctccccatctctgttccctgcctacttgcgtaatttccccagggacttttggtacaaaaccagaaaaccttaactcttaaagtgttgacttcaatgctgctctcacactagcctgttagtagttatttattcattcagatattaattgggtgcctaggtgccagggacttcattgtctctattaccctgcaggttgtcaaggggaggcaggcgctgaacaataaaaaaaaatatgtaatcacaattgtggtgccatgaaggaaaagaaatagggtgcaccgcaagagaatattgaagagctgtgatgccaatgattttcatgtcaaaagagcctctgcctatgtgtagaatacattggagcaggcaggaagaaggaggacaaacagttaggagccccaacagtggtcctggcccagatggtggcaatggaaatggggaatcaagactgggagccacttcccttagtcatggtaaaatgttggcttgtactttaagctgttttgtaattttttcccttttactcaatacagaagacaccatgtcatcatcacagaaaattctaatcagcagtgtggtttggggccagtgtgtttccctctgtaggtcttacttgtttattctgtaaaatggtagtggtggtgggtgttggtgtcaatgggatcaaggttctttctgcttgtcatttgaagactccaagacacattaacggtattcacaaataagagattttaagcttcaaattagaagaaggtttaacaatatggggaattagatttctccctttaagcactcttgcctccctttcacaggtcagtgaaattataatcatactttcaagcacagcctgcatgaatcaggaaggttcaaggccacaggcctctcaagccagagccacaaagcaaaactggtctctctacccaggcaccacccctagctctaaaccatgggaatctgagaggtagctggagcatgactcacctgccaacactgatagacagacacatgctgggccacagtgataccagaaccacctcgtacaaaggctggcaggaatgatttacatacctcaacctaacattgaatagcttgattgtctcacagaaattagtactaaagtaaaaacgtttagaaaataaaccttcaaatgttgcagattaggaaacttaagaccagagatgtcaactgaccaagttaaggtcacattgctggctatttggcaagccccaagaacctgaatgaagttagatacaaggagaatttcttcaggaaaattactttgggtggtattgtaaaggagttgcttgatgctgctaaaaaagacactcagccattagtttggatgtgtcagttgaggccgaggttctagttggcagagttccaagatagttgatgcttcggtgcctcttctccgaagtatttcccataatcccctggacagttccctctaagaactccactgtctcaatcctttaagtcttctggattcagggaaaccaagaccagttcctccttacaagaacgctgggaacccctaatctcaaggttggttggttttttgaaaaaaattaaaaacgtagaacaatgcaattaataatataccatatacccaggttctaggcacccagaattaatgactgttaacattttctcccaaggtattttgagaacccttttttctttagaatgactcatgcgtcataagacacaggcttaatctaccatcgtttaatcgccagattaccaaattagaatattgaactaggacaggaaagataaaatattcttattttattttttaaaatatggtacttaagtggaccacgtgatgagttttgacaaatgcctatcattacttttctttttttttctcactttttttaaaagcaacaagtcaaggaatatactcatcatgttttaaattgcatttgcaattggaactgcataaaaaggcattttaatttacataatctttttctgctgttttcacttcctgttaaaacggaataacctggggatttttattttctggtagaaaatgcacagtttcaagaaagtcaagagtaaaggttaagtttacagatttccagtgacagagatgaaagggaactacgtaactctggaaaataaaagttcagagttgcgttgcttacaactttttcatttgttaagttctaggagcaagtttgaatggggaatcaagaagcctgaattatagaaccagtgctgccagtaatgcactgtgtggctgctggcccatcactttacctttttgggctaaaactctttttgtgcttttggaataacttgtgtccactttctccttctttatgtcttttgtttataggtttgcgttttatgcactgttaaccaatcagtcctgattcctctaccacacgtagtaagagggtaagccgtggacatgaagtgatgctgccaagcttggctagtgtatgcacactgcaccttgcatgggtgccgtgagggccctggaggccatatctggactggctctggtcctgagggtcagagttcatctgctcctggatcctagtttcaccttcataggttcctctgtatatggacttgaaatgtgactttcttagtgataagagttgtggtttttattcattcaccacagatgttgtaaacccctacttttgtgtagggcaccgtttttcacttttacagaagaggttactttagcaattctttaaatgtcagagccctgtgctggctaaaaactcaacgctgtatctcacttaaaaaacaaaatcaactccaaagccatcacctccatttggtagtatgctaatgaaattgggacactgagggctgggtgtggtggctcatgccttaatcccagcactttgggaggccgaggcaagtggatcacttgaggtcaggagttcgagaccagtctggcctcatctctactaaaaatacaaagattagctgggtgtggtggcataggcctctagtcccacttacttgggaggctgaggcaggagaattgtttgaacctagaggcagagattgcagtgagtgccattgcactccagcctctgtctcaaaaaaaaaaaaaaaaaaaaagaaagaaattgggacactgaggtaagcagccttcaatccttgctgagcatttggccctaatcctctaaattcttttgagagtttagggttgggactgagggagtgggtcagcttggatcaacgccagcactctggatgtcagcagtggccaagcgtcttccttctgactctgtaaagctggagcaatcctcttattgcacaggtactggcactgtcagatagaaacgacagccctgggaggagacctgcagcactgacagtcagtggttcagacacatgagcccggaccccagtgctgtcatggacccgtgccatgacctt

SEQ ID NO: 1881134 - DNA, 4001 bp, Homo sapiens
aactccactaggccatgccccagtgcagactctgtgtaagggctccaacctcagatttcccttctccactcccccatcagaggttctccatgagggctgtgcatctgcagcacacctctgcctggacatccaggagtttccatacatcctctgaaatctaggcagaggctcccaaacctcaattcttgacttttgtgcacctgcaggctcaacaccacgtggaagttgccaaggcttgatgcttacaccttttgaagccacggcctgagctgtacttaggccccttttagccatggctggagttgctaagcacaaagcactaagtccctaggctgcacacagcagggagcccctggacctggtcctggaaaccatttttccctcctaggcctccgggcctgtgatgggaggggctgccatgaaggtctctgagatgtcctggagatattttccccattgtcttgtcgattagcatttggctccttgttccttatgcaaatttctgcagcatgtttgaattcctctccagaaaatgggattttattttctactgcattgtcaggctgcaaattttcaaaacttttatgctgtgtcacttcttaaatgctttgcttcttagaaatttcttttgccagatactaaatcatctctcaagttcaaagtttcacagatctctagggcaggggcaaaaagctgccagtctttttgctaaagcatagcaagagtgacctttacattagttcccaatgagttcctcatctccatctgagcccatctcagcctggacttcattgtccataacactatcagcattttggtcaaagccatacaacaagtctctgggaagttctggtagaggcagggggcagacaaggaagggtccccagagaatctctgacctgccccacaagtgtttataccagatgattttgtgcagctaaaggaacctgcacagggggcttgcctgggcatccccacaattaactggaggcccacatgcactgtgggaatggggtggggccaccaggaatccatgtcttatgcaggagaagagcttggcctcctcagctcctcagcttggcctcctgagctcagctcagctcagtgtggtagcctggtattcaatctgtgaggtgggagttggctggcaggaaccctctctttgctaagagctcccctttcacttaatgaatttcacccttctcaccctgcaacgtgttctcatgcctaatttttcctggttgtgagacaagaacccagatttagttgaactaagaagcaaaaaatcctgcatcagttccaaactttcccacattttcctgcctttttctgagccctccaaaccgttccaacctctgcctgtgacccagttacaaagttgcttccacattttcaggtatccttgtagcagcactccactttctgtggtgccaatttactgtattagcccattttcatgctggaataaagaactgcctaagagtgggcaatttataaaggaaatagatttaattaactcatagttctccatggctggggaggcctcagaaaacttgcaatcatggaagaaggggaagcaaacatgtccttcttcacatggcagcaggagagagaagtaccaatcaaagagggaaaagccccttataaaatcattagatctcatgagaactcactcactatcatgagaagagcagcatgggggtaactgcccccatgatttaattacctcccactgggtcaatcccataacacatggggattatgggaactacgattcaagatgagatttgggtggggacacaccaaatcatatcagtttaagtataaggtatttgactaggaccatacctttgtgatggggcatgacttcttggttgcatttcattttgtcctggcaccttagtagttaacagctgctgactgaatggcagccagaagttcactaccaacaacaggtgcatgagtgccaccacagtacggatctccgcctggtccccagctgtcacaccaacctcattgtgagtgtggaatgtttaacaatgcgtggccatgcataccagtcctgagggagagagagagaccaagcatgagggagtactggtgaggcagccagctgaaagagcaagtgatgactcagaaaagcatacagagccgttggggtttcttaacaggcactcactgcacctaggaaaggataaggagaaatttaatggaccctgctgggtctgttgctatgtaaatctcatctctggggaagtgactggcacaagaatatcagatgtcactggtgcagacatttggcagatgtgccttgtatttaccagcgtgcaacctgtgagcaaattccaaatgtgtgagcttgggagtgtgggcagatgggtatggatatgtgcatatgccacttcttacatccactgcccacaaagcaggagcaaggtttaagaggtgaaatttgacatgacatttggtgtgcactgatagagacagtttaatttttgcaaatactcattgtcagctgcattttagaggcaaacaccccatccatacacactctctcacaaatatgtgaaatgaatcaaattgcccatggctcccatgggaaaaacgtgctattactctgtttccaaagcagttgtcagatctctggtgatacctcaaaccagatacttgcatttatgtgacaaggactcttaaaaagcctgatagcttgttccaggggaagggaaataaaatagataagtggagtttatttaaagttgagaggaacagaaagacagaatatttatattgatatgtgatattttatccttattatgcatttttatcctgtttggtcaatggacaaatagtgctgaatgtaggactaatcttaaagaaaatgcccagagtacttgaattgtattgaattaaattgaattggatcaaattgaatcaaatagattttgtgagtgctcacctatgtccaagaataggttatttaagactgatcttggatatagaagagacagccttagcttgcagtgtggcacataaagcaaggaggaaatgagatttatgtctgtcctgggtaagagctggtagaaagcaaggggaagtctcagtcttcaaggcaagatcagaaccaaagttaagttaagatcagaagcacagtttcagacaggaaatatatctggctgagaaagtaatttggaacttagaggctggggaaaatcccagaagcccggtacccagggataatgttgctgggggtaggtgtggatattagggtagaacaactgtgatatctagacactttggtcaggaattgataacaaggaaaccctaagatacagactatgcaacaccagttgtagaccatcatggtgaccaatatttcctgaactacaggagcagtggccaagggaactattagggaagatgaaataaaagcaagacatggttttgtgccctgatcgtgaaaatccctgactctttcaatgtacatagcaaaaacattgtaaaatgtttagatttcttttgtatgcagtcataaaactgaagcagagaagccaagaaaaacactattaatattaaataagatgattttcacataaataattgccacattattttttgctgtttattttcatattcacaagaaggaatgcatttgaaaatgaaggtggagttctgctctcttttgctaagtaaatgacagaatcagatgtctctcatgctcttgaaaagatagtgaatccatcctgccacctcaaagttaaattgtataagccccagcataaaagtgtgctagactcattttaaaatctccatcactgcatgaccttgagctaactgtcacttcatcttctaaaccttccattttctttcttataaaatttcctaagagtgattgccagcacttgctcagtggtcactgtgtgccaaatactgttccacatattttatctaaattcttccattttaatccccatcattacccaaaaaactcagatgaaaactat

SEQ ID NO: 1881135 - DNA, 4001 bp, Homo sapiens
aaaccactccttcctgccaggtccagtgttgccaggtgcccacagctgctcacagagctcaggctctgccctgggactccccagctgatgagctgcaggccagagaagcaagaggggaacagccgaggccttcagggagactgagtgcctccccaccacctgtcccctcccttctcacccaacctccagccctttctgcagcttgactgctggagctaaggccccagcaaggccccatagggccagcatcactacctcagtcacgctggccacaccctctgtcaagctttggcttggcagtgggcctagcaatgtcccatgcagctctctctgccaggcttcttccagcccgtggaggggtcccttctccccacctccccttcccctggctcctgatgctgatgcctaagtgatttgtcccgctctgagcctcagagtccttatccaaccaatgggcacacagcccctccctaactaactcctgggccggtgctaggatccactgtgagtcagatgaggaagtgggctggggaggaagaggcagaaggcagccctcagcgggctagctggtcagaagcatgtaagctgctctggcctggccttaacctggggcctctgggagctgggccagctgtctgtgcacccatgcaggtacaggatgtctgcagcagctgccaggggcttccagatgccccaggtttggcccctgagacattttctccctagctctgggatagccttatcctgaggccctacgtattctggcagagagtgggggtgggggaggaggcccttgcaatcttacaggacagaccatcaggctgtttcacagcacctgcctaataccctggtctctcctccatttctcctctggcacctagaaccaagtcaccctgagccagcgccagagttcctgcccactcgtgagtaggacaacatacccaggagatactgctgcagctggacatggacttgtatgtaaacacaagcgcacatatgtggggaggggtgtggaatatcaggatgggggcaacatgagagtgacccaggatgggcagtagtgagcttggggtaggaggaggggatgtccacagaggcctctcctctacaatggtggcccagtcaccatccagaccttgccaggtctagtgccccgtggtccccaccctgctgcctgctcagcctggcagccttcctttacagcctcctgccaacagagccagccccctgcccccacgggtgtccatgccagagcagcattccgcaagcctggctgcatctccccagcagaggctgagcaagggggccactcagcagtggtcaggtcacacggctagaggggcacagtggggcctgggcctctggtccctactcctctggtccctctgtctcctggccctgggccagtcaccttagatgatttgatcgctgcggttgtagtcctgggatttaaatctcctgccctgggtggccctatgcagcatgaggccgccaggtaggtatgggtccactggagccaagtcctggaggcacagagcaaaatgagccctgcgccgccctgggatagggatgggggactggaccagttggggaccccagactcacccccaggtcagagcagcccaggcgagagggtgggggtggtgagcgcggctggggtgcggggttcagtccctcagcgtgggatccctcaggggagcgggtggaagccttttctgttcggatccggggcccggcgcgctcagcttcctgatttcacggcagcttcctatcctggctccccctccgtggcgcaaccggagggcagcgatgtttgactcccggacgaacttcccggcagaaaggaggctcagcacgggagggtggggccggggtctatctgctcggatatgagcagtggggacgggctgggggctggagctggggctgggggtggagggcagcctgcggcagggcgggctgcacggggaccgcgcacaccacgcgtgtccgcgccccccgccggcacgcaggcggcctggccctttaagcgtccagacggcggccccagctgacgcgcgggctccaatcggcgccccgcgccccccgcccgccgcgcccgaggctctggggccgcagctgcttggcgctggactcgccgcggccctgcgcctccgcctgcctggccgcgcccccgggggccatggtcgcggggccctgcgcgggggcggcccccagcgcggcgcttcatggagcggccctggcctggccgccgggggcagcgcgatcccgcggggccctgtgagcccccagcgccacggcaccatggtacgcagggccctgcctgtccccccgcttatccgcccacctgccagctctgacctcccaggcacacggcccgcgggcccgggtggaggggctggagggatcttcccccctcccccggtctcccggctccatctgctgggtcccgcgggccgggaatgcggcgctgtggcgctgctctcggtggggagggggttaaattcctgtggtgggggcgccggcgcgcgaggctgaggtcttgctaggcaccggcgaaggggggcgctcccctgcgcccggacggcgccgccctcgggctgggtaatggggggaagagggagtcggattcccgcctgggccttgggccacgtgggcgctggagccgccctgcctggggattcgggatgacccgggccaagggggtgtgggaggacacccagagctcccgtaccaactcctgtgtgaccttgggcagatcccccgccctctctgggtctatttccaagggaaagaggggaggtaagtgcacagaggaggctggcatggacactccctcaccaaaaggaggagcctagaggtcatgagcctgtgcccccttgctcagtctgggcccccccactgctgcccagcatagaaagaattgacatgggaggggggcgcagatggactccccaggtttcatcatggggccttccagggaggctctgaggcagggtagagagatgaggcttctcatcagtgaggcaaggtacccctcaggtgtagaaggctctgacttgggtgagcagcctggagagatgtctggcacctggccaatccccagcctgacttggggcaagggtttgagggcatgaaaccccctggcaaccagagtgcctgaccacctccctggtcctgcatcttagctaggctggagtgacctggactgcagctggcacagccggatggggaggggcacgcattgcttccgggaaccagcacatctggctgtggaggccagcacagctggtgggcattgtgtgggaggggccagacatgggggtggctgaaccctgctgaggggctgccaattgtggactcgggcagcatctctgtgcccagtcaagagagtccaatcaggtcatgaggtttagggccccccaagggccaaggatggtgctgccttggctgagagtactaccttagcaatggagtgtttgagaaagcactcccctcctttcctgctgagaggccagagggccaaagtcaggcctcatttggcctagaggccaaagtgcacatgggaaggttgccctttccctgtggcaggtgggcacaggtgggcagtggagggcattccataaagggagagcagagagatctggggctctgttgcctggggtggacttcccccaacaggcctggcttcagcaaacccttatccaagccacttctcctgccagtctttggcccctggaggccctaaggagcccctgttgcaacccaagttgtaccctgatccttcactgacctgcaggtgcagtggctctagggaggagggagcaggtagaggggatagtggtgagtgtggggaagcacggctggtctccaggtggcgggatgttctcgctttttaagtcattaaaggctcagaaatccagccatgtggggtctagcaaggaaggggtggtcttagcggagctgggagtccaggggctctggactgtggaaccctctca

SEQ ID NO: 1881136 - DNA, 4001 bp, Homo sapiens
gagtgatgagtttggtcatatagatgcttatatcatacagatatttttatatcatatagatattttaaacactgaataacattgcaaaaacctttgaaagcaagatgacacctaagaccaatggcttacatataaggcaaacattatcaaccgtgaattgaatagtaaatgctactcctgtaccaatgaatggtgtcatgcattcaagtaccaggtatggctttttctgctatgacacacaacttcttaggggcagataatcacataacaaaaaacatattatgtaattagcattttcttattaaaaaataaattttaggctgggcatgtcggctgaagtctgtaatcccaacactttgggaggccgaggtagatgaatctcttgagcccaggagttggagaccagtctgggcaacgaagcaagaccctgtctttacaaaaaataaaacatttttaaaaatcacaaataggccaggtgcggtggcttacgcctgtaatcctagcactctgggaagtcgaggggggtggatcacctgaagtcagaagtttgagaccagcctgaccaacatggtgaaaccccgtctctactaagaaatacaaaaattagctggcatgttggctggtgcctgtaatcccagctactcgggaggctgaggcagaagaatcgcttgaacccgggaggcagaggctgcagtgagccgagactgcaccgctgaactccagcctgggctacagagtgagactctggctcaaaaaaataataataataaataaataataaattttataaggaaaaatatccctagtatatttttccccaccaaggtctacctattaatatctcatataactctgtgcttgaaacacaatttgggatatattgccttaaaatttactttgactagcaattcagtgttccttttttaaaaaaatctgtactctggagtaacagtgttctaaaactgttgaagaacattggttcgagaaaaacatttagaaacacaaacccctggaatgtgagatgaaaatccgagctaaagggagaaaaaggacgaaagaaagaaaacacagaaaagaaagaaatacagtcaagtgaaactacgaccacaaagaggaacagatccatctcatttaccattggggtatggacggacgtgcggtgttcgagaagactgttattggtcagagttttgctctagaggacaagtaggactgtaacatctctaggatgggtcacttcccaagccctctattacttaaaaattcaaggaggaaccgatgctggagtacttgtatctcagacttctaatcactgctcctacgcttttccaatattacaacaaaagaccagtagggggagaaaaacgcacagtaccgaacccttatcagtagtaatctcaaaagtcaacagattgatttactctcaagcaaacagacttctaaggtacgcagcaccaagacactaccttgaatcaaatctatagcctatatgacatttctgaagtctctgttggcattacgcgaaaaatcccccacgtcttctgaatagttagaattgaatcctacaagctgcttcgaatcagaattcgatttaaaaaaaaaaatgagggcatagcaaaaggtctccacgaagtgagtcaaaggactgcagagggctgtgacagtgcattccgccttcgggatggtatacaacttaaaccatgtcggcagaagaacgcacagcaacgctttgtaaaaagcattctttctattatagaatccataaccacgctggttagccactgacagcggcggttagccaccgcacctcctctcacccccgaactaatctcgtttcctctatgggtgtaaaagtgaaataacccacttgctcccaatattcctttctatatctctaccccagctcgcctgctgctcgtagaaacaaatatactacacgtacgctgtcctaggatgacacaacaccctcactactgcagaagacggatcattaaacaaacgtcagaagagcagccccaactgtacataaacttcgggcggaaaagcaagacgcaggcgcagtagcacatattgttaccctatttgcccactccctgctcctcctcgcctcaatttcgcttccgcttctttgcgcatctgcttccgggggattgtaggctctgcccctcctcagctcttaccctcttctgccggaggagggggggggccgagggggtggggaagagttcgttgtttgtttacacgatgtgagcggaaaaagagaccaataaagtttattctggaaacaaaaggaaaaaaaaacaggggcgacggagaaaggagtcgggggcgggggcgtgtggcgggggctagcgaggagagggagcgagaagtagaaagcggcagttccggtgccgccgctgcggccgctgaggtgtcgggctgctgctgccgcggccgctgggactggggctggggccgccggcgaggcagggctcgggcccggccgggcagctccggagcggcgggggagaggggccgggaggcgggggccgtgccgcccgctctcctctccctcggcgccgccgccgccgcccgcggggctgggacccgatgcggttagagccgcggagcctggaagagccccgagcgtgagtagagcgcggactggccggtagcgggtgcggtgggaatggggaccgggtgggtgccggagactcccgggcgcgcccgccgtgttgggcggaggctacgggctggtcgtctcccagcgtcggcccgcggcggagttcgcctgcgatcgccgcaccctctccctcgcctgcctctggcctctcctagctgcagaggcgagggctcgccgctccctctcctttctctctggctgccgcctcgctcttcctttgcttctactcccagttttggggacggggcggctggaggttgaggaagtgcgcccagggccgccgccccggccgcggtggctctgtctcccgcgccctgcacgcccacccagcccgcgggtggaggggctgccgcgaggactgcggctcaagggacgcgggcgcgaaaccgcgagcttttcttgaggggctgtcacgcccgaggactccggccccgccagcctggcggccctgcgtttgcctcttactgggtttaaatcgcccggcaggggtatggaaggaacaccgctcccctcacccccgccagctcccctcccacccttcctttcgaggttgttttttccttttagctgagacaaacgcttagatctttcattcatagacctgagacactgactcatgtgacttgtctctttactaagtgtattatgtgatgcctgttccatggctcttaagtggctcggaaaggtagggtagggcccgggattgggctatgtaaacaccagacgttcagccggcgtgtttttgacctcggctcgaggggtttattttaggatgctaaaggaatagtgatggtggccaaccgtgttaccagacttgggaatcgaaagctatttttttatgtcaataattgagactgtttacatggttaaataaagggtagggtaaagggagcgcaacaagagggtctttctagaaaacagtctgcatattctttaatgaattagagttgtgatttcatcttggtgaagcttcctcattccagcactgcgcctttgtgcacatgcaggacctgggttttcggaacgatgttttgaatcatagtttgtgtggccggggagaaccccttagaatacttgggtaggtaaattccaggttatctcaggggattatttctactgcgacttttgaaccactgagggcaatattggtcatatgttatcctgcttagaaattgaatttttctgagtatttgcttacattgcaccgtacaaaatttgtttatgtgctggattgcgtgttttaagaaaacttctggaaaatactcaaaataccgtgttgctaagttagtttggataaatcaaaacactttgctttcaaagcaactacagtcttaac

SEQ ID NO: 1881137 - DNA, 4001 bp, Homo sapiens
taagctgcaaaaatatttgttataaaccatatttagtctgtaaatgagtgtagcttataaagatgtactaagtttatagcgtgtgatgtttcatccaaataatttttatattttgataaaatgtaaacaagttatagtgccataataaatcttttcccagaattcagaattgtttgcatctccattttaggaagttcacattgcttcattaaagaagaaacctggaatcattgtgcacctcaatttgttatgcaatgaatcaagttatcctttattcttccagaagtcagttattctatgaattgtggccatataaacttttcaaaacacatacatatatgaaaattactactgacatatctgctgaataaaatctctagtatttgatattccatcttggaaataacacattataattcaataatgctagttataaagtcaaaacaaaacaaagaaacaaactttcagcattgtaaacagatacacacatttaaaaatctattagctatacaaaaagtttttctttgttctcataaagaaaagctgcctctggctacattttagaaagtcagtgcctgagaaaatggataatgttttgatccctagagtaaacctaccttctaaatacttaaagccctttgaaagcacaagataatgatgtaattgtatcctttttgttgcatggaaacgatcaagctttattaagttctgagttaatatcaaccctggctcttaattcccttttccaatattagacccccatatgtcggttttcgtttctctgcctgtgataggtctgtctgctacatttgtattttaagtagatttacaacacaaatattcatatcttttcttagtataaaattattttcttcagggaggctttacccagagacctgagaaaattgaagtttttgtttttaaagtatttaaggattatttaatttttacatagtatgaaatttttctaattgggatggaaaggtaatattttggggggctttcccattataccatatctagtctcaaaaaatgtaataatctggtaaactcaaataacagaaagccaccatatccctttacagtttataattctacttctttgagacaaataacatagggatatgtatgtgtttgtatacatattatctatatatatacatatacatttgtatctatagatatatagagagatatagattagtgccacaatattaattatcctttacgtcagttatggattatcctttacgtattaattatcctttatgtctgtatttatggggttcttcagttaaaagacacttctaaaactctattaaaattatttggtctcaaaaacattgaaagttgcaaaatgtttttttcatgaagtttataccatctccacaaaacagactgggtgaattactgttatgtcaagccactggaggatttttagatattttgcaacatttttactctttttatcccaatccactcaaaaatggcaaagactccagagatcacccagcaaaagccctctgtgggagttggatcctgcttctaatctctatcccaaactcctgtcattcaaaatatttaggaattatgtagtaataatttataaatgaacgtagcaggcaacccatagtgtttttaaattgatattacaaaaaattcatgtcatgttaatttccttaaaacatattatacatataaaatactatgttaaaattaaatgtaatatgtcagctgtaaaggggaaaaagtagctaactaaaagttcacaaataatcttttttcagattttgtgtgttttctcctcagccaaaagcctcaagattcacttgcagcagcctacctcttcatttatgttggattgctctttaaacattagaatatcttgtaataaataataagttaaagatctctcctgacacagtcattgttgatttcactgttatagggaaaaggctctagggcggcagataaggctgttgccatggtgatgaaggagataccgagggaggagtctgctgaagaaaagcccctccttactatgacatcacaggtgggcagacccatagggtttctgtaggaagctgacatatgttaatatatcagacattgtgatttttaactagaaaaaaaaaactttaactcttgaaccaatttttttaaagacagtttcaatgaaacaattatacaaatatagatgaaaaccaaaattgctaaaaaaagaaaaattcaccatctagttatttatttgtgaatattaatttcattactcaactttagttaagacaaaagagaaagagaatatatgtgcaagtaaaacatgttgcttctttataaaggagtcttgttaaaaactttgggaaagaaataacaattaagctaacagtacatttgaacaaaaaaaaatcaaattcctatgaataaaaacaagttatattgtatacatatgtcagtttaccagtagaatatctaaattttcttaaatgttaaatatatttatgttgtgactatgcatactacatatatgtctatacatatttatgtggataactaatttacaggaatgagccagaagtccctgagtccccatgcagaaaatggcatttgtgacccctcttatacatagtgaccttgagaacaaaaatgtcatctctattataagcacatgagagccattttcagcatttattataacaagtatagaaaaaagtcttcatttgtatgcaaagacatgtggagactgtgaatcctatatgtcctcggggacttttgaaacaccctgtaaaatctacataaatatgtataatgtactcatcaccactctgtggaactaccagttttaaaatcgcaaatgagaaatatttttacttgcatttatcttataatttagattagattattttaaacatttcattttttccattcagttccgattatatgattcagttccgattatatgaacatgcctagaattcgaaaaatgtccatttacagtcctcatgaaagacatttatatcaaaagctaaattatggcaacttatttttagaatatcagcggatctcatccccagctgctgccaacatgtgtggttttactttattctaaatactatgttgtaagttataaaaattataacatataacatcaaaattaaataatttttaaagctattaaagattcccaagactttgggatacattttatgttttcagctttttttatcccaaaagaagagatgctacttcctaataacacatggtaatcattggaaagaaatttgcttgatatttaccaaattcctcattctttacttaatatacatagtaaaacatatacagttttacactgaatcagagtcagacctctgtagactcccatgtccaaaattttaagtccacagtccctcaggtgaatgctatggaaggtgagaactacttgaagttcttgcttaagggcagagccatacaacggtagataagacctaaccaaatttgcaattggcacagttgtactgtaacatatcacctcaggacttcacaatctagggcaggttccagtacccaagattcttttttcacaaaatcacgcattgctgtgtactttctgataatcttttcacatgtccaaaattaccattataacctaggcttgcatttaaaatttaatgcaaaataacatttttgatttttaatttagaaaagaaattgtgattattaccattttctcatatccaggacatttgtttgtaccaagttcttcctttaatccctgtctaatgttgcattaactgtttttgaggtattagttacactttactgcatgaagattacagaatgctttatctgatgcatcatattcttgttgcatactggccggtttatgaatcagcaaacagagttctgattcaaaaaatttaatgcacctgttgtgttgatagtattacagaattaatttagtgacagctgtaatacaattatttctcagtcaaatgcagttttat

SEQ ID NO: 1881138 - DNA, 4001 bp, Homo sapiens
ataatcaacttctaaaatgtcactattcttttccattgttgctgagtggcatagaagcatatagacttaatgttatctaaagtttataaactgcttatatgcttgaatgtatattcagtgtatattttattttgtctgtcttcatgttgtctcacataatagatgaaaaccgaccctttggtgtggttatattttgaaaactgagtttgaagtctgaacaattacatatatatcttacaatgtttttgaaaattgagtctgaagtctgaacaattacatatatatcttacaatgtttttgaaaattgagtctgaagtctgaacaattacatatatatcttacaatgttttaagctactgccttcaaaaaagaaagaaacctgcacagttatattgtcatcagccctgcagagctgctgataagcaaatttgtaaagttccatgaattgccaagccaattatcagtcaggttctgatttctggaagcattatcccacgagataaatagacaagtcagaaataacacagcttgattttaagataacaggtggaggaggcaatttgatttgggggaaatcttgcattgatacatgagtgtattcacttgatttggcagtggttttagacactgtatctggtaccatggagatgtcattgtggcagaccttcccattctgtcctcagactgtaccgcacttgtaaaacagtgacgctcatggggtattatcgcaaaagccaaaaaaggctgtaaagaaaaaagttgctagcaggcactaacatgggtgtgtcatgactcttttcaggtagtaggtgtaaccttgaagaaaaagtggcactgtcttcaaaaaagtgacctgaccctggctttggtgggttttttctgcaagaaataaaaagcaccgcatgtatttattgtacatcctttctagctgaccactgctttgttctagagttcagcatgaaaggactaatttttgttttgtttttgtttttgttttagtgaaatggcatgtcccttgctaactctagctattatagttgcacatgtaaaaaagtatctctatgtagtttatggattggtagcatttcaaataaataatgtactgaaaaattgacctgaaattttttgagatgcttatcaattgacattttttcttagcccaagaaaagaatctaaattattattttcttaaattaaattataccttgtaacattagatttgttattttaaatataataggaattgaaatataagcatgccactttgtttattgctatattactagaacttactgaagcatggaaagaattcttcacaaatgactttgctctcttgaaaaacgtaagctgcaaaaatatttgttataaaccatatttagtctgtaaatgagtgtagcttataaagatgtactaagtttatagcgtgtgatgtttcatccaaataatttttatattttgataaaatgtaaacaagttatagtgccataataaatcttttcccagaattcagaattgtttgcatctccattttaggaagttcacattgcttcattaaagaagaaacctggaatcattgtgcacctcaatttgttatgcaatgaatcaagttatcctttattcttccagaagtcagttattctatgaattgtggccatataaacttttcaaaacacatacatatatgaaaattactactgacatatctgctgaataaaatctctagtatttgatattccatcttggaaataacacattataattcaataatgctagttataaagtcaaaacaaaacaaagaaacaaactttcagcattgtaaacagatacacacatttaaaaatctattagctatacaaaaagtttttctttgttctcataaagaaaagctgcctctggctacattttagaaagtcagtgcctgagaaaatggataatgttttgatccctagagtaaacctaccttctaaatacttaaagccctttgaaagcacaagataatgatgtaattgtatcctttttgttgcatggaaacgatcaagctttattaagttctgagttaatatcaaccctggctcttaattcccttttccaatattagacccccatatgtcggttttcgtttctctgcctgtgataggtctgtctgctacatttgtattttaagtagatttacaacacaaatattcatatcttttcttagtataaaattattttcttcagggaggctttacccagagacctgagaaaattgaagtttttgtttttaaagtatttaaggattatttaatttttacatagtatgaaatttttctaattgggatggaaaggtaatattttggggggctttcccattataccatatctagtctcaaaaaatgtaataatctggtaaactcaaataacagaaagccaccatatccctttacagtttataattctacttctttgagacaaataacatagggatatgtatgtgtttgtatacatattatctatatatatacatatacatttgtatctatagatatatagagagatatagattagtgccacaatattaattatcctttacgtcagttatggattatcctttacgtattaattatcctttatgtctgtatttatggggttcttcagttaaaagacacttctaaaactctattaaaattatttggtctcaaaaacattgaaagttgcaaaatgtttttttcatgaagtttataccatctccacaaaacagactgggtgaattactgttatgtcaagccactggaggatttttagatattttgcaacatttttactctttttatcccaatccactcaaaaatggcaaagactccagagatcacccagcaaaagccctctgtgggagttggatcctgcttctaatctctatcccaaactcctgtcattcaaaatatttaggaattatgtagtaataatttataaatgaacgtagcaggcaacccatagtgtttttaaattgatattacaaaaaattcatgtcatgttaatttccttaaaacatattatacatataaaatactatgttaaaattaaatgtaatatgtcagctgtaaaggggaaaaagtagctaactaaaagttcacaaataatcttttttcagattttgtgtgttttctcctcagccaaaagcctcaagattcacttgcagcagcctacctcttcatttatgttggattgctctttaaacattagaatatcttgtaataaataataagttaaagatctctcctgacacagtcattgttgatttcactgttatagggaaaaggctctagggcggcagataaggctgttgccatggtgatgaaggagataccgagggaggagtctgctgaagaaaagcccctccttactatgacatcacaggtgggcagacccatagggtttctgtaggaagctgacatatgttaatatatcagacattgtgatttttaactagaaaaaaaaaactttaactcttgaaccaatttttttaaagacagtttcaatgaaacaattatacaaatatagatgaaaaccaaaattgctaaaaaaagaaaaattcaccatctagttatttatttgtgaatattaatttcattactcaactttagttaagacaaaagagaaagagaatatatgtgcaagtaaaacatgttgcttctttataaaggagtcttgttaaaaactttgggaaagaaataacaattaagctaacagtacatttgaacaaaaaaaaatcaaattcctatgaataaaaacaagttatattgtatacatatgtcagtttaccagtagaatatctaaattttcttaaatgttaaatatatttatgttgtgactatgcatactacatatatgtctatacatatttatgtggataactaatttacaggaatgagccagaagtccctgagtccccatgcagaaaatggcatttgtgacccctcttatacatagtgaccttgagaacaaaaatgtcatctctatta

SEQ ID NO: 1881139 - DNA, 4001 bp, Homo sapiens
tctggcggaagcaggttccgtgcgggccctacagcagcatccaagcccctgtcctctcggcacctgagttcttgtttggcatccaggaagaattaggtcacccacacggattgaaaggtagtgtatgtagaagattttactgggtaatggctctcagcaggatgggagttggaaaggggatggtgcggaaagaaagtgatttttccctgaagccacaccatctgaagttagcggcgtctatctgtagtctctgacactcagttgctgcttctctgcttgctgcgcatatacccggcgctcagccgcttgtgttgctctgccagctgaagtcttttttatatgggcacaggataggagcatggcaggccaaaaagcaacatttgagggcaaaaatggggtgagctgttttcacacagggctgtggttccaggtttaagggtggggtttagccaggagccaagccgttctgtatcatttcccccctctgaagaggcacatctaactgccattaggatatggacaacgaccagtctttccgttgtttaacgaaagcggcagttggattcctcccagaagtctacccaaggatccccagcgaaagggagccatagtccgaggctctggctgcctgcctgtttggagctttgatggcctcgaggtgagagaaaaaacaagctttacatggccaaatatgcatggatcaaacatgtattatacaaggaaagaatctagtgtgaaatattacagaaataaaaagtgaaatatactagtaacattgtaccccaagctgtctcacgctggtgaaagaaattaaaccttgtatgggagaagttaaactttatgagagagataagtgctcttgtcacatctgtggcagttaacaggtgaacctgaggaattctggggtctgtgggcttgcatggtggtcattaaagcttctgcctcttccttgtgtctaaatgaccaaggtggctactttcaggaggtcccctaaagtactatctggtcccagggtgcatttctaagtataaactggaggtggtcacgtttgttggttgcccattctgaaagacagggaatttggcgtctctcattccctttcttctttcagtgaaatttcgaggtgtgagggagaaagaaagcgggcattctccctttctgttctttttgtctgagtctcggcaaccttggcaggtgccacccatgggtgccaatgtggcttgcacccaggaagcagggagggcctagaaaataggaattacgcacactcatctgtgcttctacctcccctactgtcgacaacctttgagttccctgggcctcatttataccatggagcatggcttccttgcatgaagcggggggttaattggcaggaatcggtcctgcccatttacactgggactgttgcgtggcttcggttccctcagatctggttttcctttctagggcctcaacctgaagtttagaatcaagtttgagaccaaaaaagaaggtatttcagaggctgcatggattcatttagatttaagtcccacatggactttgccaaatttgcagttatcagccaggaggggttgctcctctgttgcctccctaacataagcaaagtgctgaggtaggaaaagaatcctctcgcttagaaaagaaaaaaagcttcaagtatctctaagttggggggacctgagggaagagcctcttgctctgttgaaatgggtttctttaatcactgtatccctcccctggttcagacctgctagacctctgtgacgggaaacaaaaccaacattcctttcacctaaaggaaagagagagttgccacggtcttggaaaagacacagatccaaaagttcctcattttaactcactgtttttcatatcctggacaggcccccagatgagacaggattgttcccttcatcttaacccccttcgtgggcgggaactggagcagctcatttcactcagctcgcctcctgccactcctggcggcagagcgtgcgagtgcgggaaccggagcgaccgaatgctggaaccggccggtcactcctctctggcgggaataggctctgtgcgggcctcacagcagcgtccaagccctggcctctcggcaccggggtacctgtccggcgtccaggaagaattaggtcatatgaacggattgaagagtagtgtatgcggaagatttgattgagtggtggctcctggtgggatgggtactggaaagcagacggtgaaagagggtcatctttccctgaagccgcaccatctgaagttagctgcgtctatctgtagtcttcaacactcttgctgcttctctgctcaccgctcagccgcttgtgttgctctgccagctgaagtcttttttatggccacaggataggggcgtggcaggccaaaaaaacaacatttgggcagaaaaacagggtcagctgttttcaaggccgtgattccaggcttaagggtggggtttagctgggaacccagccattctgtatcagtgatagttgcacaactataaatatactaacaaccattgaattgtgtactttaagtagattaaccgtatgatatatgaattacatctcagtaaagttgttttttaaaaaatatgcatataccttagtctagccgttccaggtcatatactacagcgatagtaacaaagatataatatgtggtttataataataaatattggaaatacttaatcttgcaaatgcatgatcagtaaggtagtggaggcaaaaactaggtttcccaggagcttcaggcttctcaacttccaagtagtaatctcaaggaagtacgtactctgactgaaactgtttatgtcacagacctactccttagaccaatcactgttcccatagagatagctcattatgatttgtggagtcagaatcatgtgcccactgctgaaatcaggaattcagggtcctgggagagtcacccgtgccacccacctaatgttttctggaagtttgactttaaaaggaagaagacagcaagagatcaatatagctagagtgtggagatgaggtgttttctttaaaatagaggtgacttgaacacgtttaaatgcttgtgcaaagtagccaatatagagggagcagttaaagacacaaaagaaatagaatatttctaatcaatagatctcaggaaattattatttcccactatccctcagaaaattatattcaataaaggaatttgtttctggctccttggaggattaactttccttttcatgcttaggcaatacaaagttgaatcaccactttaaaccacattacacagactagaaggtgaaactccaatgcccaggccattatgttaatcaatacttcaaccttctttttttttttgagacagagtctacgctctcgttgcccaggctggagtgcaatggcgcaacctcagctcactgcaacctctgcctcctgggttcaagcaattgtcctgccccagcctctcacgtagctgggattacaggcatgcgccaccacacccagctaattttgtatttttaatagagacggggtttcaccatgttggcgaggctggtcttgaactcttgacttcaggtgatccaccagcctcagcctctcaaagtgctgggattacaggcgtcagccaccgcactcagcctcaaccttcaataaaaataggattccctccactcactcctttacccagttagggtgtaattgtggcaggccatctatctgtctttgcaaaagggaacatggtaatctttgttttgtttgttcacctcttctcacattctcagctgctgtagctgacccctcttagttggaacacgaggagggaggagaagaaagggaagcagaaagttcttccttgactggtactattttaagacggctttgcgctctctggttttggcagatgtttaaagctgagtcacacttaaagctggtttcatggattctttggacactatcctgcaggacccttccaactacaactcctatgac

SEQ ID NO: 1881140 - DNA, 4001 bp, Homo sapiens
ctcaatgtggagtatttgctttacttcctgtgcaagttttctccctttttgaaaaaatcacattctctcctaaattagaaaacctctttaattgttagcaggagctggggttctgttccttgcatggacaatatcattaaacatcggaaaataaacaaactggaaaagcttaagacattttcaaactctttgcttcccagagggcgtctggggccccgggtgggacaaggttctgctggcctgggtttatactgtgttgataacttgacccctccagctgtgagaagccacactgacagcagggttgtttttcctaaacttcccaggactgcaaacttgtcttgggaggcataggcactgatttgcacggaggtctccagcgactgcgctgagcttcctccggggcggagcgcacgctgggagggggccggtggctgtggtggctgacggctgctgtaaaccatcgctgtcctccagcatgactacacagggctggggaggacaggggagctgtgggagggggcggtgtgtgagaacgtttctttctatcttgctgaaatgtgagtctaatgaaatgatgatgaggttgtggcctttaagctccattgagcttcttacgcattgtaattttacccagagtgggtccagtttttgaaatgattaaaactatcgattcctaggcctgttcagcttgaatcagaattcattagaggcccagaggtgagggatgtacatttctcccttgctgagccaggaaacagaccccatcttgtgtgactctccggctggcgtggctgcccctggtggtgctggcagacggaccagtaataggatctgtcatccgcagaataagtcatgaaggtcccatccatgagtcctagcccattttctagggattctccctcatgtttgaagagggaggttctctatgtttaatcttggctctattttcttacaggtattataagtaaaatatcttcttcatgaaaagaaacacagaaatgttccaaagttttgactcaaaagaatactggaaggagaaactgtagctgggaggggtggctgacaatgtggcctgaacttggcctccagaacgccacttctgtgtggaaacaaagaggggactttccctctgatatttgctaccactctgctgactcccaggagcacaagatcgctcctttaaagctctattccaagtcctagagctgagataggttagcatcttaaaaagtagccttcctagccgggcgcggtggctcacgcctgtaatcccagcactttgtggggctgaggcgggcagaccacttgaagtcagaagttcaagaccagcctggccaacatggtgaaaccccgtctctactaaaaatacaaaaattagctgggtgtggtggtgcacacctgtaatctcagctacttgggaggctgaggcaggagaattgcttgaacccaggaggcagaggttgcagtgagccgagatggtgccattgcactccagcctgggtgacagagtgagactttgtctcaaaaaaaaaaaaaaaagaaagaaagaaagagaaaagaaacataactatagggcagttaagtctatacaccttaactttaagaagaaagaaagaaaagaaaggaaggaaggaagggaaagaaagaaagaagagaagagaagagaaaagaaggaaggagggagggggagagagagagaaaggaaggaaggaaggaaaagaaaagaaaaagaaagaaagaaagagagagaaaggaagaaagaaaggaaggaaggaaagaaagaaagaaactctgggagggtagggccttgcttaaggtcacctgattccccgagctggcgccagggctgcggtgcactgtgttagctctgagaggggtgtccctgcccacgccagctctgaatcttgcaagccactgcaccttttgagagttgctcccgaactgcctcctacacaggtggttcccaagcggttcatatcaaggtcccttttattatcacccccccctccaccgcacccccagcacccgggtttgaaagatctggcctaccaaatgaactgtaattatgcagtcataatgactctattttctctctctctttttttttttttttattaataaaagacatatgtgacacaccactcagagctttcagtggggagaaaacgagtttcccccactaggttaatagaattccacccagaggcagacagttagcaaaccaccttctcgggctgtggctgggaatcgcgctacacttgacagccctttccatgggcctccccggcccgcctgccctcggccccgaagtcaggggagacaggggccatttcagctgctcgcgctcgcttgccttcccgtccctgccggagtcagcagaccctgacttctggagaagcgttgctgcgatgtgtcagctgctcggggagaggctggagtgatggattccaagagctgtcaggagaaagggtttacggtcagttaggaaccgcgagctcctgcccgtggaactgccgctggaattttaatgctctgtctccctgtgtctgggcacttccttccctcctggccccgctcttcaggcatatggaacagggctcatgtcggagggtccctggggagatcccagggcttccctgggtcccagtgtcacggccgaaagccagaggtgcggctccgacaggatgcggccggccttcctgctgcgctgggccttggccggggccctttggcgagtcactgtcccgggctctcttccccttcatggcagcagccaggccctccctgcacaggccttgaagggagaggaaaaatggaacgctagcctggcttcttgacttccttcaggcaacgaatccatcttgaaggcccactgtgtgccaggcggggatccaggagctggggaagcagacgcggcccctgtcctcatggcacctcttccgtgcggtgctccactctctcccccacgaaaggtagacacggaacaggaaagggaaaagagtggaggccgccaggaggaagatctgcagaccggaaggacctcagctaagaggaaatgaaggccaggcgcagtggctcaggcctgtaatcccagcacttggggaggcggagatgggcagatcactcgaggtcaggagttcgagaccaccctggccaatacggtgaaacactgtctctactaaaaatacaaaaattagctgggcatggtggcgggcgcctgtaggcccagctactcgggaggctgaggcaggagaatggcttgaacccaggaggcggaggttgctgtgaggcaagatggcgccactgcactccagcctgggcgacagagcgagagtccatctcaaaaaaaaaaaaaaaaaaaaaaaaggaggaagcaaaatagaaaaacaggatctgaatgatttgggagccaaaaggacactgtacgtccccggctttctgatcacggctcactgcagcctcaaactcctgggctcaaagtgatcctcctgcctcagctcccaaggggctaggactacaggtgtgtactaccaagtctgattagtattattattttttctattctttttttttttttttttttttttttttttgtagagacagggtcttgctatgttgaccaggctggtctcaaactcctggcctcaagaaattctcccgtcttggcctcccaaagtgctgggattacaggcatgagccatcatgtctgaccacttatgcccttccagaaaaaaaaaaaaattcccctcaattttcttaagctgcttgacattctgctgtcattccagagccatcctggcaggaaagctttctgttctttaagagttgcctctgaaaatgcaatattcccacccccaccatcaaagggctgctgcttaaattacatcccctaaatccttagtaggaatgcagtcttctgagaaaccgggccaagaactggggaccaggggaaactccagaggacatagatgagccccacatgctttcccacccctgcc

SEQ ID NO: 1881141 - DNA, 4001 bp, Homo sapiens
catttatgttctccttgacatctctgtttgactgtttcacaggcatttcaaagtcaacatgtcctaactgattctaaagtatgttttccctctggtgttccataagattttttattttaactatttttaattgcacaattcagtgacattaagtacattcacattgctgtgtaaccatcactgctgtttatctccagaaccgtttcatcaacccaaactgaaactatcaaatcatttcacagccccacgacaaccaccattcaagtttctgtctatgagtttgactattttacctagtttactttaatatatagggagtcatttattttcttcccctcatatttatttcaagcaatgacttcatgtttccagtggcatagtagccacaatatttgtccttctgcatctggcttatttcacttagcataatattttcaaggtatgtaatattaaagcatgtatcgcaacttccttcctttttaaggttgaattgtatttccttgaatgtatataccacattttgtttatttattttgtcttagcccattttctgttcttacaacagaatacccgaaactgtgtaatttataaagcaaagaaatatatttcttacagttatgcaggctcaggagtctaaggatgaggtgctgcatctagtgagggccttcttgctggtggggactatttatggcatcacaaggtggcatcacatggcaaggggacttagcatgctaatgtgctcactcaggtctttcttctttttcttataaagccgccagttctcctcccatgataactcattaatccattaacctattaatccatgaatggattactccatttgtgaggcaaagccttcatgacctgatcaccttttataagccccacctttcaatactgccacattggggatgaagtttcaatatgagtttttgagaggacactcaaaccatagcattctgtcctagcccccaaaaactcatgtccttcccacatacaaagacatatattccatctgcatagctccaaagtcttaacttggtccagcagcaacttaaaggttcaaagtcctaagtcttatatatgagcctgtgaaatcaaaacaaaatatctacttctaatatacaatggtgggacaagcatatcgtacacattcttattccaaaagggagaaatagaaaagaaagaaggggtaacaggctttaagcaactcagaaacccaagaaagtagacattgggtcttaagactccagaatgatctcctttgactccatttctggcatcttctacacactagtatgggggttgggccccacaagccttgggcagctctgcctctgaagcttgattggggtccgtccacccagctcttccaggctggggtcttggtggaattccattcccagagctccatgaggcattgccctactgaagacattctacagcagctctgaccctacatttctgcttggcattgctctagtagaggctctctgtggtggctctactgtcatgacaagtctttgtctgtgctgtcacgttatcaatgacattttctgaaacttagacgaaggcttaataagcctccacagctcttgcttcttgcaagtcagcagaattagcaccatgtggatgctgccaaggtttatgacttaccttccagatctgcagcatgagccacaccttggcctgcttgagttcttgctggggtgtcctcagagtactgtgctggggcacagagtctggaggtggtcttgggcagtaagcccacagaaagtgcctgggcttgctccctgaaaccattctgccctcctaggcctctgggtctgtgataagaggggcagccttgaaaatctctgaaatgcctttgaggtctttcttccattgtcttgaggaatagcacctggatcccttctagccatgctaatctctttagcaaatggcctctgggctacatccttgctttttcactttttacatggccaggctgataaattttcaaatctttccactctgcttcccttttaattataaattcttccaattattttttttgttcctcagcctcagtgtaagctgccaaaagtaaccatgcagctgcttgttttgcttagaaatttattctgccagataccttagctcatcacttccaagtttggccttccacagagttcttgagtgtggacacagttcagccaagttctttgcaaatttataacaaagatggcttttattccagtttcaaatactttgttcctcagttctatttgaaacctcatcagaatggcctttactgttcatatttccatcagcactctggtcatgaccacttaaccagtctctaaagagtttcaaactttccctagtctttttgtcttctaagccttcatcagaatctaggcatttcctagactgctcctccaaattctttcagcctctgcccattacctgattctaaagccaattccacattttcaggtattcattacaagcagcaccccactccttggtagcaattttctctcttagtctgttttctgttgcttctaacaggatacctaaaactccattcatccattgaaaaacatttgaattgtttccaccttttgcctattgtgaataatgcttccacaaacattagtgggcaatgattcatctgtttgaattcttgctttcaattctttaggtaattttgtagttgttcaagatggggcatttggagtatagccacctcttccagtctttgcagactggctttgtgccagagaagcccttcactaattagctgggcgtgccctgtacctagggatcagccagaggtgaaagcttaaagtcttttcagttcttttatgagcatgcatcttgactgggcctatggctttttcaatttcccagtatacaggcctgcttttgaatgtcttcatttcccagagtctcactccagcttctcctctgggtcttagatgatctattgtgtagctccacctgtaatgtctcgccacaggtgtctgtggagctttttaaagcagactcccatgcctgcgaccctaggttaaagagggagattagccctccaggcagccccacaaagatgttaaaacattgcaaataaggtctgatctgctccttctgttctaaaggaggatattgggcatgggctgctgcatctccctgtgccacaccagggaaagtgtgggtcaagggtgagtaaaaacaccatgaatttcctgatgttttgaatgtggctttttcttgactgagccttcacttctttgctgtggaccttttaccattttccaacactcctataaagttaatttcattgagtttctggttgttttaatgtttctatgaggggaacatgggtttggatctgcctcgtctgccatttcactgcaacacactcaactgttctccctgttcttgtcttcctacaacccggcctccacgcagggccataatgatacctcacacatgctgttccatctgttcctcttttctctttgccaggctaattccaactcattccgtttccagcctacactctttcctcttcattttatccattcaagaatagaatagatgctcctgctaagaacaagtatatttccctctgctttccatttcatagggtctccttccaactgcaagactttatgattctcaaagtctacttagggaagcaagtatttacagagtcatgggatgttagagttggaagaaccattagaggctcaatcacttcatttcaaaaatgacaaaatgtggtgagagtgtgggagtaactaaccccggggcctactgtcaggtgatggtagagcaaagcatccaagtctcacctagttttagtccagaactgtttcccaagactcttcctgatctgctaggaagatgtttcaatctaaggaggcctcacctgcctctcttactgcctcttatacttgctgcagatggggaattctgggtttgctcatgggctttgcttctgtcttggcaaagat

SEQ ID NO: 1881142 - DNA, 4001 bp, Homo sapiens
ccttggaagttgtgcggctgtcaagagtctggagctgcagcttctccatctggctggaaaggaagcatgggaagaagctgctgaggttgaatggcaccctgaggatttcactccccttttcctaccacacaccagaccggggccatcaggttgcctgggtaagaaaggcgcgggggggcccacacttgtattgtgcaccagggcctggctcctatttcatccttcaaggcgcttcccattcatatctttttccattttcaaactgttggccctgtatttagttgtgtgtgatactaaggatgctgcctatgtcaaaagcctcatttaaccctcagaacacacctgcaaagtagaataaactataagaaactagaagagggctaggtgtccactgcaagggtgtacttctccttcttttagggttgagttcctgcaaggaaatagctgctaattttcccacccccttacagttaagtccagccctaggatcgggttctgcccagtggaatgtgagcagtgcagtgggttgccccactccagagcctcccactagaaacttcccaggaagcagtctccaagctccaacccttccgcctggatggaacaggggcaaccccaccatgaccttggaagctacaaacttaaaatggcagagcatctctcgccttggggttttgaatgactgtgtggagaaagactgcccggacagcatgttctctgccctgtcctgagcaagaaaatgaacttatactctattgtttcccagccattatgctttttggggtttgtttgttttagcagtgaacttatccctcagtaattgattagaaattttcattcctattgtagaaatgaggaaatcgagactcagagagggaaattcatggcccaaggtcacatattcggttaatagcagagtcacgatgccagtctacgccttcctggcttcaaagtcatgctctggttatgtgagtttccccaagtgtgttccacagaacactgttcaaaccaccgccaccaccacatcacccccgcagctcccatgctcaaataagtttgggaaatgccaacttcgagtcaacaggtttctttgccgcagtcctttccagcatgtcaccatgctcatgatacctgtgaattaccaccagggcatctaacatgaaggatttttccaaatttgtgaggccacagggccccttctccacagagctgattgtgagactggcatgcttagagctcatcttggtagaggctaaacttcaatatgctgcctgatacgggttgaactgtgttactctctcaacccccgaaaggattcattgaagtcctaacccctgggagctcggcatgtgacctaatttggatatagggtctttgcagatttaaccaagttaaaattaggcccttagatggggcctgcttcaatatgactggtgtccttagaacaggggaaatataaacacagagacaagcagacacagaaagaggatgacatgaagacacccagggacacacagcagatatgccacgggaagagggagggctggagtagtgcatctgtaaaccaaggaatgtcagagattgccagcaaaccccagaaactagaagaggcaaggaaggattctctcccggagctttccgagggagcacggccctgccaacaccttgactttggtcttctaacctccaacacatgagagcacacgtgtctgttgtttaagccgcccagtgcatggtagtttgttatggcacccctgggaaatgcatacgctccctctggctcctttcaaaaccaggaaccaaagtttctgggcaatgttaccttaccgaaaatcatccaaatgacaaactgtggtggcttcggtttactgacaaacagatgaaggaaaagagagtctggagggacaaagggtagcaccgcagagcagctcagggcttcagttttggcgccatgccggctgctgtgcacccggctttggttgcatcctggagcgcagtcctccaccgctctgggcacagttgccttttctataagggtggggctaacactcacttcataggttgaggggagggttaaacaaattaacatacactaaatgtttggtctagtacctggaagatacccagtatccgttcctttgaaatttgcgcaagcaggattgcagacctgcgcttgaatccaaactctgctatttatcaacagtgttgctgtgggcaatttgctcagtctttcaaagtctggatttcaccatctatacaaagagaaaataatgcgtgttgttaaaaaatggttttaaaacaagttagaaatcgtgattctaaaatagataaaaatgagcacgttatcattgtgaatgagtgaaccagcgatgttacaactgattcaaagaagaatccaaagaacagatgtgtttatggttatggaatgttgattttcaagtggtcacaatgatctggcttttgccccgtgtaggagggtggatggagctcatttgcgggtccacaattcagggtcactgtgtgtcctctcttccctaaaacttacagagcagtaaactagcccaaaggctggaatcagataatccagagggtctgctctcaacaataaatagttttctcttggagaaaccctgtaatcttctttgcttatttcagatttccttgtagtctcatatatttatatgcataggattgggaaaagatgcatacatggaaaaagcaagttgctgaatcaggtataatcctacttttataaaaacaaacaaactgtgtgtatgtgtatacatatgcacacacacgagtgggtgtgtatatataacgttgattaaattagacaaatgtcaggaagaatacagaaggattgtaaacaatggctacctctggagggcaggtctggtgatggtgatggtggagggagactttcatgacttattttctaaacttctgtgttgtttgaataaaaacaaacgcctacttcacagtatattgtgaataaggaatgtctgagtgagaaaaatgtcctttgtgcttcacgcagtgtgtagcattcaacaaatcacaggtttcatcattgttattattttacattcaactatcccagagccccctaagcctattcctggaaaggaaattgcaaacaagaacaatgctattgcagcccaaggacttctccctttgtgggaggctagttttgaaatcctagacttgcattttggctccctggagactggaggagacctctatcctgagctacagccttggagtggctcctgtctgttttacttccttagcccccaccagcagccccacgctcaggcccacccagtgtttagctgcgacaaactccttggccacaggagggaggcctgactggggccaaactctagggcaaagggttgcctaggccctgtgccatcctcttgcccagactgggactaagagacacctattagctccatttgagtctggttaccatcccctacccagggatggggtgctggtcacaacaggcaaagagacaaaatgaagtttttgatcacacaaagctaaagatctaatttcagctgctgactcatcccctaaagggcggcgttggtgcctccaaagggcttgggatggagtcaggagatctaaccctggtgcaggtttggccactaactagctgcatgtccatggactatgtctcaggttccctatctgcctaatgagagtaagaagaaggtttatctccaagggctatcaggaggcttaactgaggtgatgtctgagctgtggggttctgtagagatttagtttgggttgatgcaatagggtacttcagggtgcttgatatgctttaatagcaaatgttatatggcacttaccatgacgcgcaaggccctgttatatctgatttacatttatttagtcattgggtattcacagcagccctgtgaggaatgcactgttatccaacccccattttacagatgagaaaatagaggcaaagagagctaagtaac

SEQ ID NO: 1881143 - DNA, 4001 bp, Homo sapiens
aggaatgtggctggagctgaaggccattatccttagcaaactaatgcaggaacagaaaaccaactaccacatgttctcacaagtggaagctaaaagatgggagctcatggacacaaagaagggaacaactgatactggtgcctacttgaaagtgaaggttgggaggagggagagaagcagaaaaaaataactattgagtattaggcttagtacctgggtactaacgacttgagtttacctataaaacaaacctgcgcatgtaccccaaaactaaaataaaagttaaaaaataaaatatgtcaatatgcaacatacctaataaaagcaaaggtatttattaaatgagtttgtttaaaaatgagataactgtgcttacaatgtattgttctgttaaaggcactagcaatctctatgtatttacttaccaccagagatgtccgtaaggaacagccagaactctacttcagtaccttaggtgtgatgctcacattaggacaatatctagggaaggcaggccatgacacaggcaaatgacatcacaaataacttctggaagagaaaaaagtgacccagctggtataagcctgggtcgtctgagcctctgtatatcagcactgactttcatttttccccctcacatgtcccttacacagcccttaatgtttctagagaggcacgcagtttacaggcacacgcttgaggatcaaaagaccaaggttctcaacctaagtcctaaattttactcttacaaattatattatttaatttcaatgaggtttttctgtcagctgtaaaaatataatcattatatgaacttagtaaatattttttcagtgttcactaataataagggatcatggaggatacaagaaaaggtagacattccatgtcctgtaaatatagaacattaaatggcataaataaaaaatgtacacaaagaactctgagacatgataaatggggatgggcagcaaatagcaatactgcaagtattgctggtgtcagagaagaaacaagcttgatgagccttgtgctaaggaagtaaagtgaggaggaggtggagaggacaatgcagctgacagagggaaaaacaggagcagagggcggggggatagtaaggaacgtgggatgtgaaagccaccgggcattatacaacataaagtacagacaggctattatttcaacccttttatggatctaatttttctcttcagagattcccaccatgctcatttcaacctgttttctttacctacataagaatgttagagggggagaaagtgactctacgtgattttcgcaaggtctcgcactttccctagagaggattctgtttgtcctgttaatgaattgagttccctgtgagcaaagggaggattttacttctgagtcaattatttattgtcacctagacaagatctcacatgacttgttaaaattataaatcatcttataactcagcatgtgagcaaataacttttccccagtcctggtttgcaagttcacctgcctctcaccagcccacctccatccctcctggcttggagaagtggcgtttctctaacccacattcctccaccagtgccttgcagagtcttcatcaattactccccctttcccctccatcttaatcaccacctctcagttctttgtactccgcttacaaaaatactcacctggttcccttgtccttgtgttcccctcgtctcctgccaatttcccatcatcttttttaatgagaggcccaccctccctgtcctcaccttccctctcctcttctctccatggttcatgggagcatgtcttccagaatggtgctttctcatctagttttcttcccatcactctggcagagtcttctcagttttcttagatgattcctctgccactaatcattctgttaaaatatggatacttcattttcgtgatcccaaatcaaagaattcctaatctagcctctcctgggacgtcctgagttttggttccaaattactatttatcttctccacttgtgtgtctacaaaaaaatgtatataaatataattagacgaatgtctataatgtatatcagtcaaacatgaaagtcattgtgcattcaccaaaacatctcaaatcattgtttttgctattaaacacatctattggggaggaaacactcggtggtaaaaagagcaaagacattcaaagaagaacagattttagaatgactatttactaaacatttatattatgtatcaggcactatgctagttgggtgtacaatcatgaccctcataactatgtgattttggcagtccttaaaacttgaattcagttttctcaactccgaactgagaacaatttatgtcatgagactcttgtgttaattaaatgaaatcatgtgtataatctgccaagaataatgcctgatttcgtaggtgcttagcatatggtggtcatttccttccctccataggctaaatgtcaatggaaggcatgaagatgaacaggacatgggccctgcctcaagcagctcacattcaggattctgcctcctttcatcagccataaaggactccagacaaatagggaacaaagtgacaggctaaatacaaatgcttcaaacaaaatcttgactccctcatccaaagacagtgtgataagaataagacggggtgtgaagctctcctcctggtctgggcactcaaccaatattccatcatctacaacagtcgtttgccaacctttaattgcacgctgtataaataagcaacaaagaaaaggatctggagggaagggaggctgagttaggataaataatttagttcagtgtgtaatacttgcttgcgtagacacagacactaacagcattctgttcattcaaaaacaatattcaccaacatttattgaaatttgactctataccaggaaatagctgagctaggtgtgaacaaacagagatgcaaagacatcagtcctgtcctgaaagaacatactttcaaatggtgttatttccagttgccaattattttggtctgttgcttagatttggattggaaaaccacactcttcatttaaaacttaatttagcttttttgtgggacacaaatcaagtcccatttagaaaaagacattgctttcctaaaagtaatgtttcaaggttaattcatcaagacagaaaaatatagttttttctaaatgcttctacacaccttcaaaatgtagactgtcactaacatatcagtggattatgctctgaaactttatttgtaaatcctttaaaactcagaatgcgtactacaaagaaatagtattagagttggatttttgaccaacctgtaaaagctgactgaactacaatgtagctgagataatggcattaataaaactctaaagccaagttttcgtatattcccatgctaaagtgtattcaggaaaataactgcaatagtggtaatcctgacagctggaccagtgcccccacgctccttattctctcttctatctgatagtggagtgaaaatttcatagattgacggccctagtggaggacaccatggagaacagggaacaaagaacagcaactaagtgggggccaagacaggtgctccagggatgggaagccaaggtggaaattcttgggtgaggaaagagacaaaggctccatgtggctgctgagaatctagtccagggaataaggactgaagtggggccaacatcattttttacggtgatgagggactgaaggctgcatacaagggagataattgaagcatgtaaagcataatttttggcacatagtcaggctcaataaatggtgataatgatactggagatgatggaatagaggcaaaaactgtgggttttgcttcttcatttgttttttggaatacaacctatttggaggctaattttatttgtcaggaacatgaaactccaatgtcagtggcagatggagttactggagcagggcgatggttgtgcagatgggacatgtaggtaaaggaacgttgcactagtgg

SEQ ID NO: 1881144 - DNA, 4001 bp, Homo sapiens
aggtctctgtatcagactgggcgtaaagtgtaatgtcctgtcctgccacttattaactgggtgacctagagtaagttacttcatgactcgtatatttctcataggtaaagcagggatgataatatctctacttcatatgtccccgggagggtaaaatgatagaatcctttttaagtagcaagtatattgcctgtcacatattaatcattcaacagatgttatatattatttgtatagcccacagtattcactgtgtgtgtgtgtgtgtgtgtgcgcgcgcgcgtttggtgcaaggtagacgatccataagtatctgctgcgtaaataaaagttgtttttttttttttagcaacttcttttgttctcagatctgaaatgattagcccaggaattacttccctaaaaaggtaaagctagtttgagagaactgcttaaatgtggcgctcaatctttgctatcttagactgagagcctcatgataattaaaaaataatttaaagatgaaagtcctactagagtgggcgagctgattacgaaaaggaatgagcctcagagactgttagccggatccagccggccactgcgtaatccactccagtgactctcacctaggtgcgcatctccattttatctcacaagatgccgtgaaattctcaaagtcattgtaactacaattgattttgaatcacaaaaaaagcaatattccattttccgtgttgttgaccaagcagaaaacagaacgtaacttttaaaacgcttgaaaatcagggctatcaaaaatagagaacttctattcgccatgaactcgctgatgcaaacaatcaacgcacactgaaccgtgtgtttttctgggtggtggtggtccctcgccaaatagtcagcgtttggttctccgcgtctgtagcgagaggagttacagtttggtaccggcagggaggaaatcgcctcgcaatctctggaggtggcctcctagaaagatcgccgggaggggaggagccccgattgtcctggaagaaaagcatggccccatccgggaagtcacagcttgccgggagcccagggctggcggctctgggtcctggaggtggcagacggcggagcagccggcctcgtagcccgggcctgcgcgcctggcaaggggctcagtgtgtgcgagtgaaagacgcacaccgggcggacctgcgtgggcttcggcctcgccccgccgcgcgcggggttgcggctgaacctgaccagggctcatccctgcccggcgagggtaagggcggcccgggatccgctgctgctcggatgggagccgctcggggccgggatccctgggccttgcgggggcgcggcagcccctccccccggagcccgcgcttccgcccgagccccggcggcggcggcggtgaccgtggccccgccgcgccttccgcctgggagctgccgccgcccgcccgcgcccttgtgcaccgcgcccacaggccgcgggaacccagagcgcccgggcccaggggcctctgccgcgcgactgagacgcactccgagctggacgtgtggaaggttcggccagctcggcgtttcgcccccgctggggatgggccactgggcacctgcagccacccaagagcggggagttggccgggccctggccaggggccgccgccacagcgtactggcagggagaacagagctagctaagcctccttcctctcccagattcccagggaaactggacagcccgacgcccagagcggacgggcgagagcccctgaggtgccaagtggaccccggttctgctgctgccactggccgattggggacgccggcacttgcgctgtgggcgtgtggtggggcatttccgttatcctctcgaagacaccccgccactattcctgctcaaacaagcacagtctggtgtgcaagccgaccgtacctcctcccctccctcctttcttgcacgcaccttcgttcgtctatctattcttaccttcttccccagagcgccaagacaaatgtggacaagagtgaagaagttaggatactgccaagtgtgtgtgtattggggtgggggggtagtaataagcggggagaaagtgatgaaaataaaattagaaatcccagagtatgtagcaacacacacacacacacacacacgcacacacacacgttcccagcctgttagcaatcttggctatgtccaagtggaagcaaattttaatgctcggtctcagaagaaaatttcacatatacaggcttcagaggtaacggggtaaccgatagcttccttttacttctcggcatttatttttgcttttctgaagcatagtcctatgtttattaaagggaccacaggagtacacgctgtttgaaagccattcctggacaccactgaggccggcttcccagggagcctttgtcgcctctgcagcagaggtcactggactctcctcaaggtgtaatgtgagggaacaggtgcctcgggggcttgggaaaacaccacgctgtgctctgatgtgtgtccccatcccgggagaaggcaagtgctttgcataaggaccagatgggttgctgaatagggaggtggaaaacaaatagacccttgggtgtatcttgaaccccttcaacacccccccttccccactccccgccttcaccgaagcagtgtcagagtcctcttcgatccagcatgctctcctacaatggcgaaaaactgcattaaaacgaggcagtcggagctgactgcggaaacccatgttcttagagagtcgtctggctactgcgtagtcctggaatattctttttttcaaaaggcctcttccagttgattccaaccgggttcgggttattgttctcaccaccgatagggggcagcaggtgtcctgcgatgccccggggatgtgcgcgcagactgccctgctgtccccgggaatccgactacactgaacgtttggggcagaagcaggagctgctgcctctaagtccaccgcagcagctgccgggacttgggcctcccagcctgggcgcctggggggggcttgccctgtgcaaagggtgggcgaaaccatctgtgcaccaagcctgcccctaaacttagcgtacagcatagataaataaactcagttgtatgcaaatgctataattaaaatatacagtcatttgaaagtactgtaggctctattggagtttttaattgtttttgagttttctcaatcagtagagaatttaaaaatacggctatcacagtctgtttggagggtggtggtctgttacgttgaattttaaaagggcgtctgtccctagaagttgggaactactgatccacagaatcgtttgataaccgtggtaaagattccgaggcatctcggaagggaaactgggaggactgagctagtcctagcagggtgtgtgtccgcccgcgccgcgaggcgtgggcaacacagccccatcccgggagcgcggagctatggcagctgggattggttcagatcgagagtcctgaggggctgggatttcctgaaaacctacttcacttggtaagccagagcgcttgagttttcggaattcccgaggaaaggttctatatattctccaaatccacattttctcagatataagcactttttccctaaattaaaaatatatttggggtttgtggagcagtaatttttttggaagaaagaaaaatccaatgtaaaaatgtagagactagctattatagtcatctctaaatagatttttgaagtgataacggctaaattatccaaatgaaaaaaaatgtgtaatagtagtaacaaggctgtgcccctactttatgaatctcacgcacaattaaaaactctaatccctgaaatacctttggaagggagggaaggattacagactaattataggatttataacacaacactaagatgttttcattttattacaataatgaacaaaacattgatgatatctacttttaatgtaattcttccaacatcataacagattttagaaatgcaaccataaccact

SEQ ID NO: 1881145 - DNA, 4001 bp, Homo sapiens
gaaatgtggctggtgcaactgagaaactgaattattttattttaataaatttaaatgtaaaatcttcacatgactagcagctgctgtattaaacagcacagctctataatgtgcagataatgctaacattgggggtgaccaaggatcacctcttactgaaggataatcttccccttaacagatagaagggatatttaacagatatttaacgtattttaatattttggggggggggtgcaggttcaagtatggttgaaagagaaacagacaaatgtgctaacaggcagcctttcatgaaacaaaataagtgacagtgaccatcatttcacatgctggtcactggaaggagacggatgatctatctgcagagacaggcagttatacttgcagcgatagagaaaataagcttgtgcttagagaagtctgtttctaaatgaaaggcttggctatttttatctgttcaagcctagacatattactgaatattaataagctctgcggtctgaaatgaagtggttaaaggtgggagggagagacatatttttcttccttttaataagagacaagcaaacctgaaactttaagtctttatctatgcacaccagaaaaatatttcagtccttaaagcttcaagagttggctcaacagagagcaaggtgggtttttttctggtatcacttattcccataatcctctgacttgcacattgtagtatctaaggatttttctaatgaaagcacaactgatttttcttattcatttttcatttccacactacaaggatatccaagctgctcagtgtaacaatattccacctaagccaaggatgctggggagatttggtgaccagggcccagataatgtaataataaaagagaaatttataaagaaatcactttcaccagatcctttccaccagcccactgggacatgatcaaacagaggacgaacagaagccaacacacatgaagctctaagggcatcataattttcttcccttaattataagaaattattctgaacatacaagacacagcatatggtaatataaaggtaacagcatatgagtttttaaccagttttgatatggtgacatcactacctgttttctgtttctctttgcttctttgcaagggaaggagtaattaaacccattctaggagggagggaactttctctgctcccacttggttcccatcactccccacacccaggagggaaggtaaatatttcttttttttttttttttttttttttttttttttgagacggagtcccgctgtttagcccaggccggattgcagtggcgcaatctcggctcactgcaagctccgcctcccaggttcacgccattctcctgcctcagcctcccgagtagctgggactacaggcgcccgccaccgcgcccggctaattttttgtatttttagtagagacggggtttcaccgtgttagccaagatggtctcgatctcctgaccttgtgatccgcccgcctcggcctcccaaagtgctgggattacaggcgtgagccaccgcgcccagccgggaaggtaaatatttcttattcccttctaggaagtgtatgatgactaagcatccttagaagttagcttttagttgttagtgatttgagctctggatttcagttatggaggataattgcaccagagaaaataaaatagtacagggctttgagcctgaaggataaagggtccagagctggcactctggaaagtactaaaagttggggataatgagcaaaaggaaaggggagttactagatggggagaattatctgggaaaacaggttggggcagagaaagtgggtaaaggggcattgaacaggaaatatagggtgaacaattggaaaatagtcttgaacatgagaatcatagttttctcaacttaccactcagtgttcttgtaagtgagaatcatcttaaaatctgtgcgcaagacctcagggggactatttctccatctgtatcatgacttcactaaattgactgcctgatgggcacagcaaccattcttgccatagaatgttatgctctttgtggtggcactctatgagccaccttgccactacattccaaaacaccttaagcctgaggggctccctggaatcttccacgggtcatagggaagaggctctccaactgtatgtggaaagattgggtggcagaagtttacatgtaggctgggatagagacctttaaatggaaagctctgtaacgttaagtatagtcaaccactgattgcttctctagtatctattcccttttccatcttttccaaacagatcccaaatatttttaggtgtccactaccccttttctttgtagtccttgttacttaggggaagctgaccctattcccagtttgggggtggcttcttatcgatccaagcatggttatcccatccccattgtcagtgattggtccaggatccaggcttaagccaattatctcatggtattccctcttgtttcagctactggtccagggctggggagtgtgaactacctggggcactggcccagttagataaaaggaaatgacttttatttcaagattggaagagatgcgattgctctatcctgctggacataaaaaaaaaaagcatatctccttgattcctaatggcagctatcttataatcccatataactccaataaccttataacatattataatcccctaaaattgaggaggcaaccttaagatgttcaaaagctgtgagacagagagaaatggaaaatatcacaatgtctgaagactttgttgagtcacgaactcagccatttttgcagcccaccctacctacggatttattcatttccttgcttaaattaattttcttgcagttttctactacttgtagctgaaaactggcttaaaatgttcattacaaacacccaggaagctggtagggaaaattacttttctattaaaataaaacccagaactttcaatgactatccagaaatgaaaatccagtgtagaagtagggagcttattaaacagctccaattttatccctccaaatctcacacttctacatggggttctccgaagttagacactgtagccaccaccatatttggacccagaggagtgtaaattaccttttaaagtctgctatagatacaatcaagctgtaacttccaagacggctttgttacatgccaagagagaacaacagggacacaagcaaataatataccagtggatcaaatttgtctgactttcgaagtaccacataattgttccatagctagctggggcctgggtttacagaccttgtcctaatatctgagatgtttaccaaaagttgacccagcttcacatgggatcctactcaggtttctaatttcctcctaattgacctcaacatagacagcaccattttaaaatttgtccctccagagttccctcttaaaactttgacaaattttaatgtaagatttccacttgagttctagtcaagagagcctatgtgtttgtcagagtctgactcaagaaccatccacagtaggatctccagggattatcacttaaaatgcagattcctgagccccaggctaacgattgtgattcagtaaggcttgagtggcacccaggaatctacattttagccagtttgttcaatgattgttcccaagataaaaatttaaagctctgttttaagaatagctttaaattctccaaaactagcagtaaaggtagcctgtatatcatgctatcatgaaacaaacacacaaatacagttctccacaaatgtacatatagtagctattttggacttttaaatctggcttacagctgcagttgtataagccattttctatatcctctttttttttcttaaccaatccaaatatatgcttttttttttaaccagaagaatgattacaacatgacaaaatgtttgttctctcttgcatttaaagaattattgtgaaagtccatatatacatttctttgtaaaatgggaa

SEQ ID NO: 1881146 - DNA, 4001 bp, Homo sapiens
attacaatattataacgactctctgaatatgaatacaaataaaagcagtatttaattataaatcaagtttaggatagaccacatttttttcagatattcacaataatgattatttcaatcctttttaaaaaatgtttttattgtggtaaaatacacagagagtgaaatttaccgttttaagctgtaaaattcaggggcattgagtacattcacaatgtgacaaaaccatcactatctagttccagaactttttcattgctccaaagggaaaccccgtgcacattaagcaatcactccccattcctccctcccccgacccactggcaacaactgagctgtgtactgtcactatggggatttgccatttctgagtacttcatatgaatagaatcatacaatatgtggcattttgtgtttggcctctttcacttagaataatgctctcaagattcatctctatcattgcctgtattagtacttcattcctttttatggccaaataatattctactatatgtgtatgccacattttgtttatccatttatcagttgatggtcatctgagtttttttcatcttttggctattacgaatagtgctaccataaacatttgtgtacaagtttttgcttgaacattaatgttatttgttgaggtgtcaacttttcctccaaaaccaaagcttgcttatttgtttcttgctgggagcctgggtaggtagtgccactgctttgctattgtcctaggcaatgtttagcccgtccactggtaacctcagtctgtttccctgtttctttcactctctgcttgcctgcacaaatttgcatgcatatatgggttctcccctacttaaacaatttggaattcatattggcaagtggatttcccccctcttatagaggagattaaaaaaaataagtacagtgaatgtgtccaattcagaaaggccttgggcctcagttctcagcttcccctaagaaggcctctttccagctcgattccaggaaggctggctccaggagctcaagccagcagaggccctgcctcgggcctcagctcataaagccaaggtgtgtctgagtcccttaactctgtcaggcttagaacttgagccttcactcactggctgctgtcagagttcagcgttccctgccaagccatcggaaagctggaggccagagagaaaaggcgagaggcatcagatttctgcctgcagatgggaatgggactgacactccccacataggatttctctgtgagcaaccacaggcattatcagcgttcaggatcacatcacaaaacacagcctgatcatcttgccttctctttttcctcctctcagagatacagatgcattgctccttttccctttgcctcccggccttttcctttgtttgcccctctcccctttcctccacagccccggctttcccaggtctgtttctctgttgctttttccccaaaggctctcctgttttctcctgtccctttgattcctccccctcctttcatcctgcaaatctttctctgtcgactccctgtctccttgccattctcggtgtgcctttcggatctgtttcctttgacactggtcccaggcctgctgccaagtttcagacccattagtgaggtgccttgctgactgaaacacaaatcaagactgatccgggtacaattagcagcagctcacacctcatctggaaagcattagccagcactgagagtgtagggagggaggcacagggaaatattgatgccaaacagaatagatctcctacttttggagcgtgaaaggatcctgacccagtagacatataactgaaaataagatacaaatggataatgcaaagttgagaggcatgttaacttacctcggccactcttcagcatctacgcaagcaacacaggctccttaacacacaattcaggtgtataaatatcatccaggaaaaggggtgtctgattcatttaatccagatattctaacacatgtgtgatccgggagtcctctgctgtcttgcaaaattctatcttggtactgtttctaaaaatttaatgtacaaaagaatcacctggcattgagctaaaaatgcagattctgattgactaggactggagaggtgcctgagattctgcctttatatcaagctgattggtgaagcacactttaagggtctaggaaaatttaagacatttaactttggtcaagtaccctgatcttcttctttggagcactcacaattataaggaaggttgaatgatataattagctgtttgatgcctatcttcccaactcagaggcaagctgcccaaaggcaaggaccaggcctgtctggctctcctttgtatcctcagtactagcccagtatgttgcatatagtaggtgttcagtaaatatttcacaagtgaattttcacaagtgaatgaaccagctcaatccctaaggcccatcaaaagttactcctatttcagagagccttcccagtccagcctcccttatccatacctgcctggtggcatttcatcatttcccctgtgtcttatcttagcccctcaagcagatcattagttgcttgaaactgggactttgtcttctgtgtttctgaactttttttaatgtccttttttctcccttcctctcactccccatcatagtaagggcttgctctagcaggcatttaatgttagttgattgattgagagaccctagaatgatgccaagttctatttagacttcaattataatgctcaaggggtggctggattttggcttggataaaagccaagattttatatgccccagtggaaaacctttaataccacctaacacattgtggggtgggaaggctaagacattatgtgtgtacaaaatcaagcgatgtaataccgtgaggctcccaaggcagttataaatcaggccactccagaggggtaactgcgggctgtggccattacttcactcctgttttctcaactgagaacgacggctcacgtttgccaagctttacttgcaggggtgggggctgttgttccccaggattgggcagaccgtttctcttggaaagacagaaaactggctcacagagttctgccaaagataggagaacctggtcttgtttagaactcatcaaatgccctatttttcaaacatcagggctgtgtgaaatgcaaagtgctttcgtcaagcactacccccataccccataatattaaaacatgcatattttaagggacatttaatccatatgctttttatttacttacccttaaatcatcaaaaataattattatgaaaacctgtttgacatctgagaaactttatgagcataatttggaaatttaaaaatcttgctttcaggaaaaaaacagaaagttgtgcttttccaaaaacacacggcttttaaaacaaagagacgtgagggcctttccagcattctaatttcacagggcttgaggggttcagcaccagcacagcacaagctcatatccctcatctctccagtgaatcgcagatggaagtctcaggcatggcaggttcaggcttctgcacttgatttgattctgtgaccctttaatacctgacagtgacaaaacttcatctgtctgcaggctcccaagcatattttacaaataccccagatgcatgttcaatgtgtatttctgcaaagtgtgtgactgtggcctgattatcttcttaagcagataagacataaattccagggtgttagagacaacttttgaagttcaaaagaagtacctggcaatgaaaatctaccacaatgcagctcaagtatttcattctgtgaaatagacttgcaatgatctgattgatctcagggtgaggcacgaggcaggaaatgtgggatgtcccatactgtctgttaaggccctgtctgaaattgtccctgaaaactgagagccaccactttggtctctgagttgattcacgcgtaggtgaaattgtgtaatgggtggagtgggtgagtttcaaagcaatcctgat

SEQ ID NO: 1881147 - DNA, 4001 bp, Homo sapiens
catctgactgtacctgtcttgttctctgcagcatctgtctgctacactcctagaccatcgttaataaactttcacacattacacgaaaacccctaatatgttggcacctgcacataaatatctatggttcataaaactagaggagaaaactccattttttaaagacctctatctagtgccatttgtatttgcactttttgtttagttgtaagttttaatagttccccctttgaggatttgtcagtacgagcagtattgcttatcagaacacaccaacagtctttttgtaatattcgcttttcccctttggttcagccgagcctgctgacagatcattcaaattcaattgttttatgtctaagccgaacagctaattaaagtagggatgattaacctgactggcagtgccgctctccctctcgcgctctctctccttctccttttctctctctctccctcctgttccaatcagtctttttctcacacactctctctctccgtctctcctctctctccctctctctctctctctcccccccctctctctcttccccctctctcttcctctctctcagtctctctctccctccctcggttggtgtctctctctctctctctctctctctgtctcttgctctactgtttttttttcctctctctctctcctaaacgtggtctgcttgctgatggcagaatggcactcggagatttgtgcattgtgtctggtttcctacgggcaggctgacccagtgcctccagggacttatcaatagaccactcagaagagacacagacaggagagaggaggaggggtggggggagagagagagaatcaatatcaagaatagaaggagctccgaagccattttttttttaaagaagtatcgggacttgggagagggtgacaaagaaggtttttcaaagaggcagtggaggaggttctaataaatttggaaggaaacagttccctgtcttgggaaaaggagaactcctgactgattagcattcacaccaggtatgagatgttcgctaccccttatcactgtgtcgcaaccgagatggaaaagcctttttttttttttaggagaccgagggagcatgtattttgctgtgtttgttgttggggggtaagaggggcggcgtgagaagctgtgggcatttgtgtatgagagcagaaagaatggaagcagtacaacggggggtgggaaagagtatggagtatgttactgtcttccctgtctttgtgcacccctggggggttacccaagttcatttctagcaggtggatttagacgggagttacttaacgcttgaccgccagttttgaaaaaaaagaaagaaaaaaacgctgcttcctatgtctattaaaggaagctccaatttctctctctctctctctctctctctctctctctctcccttctcttttcctctctcttcctctctctcttcctctctctctgccccccatccctcttcccctctctccctctccctctctcttctttttttcctcttctaaccagacagcgggagggtttctggctcccagccagcccaaaagcctctaagtgttttgcacttgtttcagggagtagctgcccggggatttttcagcattttcactagagaacaaagagttctttacaaagggaagggtggggggggggggagtgagcttaatgtctgatatatgtttttctatttttattagtttttcgcctaaaaagaaagagacaggaacagaacattcactctataaagacacaaagacattcaaaagaaatccagttatcttttctccccatcatcccaatatatacatatatgtacatgaaaaaattaaaaagaaaaagactagttaagttgcatatgttgctcttttctcctcttttaatctttccaaatccaactgttcttatgctcactttatgctattttttttctactcacaataaaagttgttcaggatgcatcttctcttatcatgtctttaccctttctgggtcgccaaaatcttgtggaagaaagaacaaaagtccatcaaataatcaatttggtgactagaacatcttctacttttgccacttgggtaaaaagttaattatggaatttgggttcccaaaataccaatggggtacatcagttcattcgatctcacaagtttttgcatccatctgtttaaaaggtaccacttgtgtcacttgtcagttattaagaaaaggtagtaagggagcagatatttgtattttatttttgtttctaattatgtaaatgacaaaacccccagagagatttcttgccccttctatgatacactagttcatgcaaaatatagtctagatggagattttgtcaacgattctgattgccacgtagctttgtgttctccatttcaatttttgcctatgcatgtatatttttaccatgaatttgtgttgtagcaaacatttcagaatgcttatcattttcaaattaatgctccaacaaaagcaaaaagaaatcagatgtgagctgtatgtgtaaaatgtagtaaacaattttatcttttatatatgctgtacatttatatctttatgctaatatcctggatttgtaaacccaagataatgttttctttcttaaagttctcctcttaatgcatttatatgttgattgtcacttagaaatctttttaaggtacattatagacacgaaactaaacaaggggaacaattctcaagctctacaaaaatccttaaatatatattatgtaccattcctaactacagataactgttttgctaagtagaaaacagctacaacagttgtttcaagaatcagaaactcttttctttttttttctattaactgaaaataaaatctattcatatccctggggagggaaaatgtaggggaaaatatagatatatacattttccataattatagaatgcatttatgtaactgcttcttaagggtgtaatacatatcagggcagagtgtgatgctcatcaaaaaaccctcctggctgggaggtgtgagtgccttatgtttgaagtaacttgataacaaggagtcttttcgggaaaccttactatgtatgtgttgcctcagtaatgatcctcagataaaaaacaagtactaggtggccagtgttagcacttgaactcactgaaagatattagaagtaggggaacttttggcaaatccagaattttccagggtaactcacttcttacacttacatgttttctttaggaatattcttgaattgctttcagacttttctgtatttttgtagaattttttaatgcttttaatagtgcttaaggagaaaaatacttttaaaaagaatgtcatccaaataagagaaactcagtctttaaaaagttttatattgaagacaagagttgttttggttttgcttttttcctttttgcttgtgttctattttttctccctgaattcttttgttgctgtgggctgttgtccctgcatttttaatttttcatttggtacccccccttttttttcttttttctttttctttttggtctgtttttgatgtgaccaaggggatctttgaaaggggcagagggactgggataacaggctgttactgaaagctgcactagctcttcttgatcccaactcaggcagctcctatcagctagttgtgccgccaagagtacagtgacaggtgatagctgtcattctgggattcttcgtggatctgacctgagagtgacacattcacagtcgaggagaaaagggaaaaaaaatagaggaggaggaaagaaaagctctttgagctggaatacactggccctttcttcctgtaggcaatccgctccagttcttggcgacgtgtcctgcactatcagatatcatatgactttttatttagattccttttcggagaatggcctgttaggactctgtttgttttcttttatttaatttccttctcccctcacccactagttttgcgtatctgtgtgtgtcatagcgtgtgtgcg

SEQ ID NO: 1881148 - DNA, 4001 bp, Homo sapiens
  modified_base (3752)..(4001): a, c, t, g, unknown or other
tgtgagcagtagttttaccctatgcagaagttgtttctggaagatacactgtggaattacttgtgagcttcctgttggctttggattaacaaacttctcttcaatctttaaatgagagaaaacgtagcatacatttgtgttactgatttttaacaaaaagaataaaaaatttaacctatgtggagtaaaatcatttttaagattcagtacttagtgtattgataccttagaaggcttgcttcaattcaaagtgcttgtttctagagctttggtagtactgttttcttagttatttgtcatgtagatagattggttggttggttgattttaattttaggaatagcacacaaatgcagtgtcttcaatgtttttttttttgagacggagtttcgctcttgttgcccaggctggagtgcaatggcgcaatctcggctcaccataacctcctcctcccgggttcaagcgattctcctgcctcagcctccctagtagctgggattacaggcgcccaccaccacgcccagctaattttttatatttttagtagagacggggtttctccatgtaggtcaggttggtctcgagttctctacctcaggtgatccacccgcctcggcctcccaaggtgctgggattacaggcttaagccactgcacctggcccagtgtcttcaatttttattttattttatttattaattgattgatttttgagacagagtatcactctgctgcccaggctagagtgtagtggcacagtctcagctcactgcagccgcccacctcttgggttccatcaattcttatgcgtcagccttctgagtagctgggattacaggtgggtgccaccatgtctagctaatttttgtatttttagtagagacagggtttcacaatgttggccaggctggtcttgaactcctgacctcaagtgatctgccagccttagcttcccaaagtgctgggattacaagcataagctaccatgcccagccagtgtctttaatttttaacttaagagcaatatacagtgtaaagcagaagtcattcattcattcattcattcaacaataacttctgagctcctacatacctacaaagtactgcctctgcaatccttatcctcattaaggatgtgaagatatggttcttttgcccatgaagcttttggtctggaagtttctcttcacattttttcctcaattatcaatttagtgcaaattatttcataccatttgatatccatttttatacatatatgccttttaaacatatgtgtgtgttttcacataagtggaattcaactatttaagttgtatcatgggatttggtcttcccttgcctccaggcaaaaccttggttaacttagtttataatatttatggtcacttttaaataatacgaatagtatagatttagaaagtacaaatagtgtacaaatagtacagagttagaaactatactttttcatttgattatcaaaatggcaaagttgttttcgagtacggtagagggaagcctttaatgaagaaagggggttgtggttggctttttcatcctttcttctactcctagaagtttacttccttcccctgctttgctgacattagttctggtcccggatgatgttgggtgaatagtggagagaaaaggatgacagcgaaggggtggtgaagaaagttcttaattgatgtgattcaggagaggggcagcgaagtgctgagtagagaagggcaggatccctggcaagggctacaacctcgggcctgtgcccatggacctaaatgaggacaggcatttctgtttttgcccaccaaaacagttttgccttttggccccccatcctgtgcccatcaaaacccgagactgtcgcgggcacacacacaaacagctgtacgtcgagaaagagcacacggccagacaccagcagacacccgcaggccatcgactgaccaaggaacaaagtagacgtcgttgtgtctctctgcgcctgcgccggcgctgcgcctgcgccggcgccgcgcgcctctctgcgcctgcgccggcgccgcgcgcctctctgcgcctgcgccggcgccgcgcgcctctctgcgcctgcgccggcgccgcgcgcctctctgcgcctgcgccggcgccgcgcgcctctctgcgcctgcgccggcgccgcgcgcctctctgcgcctgcgccggcgccgcgcgcctctctgcgcctgcgccggcgccgcgcgcctctctgcgcctgcgccggcgccgcgcgcctctctgcgcctgcgccggcgccgcgcgcctctctgcgcctgcgccggcgcgcgcgccctctctgcgcctgcgccggcgccgcgcgcctctctgcgcctgcgccggcgccgcgcgcctctctgcgcctgcgccggcgccgcgcgcctctctgcgcctgcgccggcgccgcgcgcctctctgcgcctgcgccggcgccgcgcgcctctctgcgcctgcgccggcgccgcgcgcctctctgcgcctgcgccggcgccgcgcgcctctctgcgcctgcgccggcgccgcgcgcctctctgcgcctgcgccggcgccgcgcgcctctctgcgcctgcgccggcgccgcgcgcctctctgcgcctgcgccggcgccgcgcgcctctctgcgcctgcgccggcgccgcgcgcctctctgcgcctgcgccggcgccgcgcgcctctctgcgcctgcgccggcgccgcgcgcctctctgcgcctgcgccggcgccgcgcgcctctctgcgcctgcagagagggttacggttagggtcggggtcggggtcggggtcggggtcggggtcggggtcggggtcggggtcggggtgagggtgagggtgagggtgagggtgagggtgagggatagggttggggttggggttggggttggggttggggttagggttagggttaagggttagggttaagggttaagggttaggggtaggggtaggggtaggggtaggggtagggttagggttagggttaagggttagggttcgggttcgggttcgggttcggggttagggttagggttagggttaggggttaggggttagggttagggttagggttagggttagggttagggttagggtagggttagggttagggttagggttagggttagggttaggggtagggttaggggtagggttggggttggggtaggggtagggttagggttagggttagggttagggttagggttagggttagggttgggttagggttagggtagggttagggttagggttagggttagggttagggttagggttaagggttagggttagggttagggttagggtagggttagggttagggttagggttagggttagggttaggggttagggttagggttagggtcagggtcagggtcagggtcagggtcagggtcagagggttagggttagggttagggttagggttagggttagggttagggttagggttagagggttagggttagagggttagggttagggttagggttagggttggggttggggtggggttggggttggggttagggttagggttaggttagggttagggttaggggttaggggttagggttagggttagggttagggttaggggttagggttagggtggaggttagggtgagggttagggttgagtgagggtgagggtgagggttagggttagggttagggtagggtgagggttagggttagggttagggttagggttagggttagggttagggttagnnnnnnnnnnnnnnnnnnnnnnnnnnnnnnnnnnnnnnnnnnnnnnnnnnnnnnnnnnnnnnnnnnnnnnnnnnnnnnnnnnnnnnnnnnnnnnnnnnnnnnnnnnnnnnnnnnnnnnnnnnnnnnnnnnnnnnnnnnnnnnnnnnnnnnnnnnnnnnnnnnnnnnnnnnnnnnnnnnnnnnnnnnnnnnnnnnnnnnnnnnnnnnnnnnnnnnnnnnnnnnnnnnnnnnnnnnnnnnnnnnnnnnnnnn

SEQ ID NO: 1881149 - DNA, 4001 bp, Homo sapiens
cttcctatcaacacatcctttattgtgtccccccctctctcttgcttgtgatagctgtggtgggctaaatatattccagcactaataccctatcctagccttcatgtcaagtgttcacgattcttaaattttactcttctagtgcatacaacagttactggaaaatgcagatttaaattatttgaaacaatgattaaattctgctcctgtgctccaaggggcttttacgttaccttttattgagttaataaaaatggaaatagttttcaattggtgcagtttctaaacttctcagcaaaaatcactaatccaggctaatgggaagagaaaagcagcagcagggtttagttagaactgaactttaagatatgctgaaggaaaaaaaatttctaaaagtgttaacaaggggaggtccatggagaccttaatagctaaaaaccgttgtaatttaatgtatagaaataaatactctaaaccattttagagtcttcattctcaggactacctcactgtgtttatacagttaatatgcactagctaagactaaagtatttgtccaattcttatttaaatttccccctagactggtagggtcttaaagtaatgatattttaactacagtcggtttattacaggtgacctaacggtgcctgttgtgccttataaaggccaagactttcaattatccctaataagtatacaataggatacccattgtttccaagtgcttttaaattcttgacgctgatgagacatttgcatcgtgaccagccaccagtaaaatcttttaagccacgttttttctgcttttcttgggcactctttttttttttttttttgagacggagtctcactgttgcccaggctggagtgcactggtggaatctcagcttactgcaccctccacctcctggttcatgccattctcccacctcagcctcctgagtagctgggactacaggcgtgcgccatcacgcgcagctaatttttgtatttttagcagtattggttgcgccatgttggtcaggctggtctcggacacccgacctaaagtgtcccgcccgactgggcctcccaaagtgctgggattacaggcgtgagtgctcggcctcgggcactctttactgagcaacaacaggttggagaaactagtagggcttccagttttttggtaaacctattgtttaaaagtctgcctggtcatcagattccagtcgtcttgtttctgcctcagatgataaaactctaaaattataggatgtgagatctggaaaatgtttgaaaacactaaaggggcacagtaattatgtctttcgttgcaacttcaatagcatgtatattttacacactttcatgaccattaatcatctcctaaaactggggaaagctctctaaaacctccttaagagtaaccttatccgttaccctattccaccaacctctttgtccttttctgtttcaagcaactttgagataccgacttctctatggaagcttaagccgtagatgctaaaacaaacgtttgctcgttactcccagcagagcaccggcttttaaaggacctcaacagacacgtttcttaacctttacgaaacttttccaggggaaacttaaaccaggaattttacaatctggcataaattctgtcacccgccccgtgactccatcgccacacatgccacctggctccacaccacaacaaacaggagggagcggaacccatgcaaagcaggagcttcccccgtttccggcgtctgggtggatctacgttagctgccgtttaggcagcttacgcgtcaggtgtgggcctaagcctgcagctaaggtaggcatccgcaaatctagtccttctctgtgacaatttccaaaaagaaatggtttttgaaacaacgatccactgcttcccacactatccagttaggtccgggacagaccctacccagctaatgcactcacccaagaaggcagtcgctttcgcatttgaagggcggggcgaaaaagaccggaaatgaacattggcgacttttttgcgcaggcgcagatggccgtctcccattggtcatctcggctcggtagtggtaggagggacttcctttgcacatgcgccaggctgcttttccggctttgttggagattgacgcggcagtgcacacctgctggtacgagcaaaagtagccgacaggccagagtttccagtttcggtggcttcgtaggcttttagcttctgaaatccgctaaaagcggcggttcattcatcttcaagtacctagcctgactggtagggctgctcagcattccgaaacatttcgacctggggaggggggcggcggtgaaagaatactttctgtagagagtgcccctcgcgtcgcccctgctttgaaggctttatgtattaacggaatgccgaacatttgtgtcctacttgctgacagcgcacaggatccttctaacagtatttctcaagtacttaacaaaaagatgaaaacttgaagtccaagccgtgctgctgattccgtctcacagtttaaagactgtccagaaactttaagctttcaaaactgtacattttaaaatcctgtgcgtttatcttcattttgctgggcagaaagccaaagtactggactgcctggttcagggctgaacgcctagtacacctgctaacttggagcttcagagccatggcaaccaaggagtcaagagacgccaaagcacagttggccctctcctcatcggccaatcagagcaaggaagtgcctgaaaacccaaactatgctctcaaatgtactcttgtgggacacacggaagcagtgtcatcagttaagtttagtcctaatggagaatggctagcaagttcttctgctgataggctaatcataatttggggagcatatgatggaaaatatgagaaaacactctatggtcataatttggaaatatcggatgttgcctggtcatcagattccagtcgtcttgtttctgcctcagatgataaaactctaaaattatgggatgtgagatctggaaaatgtttgaaaacactgaaggggcacagtaattatgtcttttgttgtaacttcaatccgccatccaaccttataatctcgggatcttttgatgagactgtaaaaatatgggaggtgaaaacaggaaagtgtctcaagactttgtctgctcattctgacccagtttctgctgttcattttaattgtagtgggtccttgatagtgtcaggtagctatgatggcctctgtagaatctgggatgctgcatcaggtcagtgtttaaaaacgctcgttgatgacgataaccctcctgtctcttttgtaaaattttctccaaatggtaaatacattctcactgcaactttggacaacactcttaaactatgggattatagcagaggcaggtgcctgaaaacatacactggtcataagaatgagaaatattgcatatttgccaatttttcagttactggtggaaagtggattgtgtctggttccgaggataacctggtttacatttggaaccttcagactaaagagattgtgcagaaattacaaggccatacagatgttgtgatctcagcagcttgtcatcctacagaaaacctcatcgcatcagcagcattagaaaatgacaaaacaattaaactgtggatgagtaaccactaatccctttgaaaatcaagtagtagagccaagttggccaaaaaacttggatatttaaaaagacggtttcttttaattttggcagtttggtattttaaaaattgtctattgttaaattttgagattcatacactacatttacaaaatgagatagttgaaaaagcacatctagaattcagcttctgactaccaatcttttttgagcaactttttgtaatttttatggatttatgtcacttttattacagggatatattgcatagtggtgaaatctgggcttagtataccctcacccaaatagtatacattgtacctagtaaatactttcccatc

SEQ ID NO: 1881150 - DNA, 4001 bp, Homo sapiens
tatggcttcagatatgagaataataaagagaactttcctttcgcctcaactgcagccttctaaactcttccttccttcctatgtagaagtttcaaggacctcatggcctgagtgtggataggcagaatgctgggaatcaggcaaaaataaaataatactgaaagtgaaggtcatgctaatattagtaagccagggtgatcctgaatttacaaaacatttttctttgggaaatttcacacctcacatgattctgtgtttttacttgggaaatttcacatctcacatgactctgtgacatgcggtacatgaggtgcctgactgctgtttttgtcctctactaatgaggaagagtgtgcgtactcccagcgttttgcaagtttcaaagtctgacttgactttccttccttttcctggaactgatccatgagtatcgagagtaaagctgcccgcacctactcattcaagatcctgagtgtcctgcccagctgcaggaggtggagagacccaggaggaggggccactgctgatcccaggctgtagggggtgggaagagtgtcccagggcaccatgacccccactcactcactcacaggagacccacacaagagaggagagggcacttacagcttaggttcccaccagcaccaactcctctgccatcaaacatcattgtgtttctctttctgccttgtctgtcggcacacgtggagttaaatttaatgctcaatcacatatttgtctgggctctttctgtgtttatttttctcttaatagttctctctcctcccttcctctccccgcccctcctcctccttcttcttttttttttccagagacagtgtctcgctctgccacccaggccagagtgcagagtggcatgatcatggctcaccgcagcctccaactcctgggctcacgtgaacatcccaccttggcctctggaatgtctgggattacaggcacttgccactgcatctggctaatttttatattgtttatagatccgggatctcactatgttgcccaggctggcctcaaactcctgggctcaagcgaccctcccacctcatacttctgagtagctggggctgtaggaatgcgcctcagtgccaggctagtttcttaattttctatttctattttgacaggtacaaattttgtattcaatcctacctcagacacatctttggtgggaaaaggatgtcatttaatcaatatataaattctaagcaaataggtctgatccccaaattaggttagtcacagctgctgagtcgttgacccaagagaagctcatctagattttttcattattttcaagttcctcttctcggttcgtccttcttccagaccgtgccctccccgtcccactctcttcccacagcctcccctccccacagcctcctcccaccattccaaatctgggctgttctctcaatttccttctctctggactcaaacctaccctagcccccagcctcagtttggggttaaacttgtcctcctcacattctctcccacccaacttgatgtcgcctctgtgtcatcaccacgggattttcctcctctgggttctccttttccgagtggggtcagctcccccatgagtcacagcaccaatcacttctggctgcttgcaaacccctttgctttcctcagtgttgacacccagggcagccctatgctcactgccgctgagaccccacctctgcccctggccttttcccagctgacatcaccctgtggcttccattttcctaaaattctcttttgaggcctcagtcttaaccaaagcacacagtgcccctcaaaaatgacaataaaaacccaaacacaccgtgactgtcatggcaggttcctggtccccgtattgaatcagcgggtgggtttctgcgaacactggtgagaggccgcattagagggtcaggaccctcaggtctggactcgtggtcaccacataccttcctccctgctgacagtagctggtacctgttacctactcagagtgtcacatgccacaagccagagcgtcttggcagttctcagcaccttgacatcacttccttgctaccactcagagcggcagtgacacagttcccttatctcagaaggccagaagacggctgtcaaaggtcacagggaaatcaaaggcggggtacagggccagagggaggaggaaacaacttcccggttgctttcagacgcttcagagatcctctggaggcctgggggagcttttgagtactttatttcagttggtccctgagctcggtgagtggggcgggtagagccaccaggggaatcaacagtggtttctcgtgcccctcagggtcaggagcagtctgatcaaaaggagggcatccactgtccggggccattcccacagctcccggatgctgggtctggaggctgcgcccttcccctgcaggagctcagcccagtggtaagtcatctgtgtgtcatctatgtatttaaccccttatggccatgttgatgctgagcatggtttcacttttgcaaacatttatttatacccttcgagagaaaaacgtctcagctgtcacaggaagctgcttcggggggtgagcaaactttttaaaatgcagaaattatgatctacacccgtttcttaaaagtaagccatcgtacttggttctctttaattatatattttcttacatattgtgttcatgtaggcaagtcctgtttctgctaaaagaaggtaagttctaccaaggcggtgtcatgccagctttatttcccgtggcacctggcacactgctaagcacttacatgcttaacaactagattgggaatggtgctgctctggggaagtgggcacacgttaaagaaatgtttatttcagtcttctgaaatagggaattactctggctaaaatgtagctccagaaagggaaagtggggctgtatgaatccaggtccagtttgttgtttcctccaggataaggcagctgtcggaggggaaaatcatctcccatttctccacagggcagtctgaagatggccaattacacgctggcaccagaggatgaatatgatgtcctcatagaaggtgaactggagagcgatgaggcagagcaatgtgacaagtatgacgcccaggcactctcagcccagctggtgccatcactctgctctgctgtgtttgtgatcggtgtcctggacaatctcctggttgtgcttatcctggtaaaatataaaggactcaaacgcgtggaaaatatctatcttctaaacttggcagtttctaacttgtgtttcttgcttaccctgcccttctgggctcatgctgggggcgatcccatgtgtaaaattctcattggactgtacttcgtgggcctgtacagtgagacatttttcaattgccttctgactgtgcaaaggtacctagtgtttttgcacaagggaaactttttctcagccaggaggagggtgccctgtggcatcattacaagtgtcctggcatgggtaacagccattctggccactttgcctgaattcgtggtttataaacctcagatggaagaccagaaatacaagtgtgcatttagcagaactcccttcctgccagctgatgagacattctggaagcattttctgactttaaaaatgaacatttcggttcttgtcctccccctatttatttttacatttctctatgtgcaaatgagaaaaacactaaggttcagggagcagaggtatagccttttcaagcttgtttttgccataatggtagtcttccttctgatgtgggcgccctacaatattgcatttttcctgtccactttcaaagaacacttctccctgagtgactgcaagagcagctacaatctggacaaaagtgttcacatcactaaactcatcgccaccacccactgctgcatcaaccctctcctgtatgcgtttcttgatgggacatttagcaaatacctctgccgctgtttccatctgcgtagtaacaccccacttcaacccaggggg

SEQ ID NO: 1881151 - DNA, 4001 bp, Homo sapiens
atccaccttcctggcttaggcctttcagaagaagacagagtcctaagccaatgtgtttacccttgattttaacttgaaactttctgccattaacatggggaacaagataaatttatagaaataaaaataatatgatttaacaataccaaaacattaatatctgaaatgtatcttggagggattgcttcatgtgcctggcagtgttgtcagcgtcaggctgccgagtagagatgtgaacgacaaagcatttaaatgatctgtgttgtcatttttgcaacacgagctcacacagatgatggtcgatttaataaatcaaattggacaaaaaaaaattcagtctctctccacaacctttctcaaaactaccgtcagagttttcttctcccctcaacgacctcttgggcagatccacgactttctgtttactttcaagtactatagaacttattttcaggaatcaaaaaactctaacccaatcagataccaaaacttcaatttattcttgaaatcaatgtttttcctccccagctcaagtgcatttgtgtctttctttgttgtcaaatgccctgtgtaggacagatgttccaagaagtctttttcatgaagtacctctgttaattctttggagaccctttcagggactcatacatttaacatttcctgatgcattcaaaacactctctcgttaatcttttgtaagaaccttgactcctgtaccagaaggtgcttgggattccttcattccagcatgcacccctcttgctgtgaaatggtgggaggcccttcaaataacttgcactaacttgcacagtgctacttgtcctgcaggaaaatgaacacatcctcccccatcatgttctcaaacttcaagcactgctgccttttggcctcactctgtcatgctgcgcatcttcagccacctcatacctgtgatttctcctgcagagtcaggcaccaggccctgtgctgcccacattcaagcactgcctggctaaacactgaagccattaaccacatgtgtccattgaacacttgaaatgtgccagtccaaattgagatctcaaagctttagtattaaaacacacacacacacacacacacacgcacacacagagcaagatgtctcatcactaatttttatatcaaccacgtgataatattttggatatattggcttaaataaaatgtattagtaaaattaatcacccatttcctttccctgttttttaaataggctactaaaaaataaattacatgtgtggctcacatcatatttctatcggcctgcacttctctagagccttggacacaaagaatgcccccgaccagagcactggcatcgcccaggagcctcttagtagcagagagcttggactggcagtagtgctcagaattgtcattttaaccagatctctgggtgaagttctgatgtaggatagaggtacttattctgaggtctcagcactcatgttgattcttaacagtctgttaccagttcatgacaaaataagtgcaggaattaagagtactgttcagaaatttttatagcaatttgatgttacaatacagagtatgtaacctctgaacattgtttccatttcatttttctaaaaattcagttctagtaaatctataaacctgtcactccatgatggactggaaattgaaacaggttggtcctttatcacagaaagtttgcaaagtcctgctctagagggcacccttcaaactctctgaggaaatttctcgaactctgtaagatggcagtattccccactagtgagcctctctgtcctcaccacctttgctccagagggttttctctcaatttcctctcttggatcaagacgaagtcacatagcagcttacccttccgtgccaaagtgctctcttttcctacaattttcttcccggctgttaaatgtgttctttggagtgacaatatttgatgattggccaacaccttaacacatcctgtggggaacatgtctaagtacctttcttcagaatgtgcaatgcaattgtcacaggttaccctcagttttggacgttagcccaaattccaaagcaatgagaaagttcccagtctgtatccaatcaaggcaaagactcccagcttctctggggaacttattttgggctctggcattttctgttttgtcttttcccccgtcaaaacactcctccaatttccccacatgagttgaagtagtcttggcaatcaatcctaatttgaaagttttaactggaataatatgtaatctttcttaaatattatactctaggcttcttctacattttaaggaaaatcttgtagacgtgcccaacacattctattaagatatagatatacataagttagtgcatatcacgtattccttgtatgggaatttaaacctcttttttagtcaatttaatgtccacaagcagttcaccatttaatcttatggcttattttgtataaagaaagtcttcttcattaaatgaagaaccgctttctaattctcaattttaacaacataatcacagatttccttgcaccaaatttatttaaagaaaaacacacctgagttttcagtttatacccacattagtattttattaatagtttgaatgttaagtggcaaccacattccaaaaaccctgaaaaattcataatttctttatggtttttaagagctttgcttcttgccatgatactttcaatagatttataagtgtaagcaattcatttttttttaaagaaagtaatggatatttattgatttcttaatatgcactaggcaccctattataatgtactcttttgtactaaatctacaaaaatgaataaaacatgtccttcccttgtgtaactcaagagtctgggtgatgagacagactcctacacagaaaatacaacacaatatcaggggttataagacagtattttgtgcaggattctgtgggggtagaaggaaggggcccttaactcctaaggagattagggaaaagcttcctggggaagatgatgcctggaactagaactagagggaatcatagcaggtttttcaagttaaaaaaaaaaaagtttgcaaaacattcaaggcagtgggtactgcatgattaaatattcaaaggcatgaaacagtctaaaagttttagagctaagtaggttaaaatgaggccggagaacagagagaaaccaggtgatggagaccctgaatgttacacctaggagcatgaacgtgactcaacaggtgttgcaggctgtgaaagtggttcaagcttctaacgccatagttgcccattagtttctcttctggtctaattttgcaattatttacatagaagatctttaatataaacctttgttgagttcaaggccacatataaaaatcagagagaatgatagcgtcagtgaaacaagcaatatataaaagaagcaggaacactctctagcttccttcatgagtaagaataattgccttaactgtttttggcactaagtccgttttcatatggcattctattttctagagtgactttgtgacatagattaggcagatatcattttttccactacagttgagaaagttgccaccaagagagagaaagtcagaacagtagtaaatggcagaagaagaagatggaaccaggtctttaagctgcagatgctttgctcttctctttcactaggaaatggaatctatgttaatgaaattccttgccaaatttaagaggtaattgttgataacgaatgccataggtaacattaccctgacacacacgttttgtaaatttgtctaaactaagtttgctatgtatatgatactattaataatgattaaaaactaataatttattgagcaccagaaagtgactatttttcttcctttgttagtgttttcttctacaaattttcttctaagaatggttttagctacatctcacaaatattgatattttgtgcttttattatcatttagttcaaaatattttctgacttctcttataagtac

SEQ ID NO: 1881152 - DNA, 4001 bp, Homo sapiens
atttgacctggcaatcccattactgggtatatacccaaaggattataaatcattttactataaacatacatgcacacgtaagcttattgaagcactatttgcaatagcaaagacttgggaccaacccaagtgcccgtcaatgacagactggataaagaaaatgtggcacatatacaccatggaatactattcagccataaaaaagaatgagttcgtgtcctttgcagggacatggatgaagctgggagccatcattctcagcaaactaacacaggaacagaaaaccaaataccacatgttctcactcataagtgggagttgaacaatgagaacacatggacacagggaggggaacatcacacaccagggcctgtcgggggatgggggtcaaggggagggagagcattaggacaaatacctaatgcacgtggggcttaaaacctagatgacaggttgataggtgcagcaaaccaccctggcacacgtatacctatgttagaaacctgcacgttctgcacatgtatcccagaacgtaaagtaaaaaaagaaaaaaagaaaagacagagagagagagagaaagaaaaagaaagaagaaagaaagaaaaaaggaagaaagaaagagaaagagaaagaaagaaagaaaaagaaagaaagaaaggaaagaaagaaagaaagaaagaaagaaagaaagaaagaaagaaagaaagaaagaaagaaagaaagaaagagataggaaaggaaggaaagaaggaaggtaggaagtcaatcgaccaaagtggaaagatgtgattacacatgtagtggggaaaacataaaccatggatttcttagaaattttaggaaatagagactagaagtggagtgactgcacatatttatctattctagtggtcaaaaactaaatgcacttaaggcaacaatatcaatgtatacatacacgtaaaacagacaggaattgacccatgacttggaagactcagcctcacccacctcaccctaatccaggtcctgaataacaggttcccagtcccataacctctgacaaccatttccgtcccccatctctgacaaatgaggcttgggttgggttggagggtagtcccagaatcctgagctggactggggacttactgcctacagccgtactatgttgcccaccaggggaaatactagaaacggggtcctcagaaaatgataggtgagaaccagagtaaacagcccagatggggtcattttccaaatggagctaaaggtagaaaggcagccaaggtataaagttaaagagacaaaggctgctgctgaatgaggaggaggggagattagcctgcaatattcctgagtcatctgtggacatctgcagtcttttcttatccattttccacggctgctgtgagagctccatcagctttgaagttatggccagagacaaaccatttatgtgtttttggcacttctaatcatctgacaagacacacagccaaacccgtgtacttttccccattgtagtcagccttatgctacctttaattcagtcttgaggcaagtgagttcaagatacttccataagtggatgacccagagtgtgagatccccagtgaggaggacacttgctactgggttgaaaatcaccccttagaagagcctccatgtccgccccccaaaaaggctgagtgacctacccagagaaactggtagagctgtgagtcaaggccatgatggctattaagggacagtttgaaagctagacaaacagctttcgaatagcaaacagctttcaaaatgctgacttaagaaaattacatccttcgtaagacttaaggttcaacaagattagcagtcccctgaacaacaaaaaaacaatttcttctatgcattttcaaaacccacctgattccaaagctgaggctttttctattgagcatgaagatcaggtaaaaacaggatcagggaagtcccattcagaagagtttctgcacacatgtcattagctccaccaccacaatcaccaccaacttcgcaggggcacatttccctaggatactttgtccaatgagcaaatcaatctgaaaacaaaagccccttgtggaaatgttcattactaagaggttttctgctctttacgatgaaaactgagaaagttgacgctccagtttccaaatcagccttgatcaatttctgcataatagtctgggtagaaggtacaaatgaagggtgggggggcagggaaagcaatattttttattacttgcatttgtttaatttctcaggatactattattaatagactgtacttttaggagaagcaaattcactttatacagtgtttaaggaatattgtatatgtaggatcaaatgaggggaaaggatagttttgccaaaggcaactgttatcaaggttctgaaattaattggatgctttaattgaggtagattactagctaatgcttgcttgaatacagtaattctcctattaaattatctttgaataattacctgaaatttctcagctgcagggactgatggctatttaattgcacagtgatgttgctatataattacttaacaaggtgtcctgtaatagtttaattccccttttactgaaaaaaagtgtatgataaagtaactacaaatactcctttcataaaaaataaattgccgtagttttttcttcaaagattatttgttattttaaagtaaattaaattatttctaaattttttatttataattcaagtattgatgctcttttaatagaatagaggctctctaacatataatacattaggtaacatttcaaaggattggaattgtcatttaaaatgtttacttatcaataacattttatgtcttattgttaaataagacaccacccctttctcttcatttttattattttaatttcaaggttctcaaattaagtatatagacattaaataatgaaatacttttaaaatgtggccatatgttacatgacaatgatattacagacaattaaatacatttcttaggatttttaaataaacaatctacaaagtaggtactttccaccaagacatcaatttattagcatttaggatattgccacagatgttattggcatgtcaatgacgaatatcaataaatatcatctgactcttaatcaggttaatctaattgacccctatagtaagcataatctgatacaaaagtcaaaagcaaaggacacacattttgacaatttttctttcttatgtaacttggtgatataaaactagtaaaataatcaggaggtcatggctgattgggatgactaaaagagaaaattattgtcagtgcactgccagttttagcatattaaatatagttctagaatttgtcctagaatagttttatattgtatacattactttaatgcagaataaaatgcttgttaagctggataataccaaaaattgattggaaaaaattaaaattgaaaattattttgataaattaagagaatggattacatttacaagatgaggcttgacagattcaaagcaattttattcacatagggaggatagatgagaatgttctatttccagcacagcaaaaacagtactgagtcattgtgaaaaactagccaactgtgagagctcatataaggtctttttttcctaaataaatctaatactgaaatgcatagatgggaatgtaaaatatggaaatctcaccatcctaagcattggttgggactgaaccggtgaagacaaagccagtttccgattttgtttttaaatcacagctcacagatgtaatatatgcatcacatgggttaaaaaaaaacaacttttcagtatctgcaggttatttgtcctggctccagtataaacagtttcatcctactgagaatacaatttttggattaggtgaaaatatagaacagaatacactttttgattattgtgcaaggaatgtaagaaatggagaagctccatactttgatgaaattatcctcatctattatagctacagatgga

SEQ ID NO: 1881153 - DNA, 4001 bp, Homo sapiens
aaatgatgcttatgaccacctaccagcaaatcttgatgcgccagggactggggggaataatcattgactagctggctattatgagtcacagtttccattcctgcaaaatgagaatttttttgacttaggggtggggtgttctctaagctttttgcctgattctaattcttctgctagaagctgtgggtttacagaggtgaaaaagatagcccttccaccaaacatatattctattatatatatcttatctatatatattatatatattctattatatgtatcttatctatacatattatatattctattatatatatcttatctctatatattatatatattctatttatcttatctctatatattatatatattctattatatatcccttccaccaaaaatatattcttttatattaataaaatataaacccagggtccaatggaaaagacttaagggcagacacagagtgggatgtggtttgtgttaggagagggctgaagggacatcatggcaggcatttgtgtgacctcccacaaaacaccctcctccactctgacctcactttgttcttccttccctttgtccttattatttcctttctgcttctctttcttttctgtctccctctgccctgccctagaacggtgcctttctaattgtgggttataacacattattagtaggtcataaaatcaattcagtggatgtggaccagcattttaaaaagggaattaatagaatataaactccttaaaaggcgtcactcatactcaggataatactgctgtgtaaaatttgttttaatatgtgtcagcatgtgtacactgtgtcaagatgtaacacttacatcctattttaagaccctgctgtagactaaaccaggacccccatggtgctccaggcgtccccaccctcacctgtggcaccaggagctcctgctgtcactggcccagctgggtcctgtgtctttctctgcgttgtcagggcctgcgctggcagtccacctacagggaggtggaatccggggcttgacggcactgggaggatccttcatctttccaggctcaagcaaatcctcgcctggaggcggggaatgggctagatgacccctgaaacagtccagtccagcatctgagagctcctctgggtccagccctgtgccgcctttccacgcttccctgcagggccctggggagagcagagaaagcagctgccagctccaggcagtcattttaccccaggtgccacttaccctgcggaggggctggaaccagctaatcattttaccccaggtggcacttaccctgcggagtggctggagcttctcaggtttttcagttcctgtgtcacctcccagccctgcccaccacatgctgtgggtgtctatggctgacgaacgcccctgagccaggccaacccccagcctcccagtgggtggctctgtggtccctggcagccccggcatcatccggagcacagaggccatggacactcaggggatggtcaaggtcgtagctccctccgttcttccgttcctccctcacagagctttcagcaagatagatggtcattcttctgtcctcactgctcccggcataaggggaccccagggctggatgacttccctaaagaggaatctctcagggtttcctgcagccgctcccaagtcccgtctggaggatgaaggtggcggacacatccctgacgcagtttctcctctgccctccacccctcacccatcccacctcctggactaggaactcaaccaggacttgcttcaacctgagaagatggtgtccagcccccttggagcctgccagcatccggcgggatttcagaggggcctccagggaggcgctgcccagctgcccccagtgttgctcacacagcccccactgatctgctctggggaggccacggccccagaacgcggcttgtggggggcctggggcagcaggccgggagacgtcacttgtccgctgcctgctcacccagataactgcagctccctccactgccgcctacagccctcccgccatgcctctgcccagaaggccctccctctccagtcctgtccgcccctcaaggcctgcccaaacctccctgaattctcgcctgagcagacactttcctagcacggctcccgccgcgtggattactcagccgagcctcagtctggggctgccctgtgctgggagctttatgcagatgctcggctccctaccctggcttgtgagccgtgtggcgcagaaaccgcatctcactcagagcgagggtaaagagcagcagggctggagaagccagctgccctgccacaggccaagaggacttggccaagtgaccattgctgtctgtttccccaactgtaaagggggctgagacccttacagggttgtgaggcttaaactttgacaaacgcctaccatcccaccaggcacagggcagttgctgagtatttggcggtggctgctgttccccacagtgtccaacacctcccggggatgtaacaggtgcaccacgggcaagactgatgggtttatcagttcactgcggagagaggcagggatggatgcacttgcttgttcctcttattttcccttatggggagcagtgacacttggcagaggctgccagggagatgggaaatggacattaattacgggaaagaaaaggaggcaagaaggggaggagggtgggaaatagacaggggaggaagaagggacggaggcatggttagaagacaggcaagcaaaaaagacgactgttttcttggacgaacagggaggtagggccatgaaaagcatgtggacgcttcttctcagtgaattaaggcatttcagcgctggaaagagcctgaaaaaatcagactcccttcacagcccagcggagtgcaggccctgggagagcaggagttagagatggggaggaccccgcctgcaacaggcactgcctgctacaccctgccatgggcagaggggctgtcctcccaccccagagaggccccatcctttcctttctttccccaaggctgctccagcagggagtttagctccatggacacctttgaaggctatgaaggtgcagaagacatggaaaaggtgagcagcgctctgaacgtaatttctttctttcttgtttatttcatcttcttcctccttcctattcatcagctcctcctgcctactgtccctcgcctccatccctctccccctcttcaggattctcacccataaggacctggttaagccagggaaccgaggtcactagtcctcaaagtggctctgaccctgctagcccggcatgtccccacgtggctgtctccttggcggtgcgctggtgtccggtcataactggggctcccgctgagagccccgtggcccaggtgggagggctggggtgggcctcagcctgccagcggaagtcaccacattgcccggcctggccacagcctccagcaataactctgagggtgcacccgtccccccccccgcccccccttccagctcgcggggccttttccagttggatgacagtcacgaaacctgttcctccaaatccgctttcctggagaggagagaaagcacccagggagaaaaagaagaacgcgatgaggaagcaacgtgagtgtgagcgaggaaaactaagcgcctctgtgggccacggcgtctctgactttcttctcggaattgcagggcgaccggcagcaccaagaaggagcgtgctggggcgtccacgccggctgactcctgcgggggcgacggctggtttccaggcgagggcgcggcgcccgaggacctccaccccggagagctgccctccctgcggtcgccccggctccccggctccagagcgcccgcattcccgagagaggcgatgtgggggcccgggccctgcccagctacgcagaaagcagccggggccgcggcggcggcagaaaggggacgcccagggccgcctcccgggagcccgaggggtgccctgcgtgctcgtctagctcc

SEQ ID NO: 1881154 - DNA, 4001 bp, Homo sapiens
acacacacccaattcccacagatcagttaaattatcactgcagtttatgagaccagatactttttgttacaaatacatacttatgcttaattctctaaacacagtgaattcttccataacacaaaataagcccaaattctgaggtttttttaatgttgtaaagttatactgcatttaacttttttatgtgaatagtttcaaattacattttcaactgggagcatggatcagtggttaaaaacaggaagtttgatgagcaaacttgaaaccagtgaaaatacagaagataatgagggaaattcagaaaaatctgaaatcggcgacagatgtgacagttatggagcagttcctaagttttcccacatgaacctggtagtggaaagcaagattgcaatatcctgccaaacatgccaaacaagcagtaaatcagcagaaggcaatcataggctgttctcacatgctgattgaaagtgattttcttagtattttggatatttaataaaagttttgtgactctcgttaatcctggaataataattgtatgagaccacgatgctagcagaattatttaaaaaccaatcatgcaaattttaacaaagagcaccagaattcaatgaaaagcccagtttaagaggccaaaaagaaatttcttgaagttttcctcaaagataatttctgaatcttcttagaaagagaagcctatatacttgtagaaactaaagtgaaatagagaaaggaaagctttaaaggcatcatttcaaataattcatttttagagttcaaaaagcatcaacaactgtttaggagaataaagttaaccagattttttttatcttgcatttaaattaaaacatcaatattaatttaacctttttcttggtctttgcttgctaaacttataatggtgtatttgatgataaaatgatgagtaaacaaattttccctgagttatgggtatatattcaatctcagacacacaaagctgttggagggatgacgatcacagcccaagccctcacaaaacctgaatgccaagcaacttaagcagaattcaccaaaaccacaccatctcagagattgccttctgattttcaaagtgtgtctaatggagcagtaaatgctctatgttatgcttaaaaatgtgttttgaatactattctttttagacaagtttataatgaaatgaaactttgtcaaccatatagatgtgtgctgtcttaaccagaagaaacgactggtcagggttaaactgctatttttcatcttaaagaacttttttaatcggacttaatttggctactcaaaggccttcttggatgatatccaagttcttacttatgatttaagtttgtgaaataagtggcttatgtaagggtaagatatgactacaaaccgtccaagatttgtgttagttcgacttaacaatggtgtgaaagcaacatgcgttcagtagaaaccatacttcaatgattgcatacctatgcaatcattctgtttttcactttcagtgcagtagtcaataaagtacatgtaatattcaatactttattataaaataggctttgtgttagattattttgcccaactgtaggctaatgtaagtgttcagagcatgagtaaggtaggccaggctaatcgataatgttcagtcagttaggtgtattaaatgcattttgaactcatggtatttcaagtttgctatgggtttatcgggacttaactccttcataagttgaggcacatctgtattattaaatcctagtcaagccaagccaacaccatcagtcccagcaacactgagtgacctgccccaggcattttctgaggtgcttaccttactcttatatcccaccttgaaagaatcagactctgagaagtcttgtcacaaacctgtggtccatcaattaacaagcttttattgagcaccattctgtactcagcacttacattcacgaaaccttaaactcctctgtgtacttagtctgttttatctctgcttctgtcagaatgagtgccgttacatgagggatcccaggatcccaccagcttgcctgacatatcgggtttcagggcgccgctgtgatgacttacagcccagtcttttcagtacattgtcatttcctctctttaccacatctcattctttccagggcatttcctctattttcaaatacagggcagtttgccaacatatcttctgttttggaatagtaatcattacactatgccgagaatttaaaaagcattagaatggagactgcttttaaatccccctcactctgtcagcataatcctaggtattgctgcttctcttgggacacgtacttatttctatttcttacttttctgaccgaattccaataattacctcataacccaaggaagctgcccttttttcttattattcctcttatcttttctctttctcttctcataaacagtggttctgttgtctataagactttcactttcaagcataggtctgtatatcaaagttaaactattttaattgaaccaaaaggttttcagggcctgcaagactagctacttaaaaatatagatatattaattagacacaggctcaaaaccttattgtatcatgaagggaggaatgggtaagtgtgaacaagtaaataaataaccactaaaatgagaactaaggtgaacatgagaggtgcaaagtcttttgggggccaaagcagagagaaatcccatatgtttaaagaatcagggaaagcatcatggtagaaatagatttcaaagattgagactgcatcgttgtcaatcctagacccaggaggaaagttaatagaatagaaaagtaaggacatgttgaaggaacagtgaatggtaccacttggccaaaatagacctcacatgtaagaaagtcatggcacatatgtctctaagataacttggtccacatgttttcctacttcattttcttggaaatgatgaataagtgaagtcttctgagcagaagggtgtcctaatcagagcacacatgaggaagaaaaaccaaccagcagtgaatgcggtgaatccaaatgtctgaagcaggagcaagagccatgtcgggagccgcaacaattgtccagacaagaagcaacacagtcctgaactgagcaggccacaacggaaggaagaaaggagaaaaaaaacgtggaatgagcatctgcatttcaggaactgcatgaggtccttgatgcatattattccatttaatggaaaagaaaagtgagtatgagaggcataaccacgattagggaaaagaatgagatcagtatttatttaggactccacataaaatgtgcagctctcatccaatcctctcaattggctaggtagggaatgttatattccctgctttatacataaggatatcaagactctggtgagcttaactaactggctcaagaccaaaagggtagtaagtagcaaaaccatgatctgaactcagacttatctgacagcaaaatagatgctcttcccaccctgtgtaccacaaagcctatagaatcttccttactccataatttagtaggcacagggtgtgagaagtaaggacgaataaaaaattacttgtgagttgtgaaagatgattcattaatagtggtgtcatttataaaaacaaaatagagacaatcagttggagtttggagtttgatgaacataagttaatgggcttcattttagatacactgagtttaaaatcctggctggttacctaagtaagaaagtcttaacagcaattggaaattgctagattttagaatcatcaggagaaagattttgagatgaagggaaaaaagattgaagaaattcatgtgtaaagcaatgtgagtagataagaagtcacatgaggcaaagaatgtggagaagattttattttatttatggagcagtagaaagaaaaagcagctagtgaaggaggtggaagagaagtttccagaaagataaaagaaccagcaggctatggtatcacagaggctatagaagga

SEQ ID NO: 1881155 - DNA, 4001 bp, Homo sapiens
taaatctcatctggggcagatttttgaatctggaaagcccaacttcaagccaatgtcagtctttagataaaactcaaaactacttttgacacaaaactagtcttttgtgccaattattaattttttaggagaaactatcaaacatttcctctaagaaaaaaaatggggaacatataactaaaaggaatacttagaccttgcttaacaatacagaatttcagatgactgaatcaggaggtggagggggaaaagtaacaagtgcagagacattcatatccgaaatctagcaaagtaagggtccctcatcgaataaaatgcacctataaatcatgagcaagaacgaatctgcatgtacaacctacacaatcacaaaagcagccaacgaagaacccaaaaacgcacgactttctgtaggaaaagctaccttcatcaagataaaaagacttttacaaaacccaagactaaattttggttccattttgctatcttgccatctggtctgaggtgcctggggccttagtctgcagaaggaacactgggcaccatctgggttggggacaaaggcactggctctatctagcttctctccaaccacaagctaccactgcccctaaaaagtcccactgaccatgggcttcacctcctgcttgtggacgccctcccagcagctcctaagagcccaagatgcggcgggggtctctgctcagtcagcaccaaccacagcaacacgctagaacggtttacacgctttccgatgttgacaggatggctgtatgactaatcctcacatttaattcaaagagattttcaataactatttcaaaaaggagagaattgcacaatcacaggcataattcaaatcaatattgctgaatgccttggttcctattgagatttttactctgcaatttaaaattactttgtaattaagaggtgggtggctaagttcatttaaaagaaccaaacaactaaacctatccaatttcgcttgattaaataaaatcctagaaggccgattctgaagatgcaatcgtagagggcacactcagacactcagagagcaagggctcagggaagtataaccctgaccatcatcctggactaagccgagcccggccctcgaggtactcagcgcacaggcaagcacaggtcctggagtcctcgctcggtcagtgccctgagctctccgtctgatttttaaaaactggcacagctgcttttaaacaccggcacatttttggtggcacaagggccaccaaacaggacccaaagtacaggtccttaacttccaagatcccgaagtggacatgcacagatttgcgctctctggaaaggggaactgcaagcccaagctcgggcgcgccgcgcttcccaccggacacccacccggccgagcccggccactcctcgcacccacccgggcggtttcacccgccccgccagccccacccacgggctgcgggcggccccgcaggacaaccctcacagagggcggcagaggcccggcccagccaggactccaccccggtgaccttgggcagacacgactcctccccgagtccacccgccaggcagaggcgaggggctacctcagcccgcgaggtcgccggaccccaggcccggaccaaagcggcggaggggacgcccagcaagcccgcggggtcgcgaccttcaccgggacgcggcctacctgctaaggaccgagctccccaggcccccgagtacactccgcggctccccctcgcaccggcccagggctctcccagccccttcccgatccccgggcagggggcgcggggacccggcgcccgctccgctcggacccgctggggaccgtcccgctcctaccgccgcctcgtcccccgcctgccctgccccggtccgcggcagggactcacagccttggccagcgccagcgccaggcgccgagcgcttagcagccgcgacaggctccggacccccgatacgtctgcagtcgcctccgcgcagtcccgccagtccctgcgcagactgcgcctgcgcaccacggccgggtcaaggcggggcgctagtgggggacattgcgcctgcgcaccacgccacgcccgggccggggtctaaggggcggggacgccgcgcctgcgcaaagcggacccgcggacggtggcgctgggtggccacggaggtcccgcgctccccgaccgagatagggcgggccctatttcggagaggtgtttggcaccaacattttttaaagccccgtgggtggttctccgggatctcccagaccgagagggcctgaacgtccagacctcagggaatggggtcgaaggggcggcgctcgtccgcggaggtgggcgggagcggcccggggcctcgggcctctagagagcgggagtgaccctcggtttctggcctccgaggggcgggagcgatcctcagccatgtccctagtctctggcttgcggctgatttttaaattttttgtagaggccggatcttgctctgttgcccaggctggtctcgaacttgtggcctcaagcgatcctccctcctgggtctcccgaagtgcggggattacagacagagccactgcgcacggccgtggtcagctttgaaagctgggtagatccctttggcttatacgcctttctgctagcttaccctgattctgcttctggttcagatagtattttaatatttctagtgtgtctttttgtaagatacctgaaatctttttgtggaatgaagtggcatgaaaaataaaccaataatcattagtaagtatgtttcctgtcttttcactttattaaaatcttcgtcttgtgcatcatgtttaacaattttattttaataaatttgcaagggttcagtcccattttattgatatttgggttgtttcccatttttgctcttaataacaccgtacagaacatatttgtgaccataactttctctttaggattatttttttagatgtatgccccagacgtggcctttattggcttgcagggaatgaacatcatacctcctagacttatttttttaaagttacgctgttttagtcctgggttagttacctaattttgtttggtttgagacggagtttcgctcttgttgcccaggctggagtggaatggcgggatctcggctcaccgcaacctctgcctccagggatcaagacattctcccgccgagcttacagtgagcagagagggcaccacttcactccagcctgggcaacagagcaagactatattgctttaatttactctgccggctatctggagagatgcaacctcatcagcagaaattatttccacttgctgctttttaaatgttatttcctatagccaggtactgagcccttcaattgaggtctaaaccctccaccctctccctccgggattgccaagcctgtggtttcagttccatgctcccaggtagattatgtcaactcaaagtcaatgcgcttatgaaatactttttgtggtttttttcttaattttaagaggttttttttttaaatatgtttttgtttcatggaggcgacaccctctgtctctgagttgtgggagccttcctccttcagtctgcatgtactgaagccagtgtttgccgtacagcccctcagccgcagcagcccacagtgaggtgcaggtgctcacgccatcgccccagagagctcctccattcgcccctccacccgtagcccctcgaaaccactgccctgctccccgacacggtacactgtcttctccaagatgtcatgtgttggcatccttcggcctgtggccaccgaaactagcttccttcaccgggcatgtagcctgggagacctggcgcatttgggtgcatctttccaccgctggttggtgtcccctatgtggaagcatccgcgttggttcacgccttctcctgctcctgccgacggacattttgttttcttccagttattggcaatgaggaatgaggcctaaacacttgtgtgcaggtttgtgtgtgcacgtttaagttttccc

SEQ ID NO: 1881156 - DNA, 4001 bp, Homo sapiens
caggtggttttcaggggttacctggaatgggaaggagagttggtgcagataaagagacatgcagaagggaagcaggaaggtaagacagcaaaagactgatttgggagatataaaaatatctcccaaaataaaaatatctcatttatgttaaatatgtgtatgtctaaaacttatgtatatgcaaaatattgtcaacaagtggctgatgggatcatctcagggtggtgggattttaaatggttttttattttaattaattaattatttcataaaattcagctcctgtgggaagatgaacttttaagttatttcctacacttttatacactgttcaaattgttccaaagagcaagtgttaattatataaactgaaacagcaataaagctgtttacacagtgaggaggaaaaaaaaaaacaacttatcaaggatcccttatccatgcacccacctggtgatttctttaaaacaaaattgtaaccagccatgtcctggagcagacacggtcctttattttactatgtgataaaggaggtagtgcttcttttgtaaattcgagctcttgctctgaggagggatccttgacattctgagaactgttaaatacgtatacatgcctcgtttctaaacctgaaatcatttaacagatttggttattgtctgctccattaattgtgctattctcccattgcagaccagtaagccagggctgaggggatctaaagctcctcccagcatcacacaactgagagctctcccagacacatcccctgggagctagtagatagactggaataaaaattttgagccttcacagtctcccaagccaatcttttcatcctactatagtgtaagcttccatgcaaagccaccctcccctccactgttctctggagcagagcaggtctacagggtcaggctgcctggctaggcccctctgtgaatgccccttgattagagaaccactattattctcctcctcatagtccatggaaaataaatacaggaaagtcagcaaactttcaagaatgatgatgctggctgttttcaggtcccagtcatccctgcagcctggccgtgccttctgtaagcctgtttcttcataagctctctgccagcaaaactcctgcaatagaaaaccatctggagaagagccaggcaaaggccttgatatcggtgttctgggcgctgggattgatcatgcagagaccagtgcagcacctaaacagggaccatttcctccagcctgcccacagctgctgccctcggggcttgctctgacacccaatttttaaaagcaggctcttagaataataaaaccagagaatctttgaatacagaaccattgactgttagaatcataaactattgagagaagaaccatgaaattctagaatcttggcgttggaagttacctcccaggtaaatgggttctgtctccccacctaagcaacaggtatttcttctgaggaaactgggtgcagcaatgatgtggccacaacaccttgtagatgtgggaagatgtccacggtggccacagtaagaagcctttttgtggtctctaccttctgaaatagtacatgacgcaagaaaatgtccatgcttgtcacgacaaaaactactattccctggaagtctgtggtacttttgaactctcttaaaactttaccctccttgaagaaggtttcaggagaaagaggaggccctggaaactcttgataatgccctcagcactgcttccaaggagcgccagtcatatagaccatccctgagagaaacaagagaaaacgggaaattctgacttctctctacttcagaactatgagctattttagttggcatttttgcccccatccaactttttttggcttcgctatctaaaacaaataaataaaacagctgatgctgtgaactgtaaagaatctgagctaatttggtcctcccctttctcccatccattgcagacttcggccatagcgcgtgagcattagaaaacaacttgtcgcccactcaactctctttctcattcctaaaggaaaatatttatattacgccacagaacgggtttccatgacagtgacgactgtaacactgttgccttagcaaccacttgagtccatcttgaatgatctgaatccccttcacagacaaataaggaaaatctgtcaaaagtgccattccgctggtgggaagtcctggaagacggttttctcgcgccctcgttctccctccaggtccgtccccccggtcccccagtacatctcccctaacgctcactcgggaactttccatatttgctactctttcaagagcttgccctcgcccttctcctagtgattagaccctaatccaccatggagacgctgcccagagctctgcaaagggttaaggactggcaggcagagccgtgccaaagacaacaagagacagaataaatacacagatcatcctttttatagggccttgctcttgcccctggagactgggtgcacgtttttctctatcagtccagagcaactctgaggggagagttttataggaaagaccagtcctccttgaggttcagctctcagtcacaacaagtgggcaggttgcctctcgggcctcagtttcctcatctgtacgataaaggggttgagtggagggtccttctggctcttacactctaggaatttgggggaatcaagaatgtatcatctggccgggcgcggtggctcacgcctgtaattccagccctttgggaggccgaggtggatggatcacttgagatcaggaattccagactagcctggccaacatggtgaaaccccgactctactaaaaatacaaaaattagcaaggcatggtggtggatgcctgtaatcccagctatgtgggcagctgaggcaggaggatcgcttgaacccgggaggcagaagttgagaggttgcagtgagctgagattgagccactgcactccagcctgggcaacaaagcaagattctgtctcaaaaaaaaaaaaaaaaaagaatgtatcatcttctttctcccaaagtcatcagatttcttgtagcatgcctacagagaactcagataggacatcaggacaagtgacatcctggagtgacatggagcacgccagcattcacagggaggtgcatcttcccccatcacacgtgtgggcacaggtgaaaagcaccgtcggcatcagcggcagtggtgctatcagcaccgtaagcacacactgcagaccaggccactccaactcaacatcttttactggagaaggtgctcctgcaggctgattaaatcaataaatgagccctctcagggaagcagcgacttttctcctggaggaaatgttttcaatgcaattcatatccatctctggagttttctttgcctctttccttattgaaaaacagcttgaaaagctagaaatgctgacctgttttctttcattcatcttcctgcttcttactgacagggagaaagctgttttaagagagaaaaagagcagtttaaatcgtttttataattttactagccggcaagaaaatcactttgctggatttgtatggagactaggagaaatggaacaaaacatgggtggagggccggggagaaaagaaaaagaagaagctggtgccactttaggaggaagctgaaatacctcttcaccaaagcccttcttggaaagtgtaatatctacaaaagtcacttcagaccttttcagacttctgacctaactgagaggcaggatggagtgcaggagtttagagtgggctttggagtcatacgaaagtgggaatgcactttgctcccacatcccgtcttgcctgctggccacagctgattagagtaggcaggagtagatccctgaccttaagacaaactaaacacggcctgacctgatctgacccaaaaggattggctgggtcagctggttttctttccttaggagcctgaataggaagtaaagaaagaattcagcctggcgcggtggctcatgcctgtaatccc

SEQ ID NO: 1881157 - DNA, 4001 bp, Homo sapiens
gctctaaaggacttccatattcatcatattcatctagaaaaagctctggtctccaaaatcatgaaaactcgtacagctgttgccttggttttacagtttttcatgttgcctttgaaatctttgaagtcatcttgaaaagtccatctttaaagtctcaagtaaccaggaaagaaagaacagcttgaagatctggaaagggcatgtttgatcctaaatcattaaaggtagcctatctaggagaaaaaccaagtcgcctttggaatgctagtggaagggggaaggccccggttctccaccctggttattagttacctaaaacatattttaaaaaccgcatatgtccctgtaggaccccatacattctgattcaactggtctgtggtaggaaaaagtggcagcttttaaaaatttttagaagctttttgcgaggtgactctaatgttaaagcagggctatttccaaaccccctggaactctagcaggccagtgacaattgtatcacacctacagactcatcactttaatgcagttgcttcatgttattagataatatccctgccccacaacgcagaagactaagctaggaaagatgatgtcatacagctcatccctccttcaaacactggagcgtgatgagtgcagctcagttccaacacttgggtctttatttattattattattttttgtagagacggggtctcgctatgttgcccagactggtctcaaattcatgaccttgaatgatcctctcacctcgcctctcacagtgctgggattataggtatgtgcccagccctggctcctcaacgtaagacatagcactgtgccccaaccctcaactccaagaatggctacatttactttctgcctggcactgttctaagtgcctaacatatctcaacatccctaataggttggtatcatctccacttaacagatgagctgctgggatctgagagagttaagtgacttgttaaggtcacaaacctgtttctgggtgggtccggactctttcccaccatatgccgtcacttacaggctgtgagtttatgcccagcccccctcaaggagctgcctcctgctttctattgcataatcaatatcgacacctggtgtaggggcgctctgcagggtggggaaggcctggcctggagtgagggatcctgcatctcagcatcaggccctgagtaggcctctgcccttgtggtagggtaacccaccctccttcatagctcagaggtctgagggggtttgagggaaagactagaaagcctaggaggcttcttctatctctcacccctcctcactcccagtcctgtgccacaggatttcactcacagctccttccacccccacccttcccctgaaaatctcactgccctgtgacttctctatgtgccactccctgtgcgtcagacccccacgatcagctgcccactgcctatggccaccccaattccttagaactacacttatcactgctcacccttctcctactctccccctctcagaaaatgacaccacatccaggaaactcggaaccaccactagcccagcgctccctcttccccattcactcagtcaccaagtcccctcaatttcaccactcaagatagttgtcagaccatggcgcctgtccatctccatttccctaggataggccttggtgtctgaggccaaccctgcctcatttcctcctaacccccacccaggccttgtgctttgtgtaccaccacacccaaccaaaggtagttattacttctttggctcccagcactcaactgagcgccccagctcttcctcacctgccgggacactccagctgactccagattgcgacgcaggcgtttacgtaccagcctttctccaggttcagggcgctgccacatcttcagccccgacccgccgcaagtctcatttcctcctaaccccaacccaggccttgtgctttgtgtaccaccgaacccaaccaaagctagttccctgacttgctcttttggctcccaggagcctttaggtaccggccttgcgccaggtttagggcgcggccacacctctagccccgccccaccgcaggcccaacccagaggctgctttcggttaccctagggttcctgggccctggacttcaacccggtctgcaagccccgccctgattagctgcctcccgcaccggtcgcggcgccccgcccccaggcgcctaggttcctccccttatccctgcagggattgggccttgcagcaccgcccaggctcggattggtccgaggtgagacccgcccctctgcccattgggccttcgggacagcagaggagcagtgtccggccatggccggagcccgcaggctggagctaggcgaggccctggcgctggggtcgggctggcgtcatgcgtgccacgctctcctctacgcgccggaccctgggatgctcttcggccgcatcccgctgcgctacgccatactggtgagaagggggcgcgcccggccactttctgcctgagccccgcaccctctctggtggtctcctctggggcgcccctgccaatccccgcttccccctcccgcagatgcagatgcgcttcgatggacgcctgggcttccccggcggattcgtggacacgcaggacagaagcctagaggacgggctgaaccgcgagctgcgcgaggagctgggcgaagcggctgccgctttccgcgtggagcgcactgactaccgcagctcccacgtcgggtcagggccacgcgttgtggcccacttctatgccaagcgtctgacgctcgaggagctgttggctgtggaggccggcgcaacacgcgccaaggaccacgggctggaggtgggaccagcctgggactctgtccctttcccaatttcctcttctcccaaagctttctctcccccaagaaagcatccctggagaaaagtctttgcccctctgaccttgccctctccccagctttcttggtggagttgggatcgtgatcatctatactctgaattagtactgccaacctgggctttctgtaaaggtctttcccaccctttaccaggagagatcctttctagaacacactcatccatgtctctctgctgttccctattgacagtgtgatagattatcacattatctaggtgtggcaacctaggttttattcttggggtttgcttttcttgtgtaggagatgtggccctgatatttcaggcagggctagtagatagattatgtatgaaggtggttctcaaaatttggcaggtagcagaatcatcggggcgtcttattaaaatagcgatttctctcagcattcctgcattggtggtggggcggggggagaggaaacctgagaatttgtagttttcaaaagttcccaaataatgctgatgcaaataatctgaggaccacattttgacaaccactggtgaaagggtatgaatacatctttgaggcagtagccactagaggtttagaagcagatgtgggaaagattaattgatagagctagataatatgttttgggtcattttcctgcagaaggttgggccactaggctttagtgaggtgtgagccttgggcctggttctgctggagtattaaggggtgaggcctgatctgctggagaaaggatggagttaagggaatgagccacctggggccctagtgtctcctgtctccttccttttacaggtgctgggcctggtgcgagtgcccctgtataccctgcgggatggtgtaggaggcctgcctaccttcctggagaattcctttattggctctgcgcgggagcagttacttgaagctctccaggacttgggactgctgcagtctggctctatttcaggccttaagattccagctcatcactagaggcagccctccatggacccatgaaaactgagatgaggaccttggtactagggagggagggaaggacgtgggaatgttttcttattggatctgagagatgatacatgataccagatgaaaagaaggagaagtgtg

SEQ ID NO: 1881158 - DNA, 4001 bp, Homo sapiens
aagaggtttaattgactcacagtttcacatggctagggaggtctcaggaaacttacaatcatggcgggagacaccacttcacagggtggcagcagagaaaatgagggcccagtgaagggggaagccgcttgtaaaaccaccagatctcatgagaacgaactcactattgatacgaacaggagacagggaaatactgggtagaagagggtggttcctggcaaaggccccacccttaagcctggatacctgctgccctaagtaataggcattcctgtttttgcaccccaaaagttgccttctggcctgccaccacccctatcctgtatccatataagccccaaaccccaggctccagaagcagactaggagacaaggagacaaacagatggcagaatggtgcagcagaggagagaagagaaggaacgtcaggaggagtttggctgaggatgttcggagaatcagccactggacagccaaactccagggcaagatcatatttctactccatcccctgtctagctccccaaccatcccactgagagccacttccaccactcaataaaacccctgcattcatccttcaagtccatgtgtgacctgattcttctgggatgctggatgagggcttgggatacagaaagttgtcacactagccccctccttttgcaaaaaggcagagggttcactgagctggttaacccttaagccatctgtggatggcaaggctaaaagagtgcactgtaacacatgcacacttgggctttgaaagttacagacacccacccctagatgctgccatagggctggagcccaaaagcacttgccccagttcctgcacctaccggtatgcatgctccccatctcttaaagagtttgagcttgcagtggcagaacagagagccacacccctgtggcacaccctgtggtgggggaccaggaccagggaactctctcttttcactatcatgagaacaggctgggggaaccgcccccagcattcatttatctccacctggtcactcgtatgacatgtagggattgtgggaactacaattcaagatgagatttgggtggggacacagtcaaattatatcagtaacagagggagatcattctaggttgaagaagcagccaatacaaaggccagagcctttgtatttgtgggattgttttggaggaacagcaagaaagccagggtaatgaagcggagtgagaggagggtggcaggaagagagttctgacacaacatttccaaggccctgttgcagggcattagcaggactttgcactttactgggagtgccatggggctgggatcttttagagggttttgagcagaggcctgacatgatctgacagtttcaaatggatccttgggaggctgaaatgagaatagattgaaggagaaaaacctgatttgatttatattgtgcaaagatggctctgactgttgaggaacaaactgtaagggagccaggaatgcaaacttcccacacactccatccttgcagactccctggaagattggtcaggcattggatattcactacaaacccccaggcccctcacacttgtaccttttgcttattaggaagtgagtggagagaagacttcagagtatagcttatgttgaaatgagacttataccaaccagttagccccatgactgggaaagggagattacgtcagtgtccttgtcctgctgagatcaagttacaaatcaaatcatgccacccctttaccacatcaagaactaaagcaataggatactttaaaaaatttcttccaaagagctctttgttcagcccacacttgcaggctctaaagttacaaacaggaagacaggagagtgagcaaagtcagcatgccctaaaaattaaagactttttacctgttgctccaaacactgtaattactttcttgctggccatgttatcaggaaaagagagagtcagtggagtaacagaactttccctggagcagcgacaccagccgaaatgctgtgtttcttctctggtgagaattataaacccattccaattaccacgccttttattgtgcccctccttgttcctgttaccactagtccacttactcactgtgacactgcaattttcaattttctttttttctttttcttttcttcttctttttttttttttttttttttttgagatggagttttgttcttgttacccaggcttgagtgcaatgtcacagtcacagctcactgcaatctccacccactgggttcaaaggattctcctgcctcagccttccaagtagctgggattacaggcacgtgccactatgcctggctaattttttttttttttttttttttttgtatttttagtagagacgaggggatttcaccatgttggccaggctggtctcgaactcctgacctcaggtggtccgcccaccttggcctcccaaaatgctgggattacaggcatgagccactgcactcagccaacactgctgttttctttctttctttctttctttctttctttttaatggagtttcactcttgttgcccaaactggagtgcagtggcgcaatctcaactcaccgcaacctctgcctcccgggttcaagcaattctcctgcctcagcctcccaagtagctgggattacaggcatgcactatcacacccagctaattttgtatttttagtagaagtggggtttcaccatgttgttcaggctggtctcgaactcccaacctcaggtgatccacccacctcggcctcccaaagtgctgggattacaggcatgaaccactgcacctgggctgacactgcaattttctaaatgaagactgattcactcacatatttatttgttcagcaaatgtgcattgagtgcctttggtatacaaggcattgaactagatgtcctggtgatgtggctcttgtaagggggctaagctcataaataaataaaactgtagtacagggcaatggcaaaggaaactcaagggacctaagtcatggaggagaagcacaaaacccagaattagggaaggttttctcagaggagataatgctgcagttggcctgaagacccaacatgagtcatttattcagggagtgtagggagagaaaccatcgcaggcaggaaaaacttcacacagccaagcccaaaggcagggcaatgatcccacagggtcatgatggctgcagcaatgctatgtgagcagcaggaaataagacggaaggagagcaaaggcccagaacacaaagggcatgctaggcatggtgaggagcttggcttatcccaacagccacagcagtattatgagatcttctggcagcagagtagtggctgggttgaaataagacaatgctggaagcagggacagtcctaagcttatcctgaagaaatgacataggtgagaaacactaaaggcttgaacagaggcagcgtcaggagttgtattgtgtcctccctccaccaacaaaatccatggtgaagtcctcatccccagtacctcagaatgtgacctcatttggagatagggttctttttttttttttttttttgagacagagtcttgctctgttgcccaggctggagtgcagtggtgcaattttggctcactgcaacctctgcctcccaggttcaagtgattctcctgcttcagcctcccaagcagctgggcatacaggtgtgcaccaccacacctggctaattttttgcatttttgatagagacagggtttcaccatgttggccaggctggtcttgaactcctgccctcaagttatccgcccgcctcggcctcccaaactgctgggattacaggcgtgagccaccatgcctggcctggagataggatctttacaaagctaatcaaggtaaaatgaaataattagggtgggtcccaatccaatatgactggtatccttggtaaaaggggaaattgagacacagataggtactggggaaaggcaatgtgaagatacagggagaacacctatgatcatgaagctg

SEQ ID NO: 1881159 - DNA, 4001 bp, Homo sapiens
gagagtagctgggaactcgtgcaggagtgaatttctccccttctccagttgaaagcagttagcgggctctgttactgggggaaagagaataaaagcattttctgggaatgcgcttttaaaacttagaactttaatgacaagtaagtaaaagaacacgtttcccgagccagtcaataaataccgcgtgagccgcctcacccgccaagcaagtggcctcccagtcctggccgcagcgacgtctccaactccagccccatctgtgaggccgaaacgctgcagtttcagccgctgagcgccagaccagggacttagtggccagcctgccttccctttctgagctccaaagtctgggaataagtcgaaccaaattaaatagagatgcatctactttcaaaaggctttaaaaacctgtgactatcccctttccatgtgccacactgcctggtggatataaattgtcacactctagtatctccagcgagtaaaacagaaacacacagacacacacaacacacacacacacacacacacacatatgaatctcaaaaaaagtattgtcgtaactgtgacactgtcttcacagccttgactggtattaggatttcttagaacggaattcattaaaaggaggtgattaaccttatttataagcattgcctcaaagtggcaacttaaaggattttaggaattattcaaaaaatgtttctgttttgttgttttgctttgttttgtatgttggttgtcgtttttatttggggggctttgttttgttttgcttttaaggatctaggaatgtgtcttttacccggtgtccttcgctgcccttttcagggagaaattggactgcctgacacttgattaagcctcaggacttagaaagatcatttcctcgaacactaatttgagcgaaatctggattgagagtgtaggtttacacgcccagctcgaatgtctaatgtatcaaatcctcgttaacgaactgcccgctccgtggccgtgtcagccaaaggtcagccccttgcaacagggcaccgtggttcaaaagccctcttccagggccctacctccccctcccaccccaaaatccatctttcacatttcaataataaagcgcacggagctccaactagaaatgccaaggttgtttttctttatttacttctttcttcacattagtgacatgtaaacgacgtgacctaaggcaactactgaaaaattaagtttattttttccagtgggaaggaagtgcagttagtggacaaggtaattgtcgaagcatcctcaagaggcacgtatatttgagaagctgtgactcttagaaaccttaacttaaaatagtaataataacaatttcacagcattcaaatggaaaccgcccagtaaactttgttgaagaccttagtgattagaaactgcttagggaaagggacaattctcttcccccgctgcccctttccccttttagagaccagcagaaagcttattcttaaaagatggctttggtgtcaacagggccaagaggatccagaagagtgggcctgcactcttttcgctcccgcctcactggggagccccgcgacattcctgactaccctggagcgtacggcgtataaacgtatacaccccagcggcagaggccgaactagcgcagcagttccaaatcagcccaacttctcagcgcgcgcctcaggccacgcgcgcgcacgctgtcgcgggcagagtccgctagtaaggtggcggggcggggtaggggaggaacgcgacttaccaggtctgggatctagatttcgggcagagttggtagctgagaggccagcagacagattcagtcataccggagacgggcaatttggggaggtctacggcgcgagtggagggaaaggaaggcaccaatgcggtttgggtgtcccccttcccttggtccatgcccgcactcccgccgccgcctccacatactaagctcggcctggccgggagaggactcagagccctcctcgccgccatccagccagagcctccggcgctcccgggctctggcgccgaccccagggacgcctaggggcggggaagggatgtccccactctccagcccaggagagggtaacagcgttgccggcacggacgctagctgccaagctgagcagccggacaagtccgctgcgccgggccgctggcttgcagaccccgaccctctcccgccccagcccctcccttcctcaagcccctcgccaaatgaaaagggttctttgggccttggccttttggggaagacgcgggaacccacgctgagtttgagttttctgttcagagcaaggcccacacaggtcatcgttagcttggagtccttagagtctagatagcccactccccacaatactcaaacacaaagggacccaaatcacgaatgggtttcttctggagtggtccctgtggcgggggtttggaggaacgagggtttctgcgcccctgactagacgctgggagccctggcttccgggacctaggacagaactcgaaccctcatgccccggccactttcttcctagtcatgagtagtgaggggtgagtggcttctgccaggcctctgtgggcctagcactcggtggcagtgggtgagggtcgttgagtccggcaaagagacatggagcagacgctcttcagccatccttgcgttattgagctcggagactcgggagtttgggtaggaaaaaaggcactgtcctggcaggaacatttccaaagcctccctccctgcgtcctcaggttccacgctgaaggcttggggagtggtagttgtcgggtgaactgatactgtggtcccggtattccaaaactggcacagatggaactggccctgggatagactgcagtgtgagcccggcactgacctaggcatcctgttcccagtgagggaaatgaaatgataagctccacaaagtgggtctacctgttcaaatgaaagtaaaaatctagagtaggattggaatctgtcggcaaccacttctgatgttatgggacccaggattcttactaaaacacccaaaggctgtagatgttagtcggtcagaggttagagtgacccagggaccctctgttgcccctcccctttgtttacaagcgttggccactccacctagaaagattatacgctcactctggaaatgtcagcacattggccacaaaataccatgcagatccccaaggacttcactagagaggaaagcaataatccagcgactgaacccaggtgtctctcaccaaaccctaccctttctggtctctaggccagggcagttcctccaccagtcccgacgtttgcgctacctaagcacgtttggatttaacaggaccatttcaactccaagacaggcaagctgactggtattatttgcaaagggtcaagtggaaaccctagaacagtcattcaagcaaatggctcctagtatctcaaatggggcggtgggaggctggggaaatgccagagagcaagaggaagtaggagaaaagagtgggagagagaggcggaaagacaaagacaagccggcacccagacttggatctgggcaagggatgagggaagggcctagggaacctcccccaagccgctgcccggtcacctggggcctgagctctgactaggggtaggctaagtcttctccgaggggctagggatatgagaacagccggggcggcagctcgggcttgggaaaggataagagaagaaggcctccctggtaggcccggtgtaaactggaagcccagccacccgatgcactggggtgtggccggctggggctcgagcaccatgcagcccccggccctcggcggagaggccctgacaggcccgctcaactcgccgttccaatggcagcagccccaggttgctctaccctctgctgtcggctccgcagtgtgaactcacttaaaccagcgcggtttgaaaacaaacacgtgcagctaccccgccgcactattttgggagcctagccagcgactttcac

SEQ ID NO: 1881160 - DNA, 4001 bp, Homo sapiens
tggtgacggagtctcatctcaataaacaaacaaacaaaaaagcacaggttactttattacagtactgaaaaccaagacagcacatggactctctttgaatatataacctaaaaattgaaactgtaaaatttaatctattatacagaatttttttcatagttgtttaaattttactgtttgcaattctagaaaaataacatcatgttggaaaagtaagcagtaatttaaaatgaattatattttgaaaaatatagaagaatgacaagaattctaaatttttgtgaatattttacccaagaaatgtgttttagaatcttttgagatttgaattagaaaatattgttggtcaaattctttcactgtttaaagccaacaataaaagaataggaaaagaatgtagttatttccaactctgtgctataacaataagatagtaacgtctagaaattatatcttaaaaccttcagagtaaattaataaaaattcaacatacttcaagttatcactgtattttttctataattaccttttcgtttactgtttcaatttattgaattatacatacaatgaagagcacaataaatgtacatacagcttgatgaattctcacatagtgagcctgtgttacaagtaatctattattaacttttaagatgatacagtgctatgatcgaaggactaaaatgatcaacatcaccataaaaggcagagtcataaacaagaacaattaagtgtaattaaatcaggtgggaggcacacttacaaaaatgaaacaatttttggttcacattttacaccacacaggtattctgtatctttagaacatgagaaaatacatattctcagtctgataggtctctgacttgggggtttcttttactgtactttttttctctctagtagctgaacattttaaagcaatcagcagaaaaaatataaaacttcagaaccaattagacttttaaaagcaacgttcttgccctttccagagatacattccttaatcctcctacaaatcatgacctcacacgataactttaagggtgaacatcaacttatctacattttggtgctttctttcccttaagtggcagatggtttctattaacctaaaattgaagtcattgttgggggacccctaattccatgtctagtcctagtgcccagaggctaccaaagacgatacgaatagcttctcaggcactctacccaccgtttaccttgttaatacaaatctttcccagacctgggtcccgaaattattttaccctgcagagcagaaatgttacggtgttcattcagtgaactcttccctagtttttaatctttgtattttctgcgtatacttcaagccaccagtaactttcccagttaccaagaaacagtgtaacacaggtcgctatttgttttgttcggaatttacgagcaatttaaccacacgtgattagcaacattaagggggctcctccaggcaaagaatccacagaatgagaggcccttggtacccaaatgaagcaacaatgaaagatcggcgaagctcagcaaggttcctgagcgccacggacgcctgctctgatttcaggttgccggcgcgcgcccgcgggtctgcctttatggacgaggcgcaagagggatccaggaaagacggtgcccttagagactcggagattagcgtgggcaaccctgccaccagctgcccctgccaccagccgcccccacaacaaaaaggaggaaacgctccgcatcccgtcaccaggacaactctgtaacccgacaccgaggctcaagattccgcatcccgggcagcgaacacaggagaaaagcacatcgcggcccggccgcggggctccaaggcgtccgtgccgccgctgttcctggggtgccgagagcgacgcggggtccaccctctccgccggcccgaggtccgaagctcggcccgccaccgctcccggccggcgcctcccgcacgtggcggccgtgattgtcccggggcggtatccctccgcgcccccgcctcagtctccccccgcccttcccgggaccctccgtgcccgggcgccgcggaaggatcgcacgcacgcgcgcgcgcacgcccagccgtgtccgcggaaaacggagggcgctgcggtaaggagcagccgccacaggcacagccgcttcgcagcctcccgccgctggtttgtcagccccgcggctgcgggcggccgggcggccgagcgcgctctgaggttcgtccctcatcgctgaacccgcgtcctcccgccgcagctcctcggggaggggggcggtcggtgcctgcgcagagccgcctcctccccgcccccgccccgcctccccccgcgccgccgccgcccgctaccgccgccgccgccgctgcgcctgctgctcctcgccgtccgcgctgcagtgcgaagggctcgaagatggccggttggcagagctacgtggataacctgatgtgcgatggctgctgccaggaggccgccattgtcggctactgcgacgccaaatacgtctgggcagccacggccgggggcgtctttcagagcattacggtgaggaccagtggcggccggtaccctggtccctgcaccggagcggggtggccggccgcgggggcaccgcagcgcggggctggaacactgagggccgagcccgcaggtgtgctaggcagcgggcgccgaggatgcggctgccgggcgggcggggaggccgaggcccggggacgccccctcacccggggctgcgctgacaggctgggggcggcggccggactccttgctggccctggccgggcgcccccggcgttcccagcgtcggtccaggtgcccgggttgggggagggggcacgcaccggccagggcaaggggaggggttccttttttcctcctagtgcggttcccctaggttctcttgaagccctgaggtttgctatgcacgttctggggtggaagcgggggtcggggatccgggctggggcgcgcgggccccgggtggaggtccctaggctctctggccggctcttgctccgcggacagcgcgcctcccgcgcctccggctgtgggaggcggcggccccggcccggcccccgggattctcgaagcgactttgcgtaggtttaccgatgtccaggcctctggggcttgcgagagatgtacgccgaccgcgtaggtggattcgtgaatctcgacttcagctctagctctataggttgttttttttttttttttaaattctccaagatggcgaactgccattgatttctcttctcatatggagattcatcgatatacggttatccccagttatgcaacatagctcaaaaaaggggtgcttttcgggggctttcaattatctgcgaagaccaggagcacacttcacttctctaagtccctccctctttagtggtggcagtaaaggaactaatgcagttttatgcttcacattgcctgattttcttgagacttgatggttttgagttggttgcaatatgtttggagaatatttgccacaaaacctccagcttattgttttgcctgtttctgcccaaggctgtttctaaaattatgataattgtactaaatacgagaccattctctttatttcttagcaccacgctccctttccattaagcaccaaaattcaggtcccctattaagggtgctaattattcttttaccacttaacatggtttaaagtctaactttagaactcagtccttgatagtagtactttaaggtctcgtatacccgcagtggactacaattcttgtagggaattggcatctggtcatcaacttttttcctgcagtcctcttgtctttgtgtgtgagttcccgctgtctgactaggaagattgcgggagtgtgcttggaaatggctggggcctgctatgactctgcagttctgatgggggcgacgccttccttcttattcatggaatgttagaatgcacgttttctcctttccggttctggtggctacctcagtttctttcccaat

SEQ ID NO: 1881161 - DNA, 4001 bp, Homo sapiens
actcaagaactttaatgcaaacaggcaggtgtgagggaagagagaggaaaggattgctttcaatcaccggcagcaagataaggagcagtccaggaaagttttcagaaggggatgacattgctattaagacttacgagctgaagggaattcagtagctgcagatagagcctttcagatcgaggaggtggcccgcgaaggggattccactgtcacaaaacataaaggctctgcacttccgttccccactcctcggagaaggagggtaaaacacgaaggctctgcacttccgttcccccactcctcggagaaggagggtgagaagagctgggccctcagaacccaggaccacataagaagttttttctgtttaagacagccttcttctccactatttgtctggtaaatacctcgtcttcaagccccagcctaaggacgcctcctccgggaagcccaccatgacttttccaggcagggttagttgtcctgtctgctgcactcctactaccctctgttctagagagttagggaaatttagaagttaggcaaacaggctctgccaccattctgcctgagttcaaatccttgctcagccactgcgttgctgagtcatctgaagcaaggcactcccctctctgggcctcagttttaccatctgttaaacggcgtaacgatggcactgtcctcctgaagtcaccgtgaggatgaaacaaggcaatgtccctaaaccaagtgcctgccgtagtgtctgctcttgttactcataaccatgggctgctcttactggacggtgcttgtgaccgcaagaaccctaagggccagggctattcatctctgaatctctctctgcagtgtttagaggtgctgtccacaagtcaggtgttcaatttctatcttctgaaggactgaacaaaacatggctatgaaaagggacaaaatgaatcaagccttaatgcaaagacacagtaaatgcaggtgaaatgacgggaaaggagaaaggaatgtaggaaagtaaatgggggagaggagacggtgcaccgccttcagaggagaaaaattcctattaaattcctgttccgcctgtaatctcagcactttgggaggccgagttgggtggatcacctgaggtcaggagttcgagaccagcctgaccaacatggtgaaaccccatctctactaaaaatacaaaaattagccaggcctggtggcaggcgcttgtaatcccagctactcgggaggctgacgctggagaatcccttgaaccccggaggcggaggttgcagtgagccaagatctcaccactgcactccaacccggacaacagagcgagactctgtctcaaaaaataaaaaattctcgttcatctcttaacgtggggacttgcccatttatatttggacggtatttttctctggctgtcccacttcccggggccttggagctccctcccccgcagggcggcttctctcctcctcctccctcctccctcccgctcccaggggaagggccgcggccgcagccctgacctcgcctcccacgcgggccagcagccggccagcccgcgggcggggcaggaagggggagccgaggctccgggcacccgagatccttaactgcagcttccaaagccctggctgatcctaatcagtgtgggaaaggagcgccgggcccagcccgccggccggagacgccgcctcttttcataaactttatcgccgcggtgcacagccgctgataaagcaccataaataaacgagcgggcgggagtgcgcggctgtctggaggctgccggagcgcacgccctgcctcggccctgcagctcccgggggaaatgaatcacacgccgggctgcaaagagcagcatgttctcctctccagaccaaggccgtaaataataatgcgttctttccctacgtggagaccctcaccttttgtcttgtgcattccgtaaaaagctcaggagtttccttccggctgcctggcctcccctccttgccccggggggttaggagtgctctgttctgacttaggcgtttccctagggtggagctcctgggcctgggttgggcctgggcgtgtggctccgtgatcgtaagtcccctctggctcttgcacaacagaccgaggctggagcagggcagggaggccgcagtggggcctgggttaggaggggggtggtttgacatctctagtggtaagtgatggtgagcccggttcccgccgtggtggccacggacatgtgtggtggatagcctgctgcagctgagtcatcgaggaaccctgggtacagcttattcagaggccaagggagagtgcataccctgatcacaaagaaagaagactttgccccacttgatggcgtgttcagcaggccgcatgatccgtgtcccttagctgttgaagttttgacttggggggtgcccgaagttaatctatggtacaattttggggagtagagtttgaggatgattccatgaacatgaaacaatctagaaagtcagtggtgtgtggaacagcccaaagcaggccagctccgccacaaggtccagtctctaacccaaccctgctgccactcagctctgtggcctcgggcagccactgcccttctctgagcctcagtttccccatccttctaatgatctctaaagagatcttccagctcttctgctcacttagtgagaaataacatccttgctataaattcttccatttccgaggtgtcccagcacaggcccctctgaagaaacactgtaatgtccacttagaagaaaccagggcgtgggccatttctgtaactgacacctcgttagcgagattagcactggaaattacctcctggggagtttacagaggttcaggagccctctagccagaataaagtcagcttgtgaggtaaaaagatttaaaaataaaatccagtacttgattacagcattaggtcagtgtttctctgcgccccaaggataagctccatggtggctggggttctgcttcctgtgagaaggattggctggcttgaaacatctcatccccaaaagtcaaatgtttcctttagtgggaagcagggccgggaaggaaggaacttctggttgcagctctagagagtggaatctaggagtcctgatagattatttatggttcagcactcctagagagtgtggattttgggagctgactcctccagccatggccaacaagagccgatcactcatgaaatagaaatgaacaatggcagccaggcaccgtggctcacgcctgtaatcccagcactttgggaggcggaggcgggtggatcacgaggtcatgagttctagaccagcctggctaacatggtgaaaccatgtctctactaaaaatacaaaaattagctgggtgtagtggcgggcgcctataatcccagctactcgggaggctgaggcaggagaattgcttgaaccggtgaggcggaggtcgcaatgagccgagacagtgccactgcacttcagcctgggcgacagagtgagactccatctaaaaaaaaacaaaaataaaaaataaaagacatgaacaaaggcctggttcttctagtacccatttctgacaccacatgtcccaggaaacatgtggccccagacagccttcatttcctgctctccggacagaaggccactcagtcttgtttcctttatttgcataatgtcaagaaaaatgagtcacaccagattgtcatgtgttaagtaatattggcaaaggtttccaactgagtttagagttgatttcttaccaaggaacaatcactcactctattgctgatttattacgatgtgaatgtgatcattctctgagtctcagttttccatccatgaatccttgtgatttttaatttttcatgtaggactgtcacgagaagtaagatttttaaatttccagaacagaaataggtaagggaaacatctaagtgtgactcctccaaaatcactcttgcttccaattttgtctgctgttatggaggtcagcaactaagg

SEQ ID NO: 1881162 - DNA, 4001 bp, Homo sapiens
tatgacgtggggctttcccagacttgctctgacttcttagagatggcagaagcatcaccgaccttattccccaggaccagggcactctgatgctggcagacaagcccttcttcctggtgctggaggaagatggcacaactgtagagacagaagaagagtcctcccttccaagctctggcaggcaatacagtgctcctggtcctccagaaggggcagaaatgggagcccccatcagaacaggtgaggtcccacctgttgggggagaaaagtgggaccctgggagaagtcttcaaggggtgtaaccatctgcttgtctcaatgcaggggatgaggcacccactgtctgtctcccataagcctgccaagaagatggatgtggcccgcataacctttgacctgaacaagctgagcccacaggacttcatcagctgcctgaacgtgaaggcgactttctatgatgtgtactccatttcctatgatctacactgcatgaggctgagtgcatggtgaagtgagcaaattgggatttgctggggacacctccatggcaccctccatcccatcctatctctttcctcatctggactcatctgatctgaattggtctttgatttgtctgtgcacttccactagagtgtcagctcctggaggacaggagtcccattagccctgctcatccttgtatcacacctagtgacagcctggtatgtcgagggtgctcattgcatgttggttgagtgagtagccgatggcaccaggacaagcagcaaatcttgaagctgaggggaatcccaaatcctatcttcagacagaagtctgctccttgttcctttctgggatgggtgaaatgcggcctggggaggaggtggtgggagagggaaaaatgcctccgtggattctgttacacagaagccagtgggtatactatctcccaccaaaacaggggagcagctccaagtatccctggcaacagcagccacatgacctcaacctcgccaatcagaagaacccaacctacacagccacagtgattggctaacacctgggcatgtgaccaatcaggtggcaagggtcaggacaagggttggtagcaggggagagaaggtctatttctgttgggtggctggggctgtgggtgccatcttgtcaccttgaagggaaagcccacctgagcacgacatccacactgagggaaggacacagagtcagaggttgggagagagtccaggtgacattattaagcacccacgtgcagccaaggtacagttaccccagaacattctcactgggatccaggtggctgtgaaggtcacctagagaggtcagcagagctcctccagcctctggagttgacagctgtgaagtcgatataataagggccccgaatcacccaacctcaatcagctccttccagtgactgccatcgtgggcactctacactgagtcatgtagcatgccagctggggcagctacttcactacatcctagagccccaccaaaagcaggaggaagaggcctgaggcaagttccggcaaatactatctgccctacagtaccaccaccaaaagaaacatttccacaggaacctgatgccccagaatgtacttgtatttacaagatgccaactacaacataaaatatctttgtctttggcaccagatttatgataggctacaagctggacaccttctgtgcaactccctgttatactgccctatggtgaatgggtagaggtggaatctggagtaattttttacaccacaataaacagaaccttaccatttgtcagacctttgtggagctgaagaaacaaatactgtgtggcaaatataagatacagttgttcctttcttcagaaggagaagaggccaggcgcggtgtctcacgcctataatcccagcactttgggaggccgaggtgggcagatcatgaggtcaggagatcgacactagccgagaccaccctaggtaacatggtgaaaccccgtctctactaaaaatacaaaaacaaaattagccgggcgtggtggcgggcgcttgtagtcccagctactcgagaagctgaggcgggagaatggtgtgaacccggaaggcggagcttgcagtgagctgagatcacaccactgcactccagcctgggcgacagagcgagactccaaaaaaataaatgttaaaaaaagggagaaggactcatcaacacattgctgcctgcaaacccagggaaagaccaccttacaccacattatatggcatctgtaaatcaacatgggccagcgggagacaccaaggccctaccaggagctgctctttgatcacgaggttcacgctgcatcttttcgggaaggttaaaaaataataaatgaccaccaggatcacagaaggaaagagctcgtgatgtccatggaattcacgcagatcacatccaggaatctttggaacaaaaaattcacaacaccatggcctcatacaaaaatgctgggctgcaggaaacctgaggcagagagctccatcatcacagtgaagtccccgccttcagcagatcccaccaacagccacagtgcttcccatcacctgaaaaaaactcatgtatcaaactattacacttcttcagaatattggaaaatggtgcatagttcatatgttctcatttgtttatcttgtgtccaaagtgtcttgtcattccaggccactctatttcttgtgtattaataaaaagtttgaggtataataaggcctgcagatcagatgagtaaaactgaagatagtcacagttcccagaaggaaggcagggccacacaggaagcagcagggtccgtcaggaggcagagggaggggtactctgagcaagcacctttcctgtgctgcctacagggagaagagtgaggggcaatgagcaagcttaggagagggcagttccaatcattccagtccataggggtctggttcctgtcactgaggtgattagggcagtaggataatggtcccagtgtgacagcccacaggggaagtgtctggggtgcggacactggattggttggtttgtatttgaaaagtgggttgggtacagtggcgcacaactgtgatcccatcactttgcgaggccaggagctcaagaccagcctgggcaacatagtgagatcccacctcaacaaaaacttgaaaatgaaaaaattagccaggcaggatagcacacacctgtagtcccagctacttgggaggctgaggcaggaagatcacttaaacccaggattcgaggctgcagtaagctctgatcacgccactgcactccagcctgaatgacaggagaccctgtctctctcttgaaaaagaaaaataaaaaagaaaagtgtacccttcggaggaagattgctctggggaagaaggtgacgtgggagataaggggccaaggcaaggtgacttggcatatcatgaggttgttcagaacatgacgtcccgcgtatacgtagagggcaggtgttaaagctccaagttcacagaagctagaaacttggccaaggccagggctcagtacagtgtcacctcctcagagaagccttttctgcctatgccatctacagtgagagcctcccctgtgcacatgtcgctagccgttcccacttcatcccttcatgacattcggggcctgtccccctcagctcagcatccttctgggcctcccacctcacccagagtaaaagtcctcagagcagccccaaggcctgcaggacctgggccccctgacgtcctaggtctcctctcccaccactgcccttctctcaggccactccagccccatctctgctgtcctggtttccctgagccctgcttcgctctctgcggtgtttccctctgccaccacactgagcaatactctgtttgtctctcctgcacagtaccagcaacaaggagcagctggttttgtttttttttctaaattcctgcttttgtctacagcctagatcatggctgagcacataataggggtcaataaatagtaaagga

SEQ ID NO: 1881163 - DNA, 4001 bp, Homo sapiens
atccgtgggcggcctccccacacctccaggcccctagactgttgttgagaatactcgaaaagaacacagtaaaagaaaagaagaaagagaaggagaggggaagagaaaaacaatgaaaaaagtggcaggccgatggggcaaggggtctcaatccttcctcactggtccctgtcacctatggtcccatatcctgtgggatcttgcttcctcataggactccagagtgcatgccactcttcctactccctggctctaagtcctacctgagccaagagttctttccatgcagctctagcctttactttattttttttattattactttttttttttttttttttttttgacggagtctcgctctatcgcccaggctggagtgcagtagcgcgatcttggctcattgcaacctctgcctcccaggttcaagcgattctcctgccttgggctcgagtagctgggattacaggcgcccgccaccatgcctggctaattttggtatttttagtagagatggggtttcaccatgttggccaggctggtctcaaactcctgacctcaggtgatccacccacctcagcctcccaaagttttgggattacacgcatgagccaccacgcccggcttagcctttacttttaaaagaaaatagacttaaagcagatttttagaagcattaaacaaaaaacagttcctttatgtattccgtattcccatttcctctgttgttaacatcttacacattgcattggtgtggtacatttgttatcattgatacaactatactggtatgttattactaactaaagtccatagtttacattagagttcatctgttgttgttgttgctgctgctgtattgagacagggtctcactttgtcacccaggctggagtgcggtggcatgatcatggctcacagtagcctccaacccctgggctcaagcaatcctcccacctcagcctcctgagtaactgggaacacaggcacatgccaccatgcccagctaatttttttattttttgtaaagctatggtcttgctatgttgcccaagctggtctcaaactcctggcctcaagtggtcctcccaccttggcttcgtagagtgttgagattacaggtgtgagtcatcacacctggccagtgttcattgcttaaggttgcacaggtctacaagttttgctaaatgtgtaatgctgtgtatccaccagtaaagtatacagaacagtttcacctccccaaaaaccccctaggctttactgttcattgttccttcccaccaacccctggaaaccactgatatttttcatttagaagggatttacaatcactggtatcttttacttctctgtaattttgcctttttcagaatattatacagtttgcaattatacagcatgtagccttttcagaccggcttcttcacttaacaatacacatttaggtttctttcatgtcttttcgtggcgtgatagctcatttcttttcatcactgaataatattcaccggtatgagtgtaccaggttatctactcacctattgaagtacatcttgtttttttctcatttttggtaattatgaataaagttattgagtccagaattgtgggttcttggtctcactgacttcaagaacaaagccgcagaccctcgcggtgagtgttattacagttcttaaaggtggcgtgtctggagtttgtttcttccttctgatgtcaagatgtgttcagagtttcttccttttggtgggttcatggtctcgctggctcaggagtgaagctgcagaccttcgcggtgagtgttacagctcttagggtggtgcgtctggagttgttcattcctcctggtgggttcgtggtcttgctggcttcaggagtgaagctgcagaccttcacggtgagtgttacagctcataaaagcagtgtggacccaaagagtgagcagtagcaagatttagtgcaaagagcaaaagaacaaagcttcaacagtgtggaaggggacctcagcaggttgccactgctgcctggggcagcctgcttttattctcttatctggccccacccacatcctgctgattggtccattttacagagagcccattggtctgttttacagagagctgattggtccgttttgacagggtgctgattggtgcatttacaattgctgagctagacacaaaagttttccacttccccactagatcaactagatacagaatgtcaattggtgcatttacaaaccttgagctagatacagagtgccgattggtgtattcacaatcccttagctagacataaagattctcaaagtccccaccagattagctagatacagagtgccgattggtgcattcacaaaccctgagctagacatagggtgctgattggtgtgtttacaaaccttgagctagatacagagtgctgattggtgcactcacaatcccttagctagacacaaaggttctccaagtccccactagactcaggagcccagctaggttcacccagtggatcctgcaccagggccccaggcggaggtgccggccagtcccgctgtgtgcccgcactcctcagcccttgggcttttgatgggaccaggtgctgcggagcagggggtggcgctcgttggggaggctggggcgcgcaggagcccacggtggcagggggaggctcaggcatggcgggctgccggtccccagccctgccctgcggggaggcagctaaggccccgtgagaaattgagcacagcagctgctggcccaggtgctaagctcctcactgccaggggcttgcggccagccggctgcttggagtgtgggcctgcggagcccacacccacccagaaccctcactggccggcaagcgctgcgcgcagccccagttctcaccggcacctctcactccacacctgcctgcaagctgagggagccagctccggccttggccagcccagagagggtctcccacagtgcagcagcaggctgaagggctcctcaagcaccgccagagtgggcgccaaggccgaggaggtgcccagagtgagcgagggctgcgagggctgccagcatgctgtcacctctcactatgaacatttcatgtgcaggtttttgtgtggatatattgttaaactcatttaggtaaatatgatcactggatcatatggcaagactgtttagctttgaaaaagactacccaattgtcttgcaaagtggcttttccattttgcatccccaccagcaataaatagaaattcttgttgcttcacattcttgccatcatttgatgttgtcaatgttttggattctagccattctaataggtatgtaatggtatctcatttttgttttaatttgcaatttcctgattacatatgatgctgaacatcttttcatatgtctatttgccatccatatttcttttttgttgaggagtttgttcagatcttttgcccacttttcttttttttctttttttgaaacggcgtttcactcttgttgcccagactggagtgcaatggcatgatctcggctcactgcaacctccacctcccaggttcaagcaattctcctgcctcagcctcctgagtagctgggattacaggctcctgccaccacgcccagctaatttttatatttttagtcgacacagggtttaaccatgttggccagactggtctggaactcccaacctcaggtgatccacccacctcagcctcccaaagtgctgggattacaggcatgagccaccatgcccggccttgcccactttttaactggggtattttcttattattaagttatcagaattctttgtatatgttggatgtagtcctttgtcaaatatgtgtctggcaggttttcttccagtctctatggcttctcttttctttcattttcttgttttttatttttttttattttttgagtctttctctgtagcccaggctggagtgcagtggagtgatctcagcttactgcaacctccacctcccgggttcaagc

SEQ ID NO: 1881164 - DNA, 4001 bp, Homo sapiens
ttccattgctgctgtaacaaagtgccaccaactgagcagcttcaagcaacatccatttagcatcacagtttctgtgcactgcaagtctgggcagagagtgcctcaactgtattttctgcttaggggcttacaaggcaaaatcgaggtgttggcaggctgggctctttcccggaggtgctcattagggttgtgagcagaattcagtcgcttatgattgcaggcctggggtctccatttctttgctacgtggcctgaggcttcctttgttttcaaagcagcagtcgcgctttccatccttccttcccaagctttaaatctccctttcccccatgctgtctctttccaatgtcctttctacctctgccaccagccatggaaagttctctgcttttaagggcttgtgtgacccactgagcccatgtggatgatccaagacactctccctattttaaggtcaactgacgagcagccttaattacatctgcaaagtctcttttgctacgtgaggtaacaaattcatgggcattgacagtttccaaggatgagggtggcatctgtggggagctgtgcatacatctgtgctgcctagcacacctcccccagagggagcatgggaagaagcatgtgcatggattttggacaggcaagggcgtgggccggggtgggtttctgccgtttcgccacccagcatccatttccatccttctgaaactgcatcttgattttccactgggggcaccgctctgccccagccagctgtgctttgtgaagaggttggacttggggcttggggctcaggcctggccagtctgaccatggtgccttcctgaccccagaggccaggtcagggatgacagacacatgacccagctgaagctaatgagaatctgcagaagcttctggaagaagacctcacattcttcccactggacttggccacaaaagggtgcaggggttggagctgctgccaccatcttgcagccacggcggcagagtccgttggagaatggcaccgccgtggcagggagagaagcctgcgtgctcgtctggatgttgtcagcaccccgattaaggccacctgagacagtccaccctggagcgttcagttttgtgagcccaagaattttctttttccataaatatgtatagtcacatgaatgcctcaagtgtgtgtttagtcttgagggtacacatctgtgaaaacatgacctttgggtgtggggtgctaagtgggactaagacccagagagacaagagccagagcatgggtgccgggtgccccacgtgtggggacaggttgtgctggagggagaggctggaggctgtttttatagaagaactgggttttctcccccatgttcataacttttaattttgatgcaatttcccatataccctttacctagattcaccaattgcttacaacttgtcccactggctgtaccattctctctatattaatatgtacggagacacacgcatatttctcctgaaccatctgagagtatggtggagacatgatgcctctctactattgtatatttcagtgtttgttccctaaaaacaaggacattctcttacataaacacatatgcttatcagagctaggacaatttgcattgatatgatactatgatcgaaccccacaatccatatctaaacgtcaattgtcccaagaatgtcctttatagctatttctgtcctgctctaggatccagttcaggaccccacattgcatttattggtcatgtccctttagtcaaggaggtgacatgtgaacatggcttggaaactctagtgggtccttgacatccccaggagtgaaatccagaagagctatttgaatggcctcatacatacgtgttctttggtgacttgcctttttctctcacagtattgttgggaggtacatctgcgttgatgcgtgacactgttgttcgtcttcattgctgtcgagtattccattgtgtgggcatgacatggttcatttatcctttctcctgtgaatggacctgggtggctcccaggcgttgttactgtggttgtgtttatatcagtggatgctgctgagattttacctgtgcagggaactgctgagctcacctgtacacacgtccttgttagtgttgccaaattctcttacaaagtgcactttccaaaaaacactcccaccagtggcgtgcagagctcctgctgccccacctgtccactcacatttggacctgtcaattaatttaatttcttcctgcaggatgtggatgaagccatccccacgcatttgccgggccacaggaatatgcttcctattcctttgccagtggttggtagcatccatgtactttgcacaggttttgccacagttagagtgcatagagggcaatggcaagcagagccccagccctggctgcatggctgtttctctcttcctgtctgtctgtctctgtcctttctctccctgatgaggacatgcccactctctgccctggtgggataggagctcatcatggaggattctgggtgttgatggaggctgagagagaggccaggctccactggacagggaatgaagcaacttgggctaaatcctccaattgggaggctcctctcggatcctggccaagcagaatgccacggccataacatgcctccctttgtgggcctagcacctaggagccctcacaggtacaagagttgttttgtggactctaaacagcttctataggtgctaaggtgagttgagaaccccaatctattcatccactgtttattgaggtcctaccgtgtgccaggctgtgcctttgaagctccagatgcagaagataacaagacagatgaagtcaccagtgccagccccgggctagtttgcccttagctcttgttatcccatcccttggctctgtgtcacccatcagggaggggagcttagccccaaggtgtgaggccagctggattcctgctggattcagccaatgagaggccctggagtgaacaagggaggagccagggtattctcccccttcctcttcatctcaggtggcatctctggtgtggctctgtctttcctacagctacagctcccactggacaggcctgctgagtctccctgtgtcacccaggccttgggctctggtaatgccatctcctcccattgcccctccaaccctggggaggtaacagcttcttgctcctaatttctgtgctgcctcattgtcccctgttcttagcaattccatcacctgcacaatcacatctctgaattttaacttttaaattaagctttacacttttcaagtgacttctatttccttggtgggaccctagagatactctccctctcttcgtgttgtgtatattagagtggagagagatggatgatgaacaaattaagaaacaaatagttatggtaaatgatgtgaagaaaatgaaacagggtatcctcttggggagggagctcatccttggagggttggggcagagaaacaccattgaggagagcagcaaggtgtgcagctagaagagcaaacaaggacgcctcatttactgggcacctactatgtgtcagcccctgtgccatgtcctacaaaagacctgattatgtcttttgcagttagttttgtggaaactggcatgcagcagaggttcaaaacaaaacctcttcaaaatcacgtcagtcattacataaactcttgacatagatacttttggcagagactgtcaggtatcttccaaaagctattattcctccatagaattttagctgagcacatgatttcccagagcaagactacattccctagcctcctttgcagctagatatggtcatgtgactgtgctttagccaatgggatacaagtggatgtgtcagctttcaggggacttccttaagagacagctgatgtgaacattttgttctttattcacttcctccttgctgctccctggaatgtagatacaatggtgaggctgtaacagccatcttggaatgtgaggcgacgaaagcc

SEQ ID NO: 1881165 - DNA, 4001 bp, Homo sapiens
tcatatacgagaagctaacaatctatgcttgagttgtgtgttttttaatatcatgctttgggatatgatgccaaattggatctccaatttgcctttaattagtcagcaacacttatttaatgcccactaagctcagagcaaggcttggagggtggagaaggggagtaaggagatcgaaaaacaaatacactatcatttccagaatagttacagtatctttatgcatacagaaaacagataaatgaaaggatttagaaaacttaaaagcaaaatccaaatgagtgcaaattggtctgatacaaactgagctatataaatgcaaagaggatgcaaattataaaaacttgaagagtttaaaattgctatctttctacttttattttcataatactttgccatgagaattcttagatctcaggacaccatacccttcagtgaggaaagtttactggttcaattgtatgatttagagaaacaaacctaattcttagcattttatgggcttctgagagatgacgctgtaaaactttttgagtctctgttaaacttttctcgtcattaaagcttttatgtaaccttgaacaagttccttaacctctctgcgcctcaacttccacatcattaaaatggggatgataataggacccatctcataggattgttaggactattaaatgtattatactctattacttgtatcctataaaatatctttctcacagtttaatttcttgaaaattgaaacacatcctatgattgatgtggtaagaaaccattgtaacacatattaagtgacacctgttggttctttgttagtaggttagtagggaaaaaaaaagatgcagtttatagtcaaagccgtgtgtaaagtgtgtctaaagtgcttaaaacaaagcctgtcatacagttggtcttatagaatgatgctgttatcatcattgcctgaataccatatttgtggtatgtaaaatatttgtctccaatttcactggcttctgtcctatgaagcagatatacttatagttcctggtctttgagtaaatagagcctagaaggattatcagatattacacaactgccaaataatgacttacatcaaaccaagagtttattcctcttctcatgcatatcaacacctgtttaatctgatcatgttttcaaaaacccactagtgatctatttatttctagctatagctttcatcacctgtatttggtgatttgttgctggcagagtccatactcataacactaaatctgactactgtgattacaacagtctttctaagttagataccactaatgatattgattagggagaaggcattctttgtgatcctatttgcacgatctcgggtaattcacttactggacccaattgttagttgtgaaatgtgaatgttgaaagcagtgaatcttccagctgcttgatttgtgatatcactatcaatttacctactgaggagcttcatataaattggtcatttgtagaaagtagttcagtggctgagaatctggcataatattttatttttatgaaatttcagtaaacattattgagcaacttgtaggtttcaggctccacgatagggatgcaagcatgtaagacctctgtccagcaactgagaggtaaaactacaatgagaaagatagactggtaattcagatttatttttaaataatagctttttgagatataatatacttacccttcaatccactgactctggttttaaaggagatgattaatacattcactcaaccgatattgagcatctgatatgtgccagagacttcctatgtgctagggttatggagattgacaatagttatacaaaactgagcctgtcacaaaatgtgtatcgacagacagtcttccatttggtgctatagaccagtactcagggtcagcagagggtactctggaagcatattcagggacaaagcaaacctagtcttggaagatctgaggaagtttcctatgatcatgtctgtctcctgccataacaccctgaatgcatccgatctgaactaaactgaggtctgacaaacttgtaggagtttgcgaggtgagtggcttggggaaagtagagaggaagaagtttttctggaagagaaaagaaaatatgctgtggctctgaggtgaatcacatataatgcacaatagcttagtattgtgataacatttgggactgtgtgggcagacagtggctgcagggcctgaagggtggagagggggaacttacgcttcagtaggggtgtatatgtcttattatgaggtcacaatgaagattgaggtcagctagaggatgtgacattcgagttgggtcacaaaggatgtacaggagtttttcaaggctgaccacagtctaggcagaagaaattgcaattgtgaaaggaagatttgcgtgaaagaatggtgtttttggctgagtgaggaatttgaagtatctggaaaatggagtaagtggcacagagaaagaaaacagccaaataataataataataataataaattggtgagggttcggagagccgcttacaattggattcggtgcaatgcaatgactttatatgttctgtaccttgtccttgtaggcagttgcaggcactagggacaggagtctggggggaagacaggagcattgaaagtttgaggaaaaaatgagaagcatgctttagaaagataatctgaatatacttgaattggaggggccctggattgtgaatgaaaattagaagtatgtcatctgtattgtgtaggatagtgcttatctacaaagaattttatgtagaattccccatcagattaaccctttgcagcaatagccaattatttctgatattaaaaattataattaaataaaagatatggattggtaactaaacatttattgagaagttactgtatcacttccacaaatcaattcacttatttttcttagtaatccaatgatgtagcctgtcatttctcccatttttcagcagaggaaattgtggcccagaaggttgtatgtaactcatcgaggcactaagtggcagaggtcatgtttcagcctcggccatctggctccaaagcctaaatgtatgaattggccactaaaggcacaactgaaaatactaacagtccctgtgttagtgaagagggatatttggcaaaaagtttttattttgcttttttacaattcagtgatttgtaatttatttacagagtcatgcaatcattacctcaatttaattttagaacatttaaaaagtccatgctcatttgcttcccattctcactctaaccctagataacctcaaatctactttagtggtagtcagtttgtatgaatggcaacttcagtttaatggctttttttttttttgagtagtcacaatctgatagccttaatcactaattcaggagaataacattgtttgaccatatcatttctaacttctgcatgcaattagtgtactctattcataatttgatgcagagaagggtaaaagtgacaggccttgtggcagtcattggtcaaaggcatatgagtaagactgcctgagaccctaccctggagttctgtcttgcaggtaaggcacatagacaaactattaagcaatattggagaaagaaattattgtagaaatcctgatgtttttggtgaatggcttatgttaaacttctctctcctggaagtcattgaattgtttttaaaaacttagtatgtatgaagcatttggaatgcttggcattttgagaataaaatccacatcaatttaaaataaaataaaactccccatccagaatagagtagtaattgcaaggcataaaatagcccagctgtggagtggcttaaaggacaattggtctcaggcagagagtaccagataggacacgctacacaaaggactgtaatgtctcaattagtgtacctattgggtagcacatatatctgaaatggcttaaaataaaaattgcaaatgcaccagatttaatcaatcttagtatttcct

SEQ ID NO: 1881166 - DNA, 4001 bp, Homo sapiens
tttttggtagagatggggttttgccatgttggccaggctggctcgagctcctgacctcaggtgatttgcccgcctcggcgtcccaaagtgctggaattacaggtgtaagccaccgcgcccagccatgttcatatttttgtatgtgtacattagatagttgagaggaacacagaggttaagtagtcttacccctgaaatgtctgaattcaaacacttattaagcacaaggaaggtgcttaataaatccaataacatgtgtttttacattatttccttaattcctggtcaaaagaatcccactaaagtccatcctcagaagaaccactttttggagtttttatgaatcagtagctcatggtgtactctcaacagttatgaatggaattaggtcctgctagaggtcagggccaggtatggaaagatgaagggattagtcaggagacctggatgggaggaggggaagacaggtgcttggtcagtcagttgttttgtgttgggcgagtaacgtttcttaagtttttgtctgaggtgtaaaggggggactacgctctgtcctatctaactcacctgaagatgcaatagccgggtgagagactgctttcattatgtgctaacgtgagggattactttagatattaataggagagaagtgcaaggaaaggaagtctcagggtatggaatgctttcctggccatggctgctgcgcgtcataatcccctaacacagttaagtggtggttctcatcgtcgttcacccttacagatgtcagaggggaaagaaaaatccaactcaaaacttccaatgacaggcttgtctgtattcaaaccagttcatctcgttcgcagacttttttgaagctataagcacagagcaagctttctgggcggggctcagaagtaaacgttaaactccagggattcatttatttgagcacaggacagaggaagttgccctgaagcaactgattgtcattgatattcagggctcgctgtcaaccaggaccttccaggaactggctctgggccaagagcagtagaaatcactgggtggtccgcacagctcgcgggcatctaacctgcttcaaggctcagggctaaaagggagccagggcccttcctggaggcgggaacccaagtgggaggcagagcgcctgggcccgctcctcgatctgctgagtgacgaccctgtacaagtcatttctcttccgagagcttcagtttcctcacgtgccaagcggacgggttggaagttggtctttgccagctctgacaccttgtaagttttgagtcttgctgggaatccagggcggggctcacgaggaaaatcttggaaggggatttcatggctggatctcttccactcaagctcagtgccctaatttgacgccttaatagtagacgcaggcttttccattttccaggagccccctgacgcggccgcttcctcctacgtctccttcctcttcctctagcaggggcaaagtctccacatctccctctttctcttcctcctttgcaagctccctgcattcccgcgtctcctcctcttcctcccaggaaatgcaatgccctcagtgcgcccaccttttggcaaagccactgccggctgcgggtttcccctcccccgccaggcgagctctgcgcggcggcttcgcgggcacacgccttcccataccttacatggacaaatgcgtgcaggcaaagtcaggaattcaggcccctgacgtcagcctccagcgctcagggcaccgcacgggagaccaaggggagggggtggggacggtggggaggaaggagggggaaaggcaccaaccagcagccgctccagccctgccgaagtttcactttttgtctgtgggttcgttcccgggtcccgcgcgagctttcccgggataagtagctttagcgatcgggagacagccgggcgctgcaaggtaagggctggctgcacggcccggggcgcggggcgtggggcgctgggcgcgggcggcgcgctcgaggaggccagtgtggggcgcggggccgggcctgtccggggctggggacaatgggagggggagtgcccgggcacctcctcctctgcctctgcctccgcctccagccgccgccgccgccgccgccgccgccaccaccaccgccgctgccccggctgcctcctccctgaggtattgttgcaaatccttccttcccctcaccctccacccgcgggcgcctcgggaacccccagccctcccccggcgcgagcgcctccggggtggcaagagcgcagggcgcgcgccctgctctggcctggcccgctgtgcggaagtgccggccgcggcccaatcacggggtgcacgccatgggggagggggacccagagtttttccaaaagcgtcgaccccaggctaggcggggttggagccttgcgcgccccctgcccggacttttctgggcgcccagggggcggggccacgcccatccgcttagagctttcgcggaatcacagttgtcacagcggaaagggcctagacccagtcctccaagtcctcccattttacagttggggcagctgaggcccagagagaaggagggtcgcccggaagttatttactagaggccagaccataattcaaatagttggctccggacttaagttccctttctctaagcatttctctagcaccctgtgtgtggcagaccctgtgctgggtgtattggacgttgccctcaaggaactcagttgaacctgggagtcaaacctggcctagggtagaaaatgctaagtgctggagcaaaggcgtggacaaagttaaaggaagttccagggagggggtttgattttctggtccctgggacggccttttggagagtcctgcactgaatggggtttttggaggttgaggagtttcctgaagccagctagcggcttggaggaagacatctcttcgagggaaccgtgggccagagaagactaagtagtgtgggaaatggagatgaaagtataaatattctttagttggaggcaaggggttggggatgggggaggttgtgatatgagatgagctaatcagtggaattgtgcctgggtgcttggacagggcagagtctttggaacctcggagtcgtaggagaactgaaaaatctctctggcttcccttcccttagaagggatccactgctttccctcccccaacacaaaacaactagcgagaactcagggtcttctctggggcttttgctagtaccaaactcacttaactgtgtttccagtcccctttctctttccattccttccccttttactaaatctcttgcctttcctgtaaaattcactctcactaaggtgttgatgacttaatggcttacctttccctgcacatgtgcattttaagaaagcctaaagtgaagaaggggaaagtgtggctaggcacctttacaaagcatctagctccctctcccatcctcccccttcctcaactcttatagatagaagaataggtaaaggtccacgaaggtgggtgctagacctagagcctatggtcaataatggtggacagtggggggttaggacatccaatatggttttctccacttcgtcaccagtttttctgcttgcacagttcctgccagcaccagggggcagttaaaggaaaaagtgtgtgggccaggcacggtggctcacgcctgtaatcccagcactttgggaggccaaggcgggcggattgcctgagctcaggagttagaaaccagcctgggcaacatggcaaaaccctgtctctactaaaaatacaaaaaattagctgggtgtggtggcggggaactgtagtcccagctactcgggaggctgaggcaggagaatcgcttgaacccgggaggcagaggttgcagtgagttgagatcacaccactgcactctagcctgggcgacagagggagactgcctctcaaaaaaaacaaaaaacaacaacaacaaacaaaggagagtgtgcatttttgcatttaatttctacaatgcaggccc

SEQ ID NO: 1881167 - DNA, 4001 bp, Homo sapiens
ggctgcccacactgctcaaatacagttaactttactttggctttttggtttatgtgtagacttgggatctgtgcacagatttcctcaaaaaaactaggctgactgattctcttattaatgtttcttcaccactggctgtggactttgatctttattttcaggatgatgcgtagcgttcctttatggagacttttaagtcgaaagccaaagccttaattaagatctttgcaggttagatactcctgagctgaagataacagagtaagaaaagtggtaaaagaaaaattaaatgcacttcttttacctatcatttttatggtagacatttgaaatttaccctttcagtgattttgaaatatgcaatactttattattgactatagtcgccctgctatgcaatagatttcaaaacattcctcctacctatctgaaactttgtaccctttgaccagtaactgcccattcccttcctccccggccccaatctctttctacactctacttctacgagttcaactttgttagatttcacataaagtgggacatgcagagaaccttccttttctgattggaggagctatagcccaaaagagtggagcaaaccgtcacgctttcttactttcttaaatcttcgctgcttggccgcgactgtgggtgcagttgtaggaagtgcacggcagagcagggtaactacaacaccaagtttttggccagaggcccgaaaaagggagcccagcgatcaggaaaggaccagggagatcacagagagggaggaatttggaggaaacagctccgtaagtttgttcctgggctcctcccctagctgcgcatgcgtggatctgaccctaaccagcactccaaagaagttagacctggacactggaatagaccttcagccacgccgtagacgggccactgggtggtgcacacggaacatagctgaatagcaccacgaagactgaaaacagacctgacatggggatcacaccccacagaaggcaggttggaatttgaggtcagaactcaaccaaattggttacccacggtgtcagttatcaacttactgcttctcagctttgaatgcgccactcaataaatataccctgtgttatacaatggcattcctttaaatattggccctttaaagtgagcgcagtgctgtgctttctcagtagaaggcactggaggggcaaggtagtaggaagaggcttcctgccttttttttggcgtgggctggggatcagcagtgtgcatgtgagaatatccatcggaatctgccccaagcatgggctcagaacagtccctttgcgactttgcatccttggccttgcagtcacctttctacagctctcttgagccagaacacagagcccttgtgcagcccacgtgctctgaagaactcctgcctgtgcttgtatttcgactttcttcacaagcctgcatattacctgcacacagctgcctgtgcccctgagggtcacatgccaacctgcgatgccttctgcaagtgcctgtgtggtccacacactctgaaggccatctggacttccatcacatgcccatgccaccagttgctgattggccatccctacctgcacttgaggggttctcctattagttacccagcaactccagactagcctgcccaaaccagaggacttacctgctatctgatgggctgaaccccttccaagttggcccttccttggatgtgctccctcagccctggggtatgaatggaaagatagaaaaatatcaacaaagaaacagaagatataaagaactaattggaaattttagaaataaaaagacaataattgaaataaaatactggataggctcacaaacgtaatggagatggcatagggaagagctaggaaacttgaagtagattactgggtttcatgcgcatctgtgtgaagagaccaccaaacaggctttgtgtgagcaataaagcttttaatcacctgggtgtaggcaggctgagtccgaaaacagtcagcgaagggagatagggatgaggccgttttataagatttgggtaggtaaaggaaaattacagtcaaagggggtttgttctctggcaggcaggagtgggggtcgcaaggtgctcagtgggggagtttttgagccaggatgagccaggaaaagggacttccacaaggtaatgtcatcacttaaggcaaggaccggccatttacacttcttttgtggtggaatgtcatcagttaaggcggggcagggcattttcacttcttttgtgattcttcagttacttcaggccatcttggcatatacgtgcaagtcacaggggattcgatggcttggcttgggctcagaggcctgacactgggcattaccaatctgaaacaaaaaatagaagagaagatttatctgaaatgaacaagccctcaagaatctatggaacaatactgaaaagtctaatatttgtgtcatcagaattccagaaggagaggaggaagagtgtaatgcagaaaaaatgttcaagaactaatggctggggctgggcgcgatggctcacgcctgtaatcctagcactttgggaggctgaggcgggtgaatcacaaggtcagaaattcgagaccaacctgatcaacatggtgaaaccctgtctctactaaaaatacaaaaattagccgggcgtggtggcacgtgcctgtaattccagctactcgggaggctgaggcaggagaattgcttgaacccgggaggctgaggttgcagttattggagatcacgccgctgcactccagcttgggcgacagagcgagactctgtctcaaaaaaaaaaaaaaaaaaaagaaataatgactgaaaaatccccaaatttgtcaaaagatataaaccaagtgattaaaaaagctaaacaaatctaaatcaggataatcccacccaaaatccatgcccagatataataattaacctgaagaaacccaaagacgaaaaaatttttccaggtgcggtggctcatgcctgtcatcccagcattttgggaggttgaggtgggagaatcacttgtgcccaggagtttgagaccagcctgggcaacatagtgagaccttatcgctgcaaaaatatttttttaaaaaaattagccagatatggtggtgcatccctgtgtttccagctacttgagaggctgagatgggaggattgtttgagcctaggaggttgaggctgcagtgagttgtgatggcatcactgcactccagcctgggtgacagagtgagatcttgtctttggaagggggaaagaaaaaaaaaaaagaaagtagcaagagaaaaatgatgcatctcctataggaaagtgtgattcaaattatttcagatttctaatcagaaactatggatgccaaaagaaagtggcacaacattctaagggtgctgattaataaaaaagaaaagattgctttcaaattctatatccagcaaaaatagtatttatgaatggaggtaagaaaaagacatcctcagttgaaggaaaccagaatatgtcagtatattttctctaaaataattgttaaggcaagtttttagatagaagggaaatgataacagatgtaaacttgaacagcaggaaggaaggaacaggaacatataaatatcaagataaatataatggaccagttttctcctcaggagttctttaaatttgatgattggaagccaaaaatataacattgattgacataatacataagacaactgcaacataaaggtgggaatgtaggaggacctatatggtggtaagatttttacatctcacttgaagtggtaacatactgtttctaagtggactatgaaaaagtaagtatgtataataattcttagggcaaccataaaacaagagaaaaaaactacccaaagagacatagtaaaatatataatagagaaactaaaatggaattctaaaaaatgttcagagaaaagaaggcaggaaagtgtaaaataggaaaacaaaagagggatcaaatagaaaaa

SEQ ID NO: 1881168 - DNA, 4001 bp, Homo sapiens
tatttaaagttaatattgttatgtgtgaatttgatcctgtcattatgatgttagctggtgattttgctcattagttgatgcagtttcttcctagtctcgatggtctttacattttggcatgattttgcagcggctggtaccggttgttcctttccatgtttagcgcttccttcaggagctcttttagggcaggcctggtggtgacaaaatctctcaacatttgcttgtctataaagtattttatttctccttcacttatgaagcttagtttggctggatatgaaattctgggttgaaaattcttttctttaagaatgttgaatattggcccccactctcttctggcttgtagggtttctgccaagagatccgctgttagtctgatgggctttcctttgagggtaacccgacctttctctctggctgcccttaacattttttccttcatttcaactttggtgaatctgacaattatgtgtcttggagttgctcttctcgaggagtatctttgtggcgttctctgtatttcctgaatctgaacgttggcctgccttgctagattggggaagttctcctggataatatcctgcagagtgttttccaacttggttccattctccacatcactttcaggtacaccaatcagacgtagatttggtcttttcacatagtcccatatttcttggaggctttgctcatttctttttattcttttttctctaaacttcccttctcgcttcatttcattcatttcatcttccattgctgataccctttcttccagttgatcgcatcggctcctgaggcttctgcattcttcacgtagttcttgagccttggttttcagctccatcagctcctttaagcacttctctgtattggttattctagttatacattcttctaaatttttttcaaagttttcaacttctttgcctttggtttgaatgtcctcccgtagctcagagtaatttgatcgtctgaagccttcttctctcagctcgtcaaaatcattctccatccagctttgttctgttgctggtgaggaactgcgttcctttggaggaggagaggcgctctgcgttttagagtttccagtttttctgttctgttttttccccatctttgtggttttatctacttttggtctttgatgatggtgatgtacagatgggttttcggtgtagatgtcctttctggttgttagttttccttctaacagacaggaccctcagctgcaggtctgttggaataccctgccgtgtgaggtgtcagtgtgcccctgctggggggtgcctcccagttaggctgctcgggggtcaggagtcagggacccacttgaggaggcagtctgcccgttctcagatctccagctgcgtgctgggagaaccactgctctcttcaaagctgtcagacagggacacttaagtctgcagaggttactgctgtctttttgtttgtctgtgccctgcccccagaggtggagcctacagaggcaggcaggcctccttgagctgtggtgggctccacccagttcgagcttcccggctgctttgtttacctaagcaagcctgggcaatggcgggcgcccctcccccagcctcgttgccgccttgcagtttgatctcagactgctgtgctagcaatcagcgagattccgtgggcgtaggaccctccgagccaggtgtgggatatagtctcgtggtgcgccgtttcttaatccggtctgaaaagcgcaatattcgggtgggagtgacccgattttccaggtgcgtccgtcacccctttctttgactcggaaagggaactccctgaccccttgcgcttcccagttgaggcaatgcctcgccctgcttcggctcgcgcacggtgcgcacacacactggcctgcgcccactgtctggcactccctagtgagatgaacccagtacctcagatggaaatgcagaaatcaccgtcttctgcgtcgctcacgctgggagctgtagaccggagctgttcctattcggccatcttggctcctccagaagttctttaattagatcccatttgtcaatttttgcttttgttgcaattgcttttggcatcttcatcacgaaacatttgcctgtgcctatgtcttgactggtattgcctagattttcttataggatttttatagttttgagtttcacattttagtctttaatccatcttgagttatttttgaatatggtataaggaaggggcccagtttcaattttctgcatatggctagaaaatggtgcagttctattagcaccatttattaaatacagactcctttctccattgcttagttttgacaggtttgtcaaagatctgtgtagcaaaccaccatgacatatgtttaccaccatggcacatgcttacctatgtaacaaacctgtacaacctgcacatgtacccctgaacttaaaaataaaataaaaataaaaagtttactccaattaaactgcaggttgttgtccagggtaatatgagtcaagtttcctaaaaagctacttaatgcataggctatgcaacatttacacattggaaccagctacgcttctgacatccagtcggttttaccaagatgtctatggttggtctggatatgattccatactgctttgttggagagaggccaagcctatgcatttttttatcatcatcatttgaaaagtttcagcatcttgatcttatttgaacactttttgagttggtatcacatacaaaacttatattttttcactacctgctaactcaagggaaaatatttccttattgattgatggactgattaattaaaaatatattatacacatagtacaaatgtattttatcttagaaaagactcaaccaaaaagtagtatgtatcataaactctgttctcaataagtttaataaataattttaaacataatattttatagtaaccacatatagaaaggtcaaatcaagaaaacttttctttcgtagaaactaggtttagtgtagtttagtatgacaaaaataacccacagattttatacgtggtgaagatgtcaaaggcaaataggcccacatttaaatgcaatccaaagtttataactgcaaataactatttctttgtactctatattattacaaaaacactttttgatggagaataattaccaaatacatgtttgttctattaacaatttttagctttctatttgtacatattaccattttaaaaatgttattaaaaccagtagtatctttcattaagatatgatatttgagtgactcacatttttgtactttatggtacaaatgattcagtcagcatttctgtgtagaaacaagtatgcataaagagatagaatgtctttcatctagtaaatcagtcatattaaagtgaaaaaagcatttcgatcggtggattttattattaaactctagtaatgagtatatttaacagattttcattgttttaaaaaattgctatcagatgtaactttgcataacaaagcttttcttccgtccaagtgtggggaggggtttatgcttctaggtcattcctttttgtatgcattcgcatctgaggtcactaacctcagatgcagtgttcccaaggcatctagactattgtcatccagcaactcccctatatccatatatcctcaaactatattactatatactgtatattactatattgctcactactgaagtccagcaaacacctccattgaggaaaaaatgaagaataaattcttgtgttgcctttctaagagggctctggtgtttttggcctgctagaattcttttccctccttccagtaaaagcaattagctttttctttggggaacagacactgctatgttctacctggtgacattctgcctgtcaaccatgaagcattctctatctagattaaggcggttagactaaacatactttcccagcagtttgaatacaaagcactctcatgcaaggatagaaagtaattggaactcatgtatcataagga

SEQ ID NO: 1881169 - DNA, 4001 bp, Homo sapiens; identical to SEQ ID NO: 315917

SEQ ID NO: 1881170 - DNA, 4001 bp, Homo sapiens
gattgaaaagtccctttgaggaaaaagtgtttagaagcaaatatattgatggtactgataaatactgtttttcaatgttaaaatggagggtaactgacgtaagtttggatggggcttcatcatctcaatgactttgattttagccattactgtgcacttggcacatgaaactataatgaatttaggttaagttattccctttgatacagaaagctgccggatagatagatggtcattgatcatataaagagtctttgtagggatttggaaagaaaaaattagattattgtttgaagacaaaggtagtgtctaccatgccttgccttctcgaatgaattgtagtacttttgagaattctggtctctgaccctgagggtggcagtttaatttctgaaacctgaaggtgtcacacaaactcagaccagcaaattgcctgtatatttcacatgttgtgttccttaatgcccatggttaagacattgagtggagagaataggggctggagaagaggtgctgaagttttgaatgggggactctgtgtgttgtactagctgtgaacccgtctagggaacaagtgctgacactgcccacttagaagaagacacatttgttaaagaagtacagttgcctttatgtctggcattttagttaaccagtagcaaaataaaggactgatggatttattatcagattatgcccaaccatgcacatattgccaagtcctccatgaacatcacagatatctaaaataaaagagacgtttttatttgttttaataaataacattagctagcacctccgtttccaaccattcagtcctgtttggaaatgccacagtgatgggtgtgtgttattttgaactcatgtgaaggttccatgacaacggtaaacattcatattgcacattttcataaggcagtgaatctggatgaggcaagtggcctcagccggcaataaagatgtgttatgaaatttcccatgccagaagagacactcatagctgggattggccttttcaaaagcagttgatggtgatgagtgataactccccttttagttttggcatcagatggagtttgtagctcattggcttcattgtgttgcctgggtatctcctatttagacttaattggatggtttgcaccactgtcctaggtggttgctagtcttttcaaggactatccttactgaatactcttggtattgtatttctcttttcttacacgaatcctcaattacaacaacaaagaaaatgctaacatttgacatcactggtaaactaagaatgctttagattaggatttccatttgctgcctttccaaatttgataatttatatttggatatccttttagcatatttttggtggaatggttcactttattattatttttaaaagatggatgtgtcctagctttcaccaaggaacaactcagtttagatggaatgttttataaatatgatgtaatggaaattgaacaggatttggagtcacaagggcctgtgttggcatcttagtgccattatttattgtgtgaccttgggcaatcacatagcctttctgaacttccattttctcactagtaggtagggatgatattattgattgttatttaggggttgtggcagaaattatgctgttcttacaactttgagattctttccatagggaggcgggtagtgatgtctcgttccttctttttgtatggaggggtggccatgtgattatggtggagcagtgctgtgagacttccaagatagggtcataaaaggtggtatagcttctacctggttcttttgggacacttgactttggaaaccagctaggaggctgcaggggagctcaaggagccaaatggtgaggccacatccaagtgttccaggggaggtgaaacacacctgaggtttcagatgattctagccctgggccattgagttgcctgcagtcttcccagtgtaagattcagacatcaggaagcagagacaagcatttcagctgtgctttgtacaaattcctgactcacagaaattgtgaaagataataaaatgattgttgttagtttaagccgttatattttgggatgatttattacgcagcagtagataattgtaataaagaaatcatgaattcaaatagtagttcttcttctaattttgcatactgtctttaccacttagtaactgtgtaacctggggcaaaatttgtaatttctttgtgtctgttttcttaattgtaaatgggactcgcgtaattccctctggacttctgatgagaattagtgatttaatacttgatacgctcaataaatgttgcttgtcattattttctattaaactatattgttggatttttgagaatgcatgaagaaacttaacgttaattgtgttttgatttttaaaggcgttatgtaaattttgttttgtgcttttctccaggcaagaaaccggtttgaatgtaattttcatgaaatgaaaaaaaaaaagaaaaatgaatagtaaatctgatgttagtatctgccatttatttcacatttttttttctgaggttgtatatgtctgggaacctttggctttgcttggtagaaagaggactaatgactccaattagaggacatcagtagagaagaagggatgaaggatgggagataggaaagaaatcttattttcagtaacttatgtgccagaaactgcactgtagccttttaccagtgtagccttcttagatactctgagagagataataagagaagaatggattgttacttaatttttatcgtccctgaaattgaggttgttagtgtccttctctggtgtgttacctggggaaaggaacaatgattgcagttttactttcaggctaaaagctacaaatctgagctcacatttctgtttgtttctgcctctgaccctgggtggctttgtgacctctctaagcctcagtttcttcagttgtcaaatgggtctaatagtgtttcctatttcctgtcattgttaaagaagagcccatgagaatctgtttcctaacctagcttggtcataagaatgattgtaatgcattttttaaaataatgggacccatcccagagctacagaattagaatttccagggattctgtgattaagtgccccaggtaagtcttactgttaggctgatttgggagacattaaaacaatgtgtaaagttgaacagttaacacctaatacataaatgttagctgctgttataattatacttaacattaatttaatgttttaggtaagttcttttatatacgttctttagatttgctttggtaggttttgataatttctaaaaaataaacacaagaatgccttgtatgccacttaataaaatgttggtatgccacttaataaaatctgattctgctattattatcttaaacaaaatctgattctgctattattttatgtccatcaaaaagttatgcaaagttttctctttttctttcctctctgaaatatagacgatcataactaagttaatgagtttcctcccaacctttcctcttgaagcttaggaggaccatggattgagacatctttttctgtaacataattaaagaaaaatagcttcacagttagggtcactgaaccttgagggaatttgcccattggctgcccatcaggctgtgatcagaagttttcgtgttatgtgttacataattaaggatggggaatagctatttcagagactctaattaaagactgtgttctctatataatgagtatctataatgagttttctgtataaagtatctatttagaacaatatgggagggggtgtatctcattgtccagcataatcctataataactggttacttgtcacaaatttgaattggagcaacacgggtatatatatatatatatatatatatatatatatatatatatatatatatatatatattatactttaagttctagggtacatttgcacaatgtgcaggtttgttacgtatgtatacatgtgccatgtt

SEQ ID NO: 1881171 - DNA, 4001 bp, Homo sapiens; identical to SEQ ID NO: 315922

SEQ ID NO: 1881172 - DNA, 4001 bp, Homo sapiens; identical to SEQ ID NO: 315928

SEQ ID NO: 1881173 - DNA, 4001 bp, Homo sapiens
tccttttaaacgattaacgctgggaagaggcaccatttaattaattaatttgttctggaagggatcagtgtacaattttaactcagtgctttgtggatctagctaaaggtcaagaactaaagtcggctattagtgcctctggaagatatttctgcactttagcacctttctgatgtttttccttcacctcgagctggcctcactctcttcaacaaaaccgaacctgcaggaagaatgttgtaccatatccagcatttttgtcccaacaaacatgggacaaacgtttttcactagaatcatccttgaacaagttatccgaattccttacattcaaaggaaatcctgcccccagtctccaaaacttcatcacatcacagacgttcaggattctttccattcaaagcaaagccaagttacatcttatagcacccagtgaattatgatatggggctgcggtttatttgctctggcgacaatatggcttacttgccgtggaatatcccggtatttcagaagtaacatattatttttaaagagggagctttgctttctctaaatcacatggtgcaaagttgggaatacagtggcctgtaaattacaaatattatttacaaactagaaggaaagctgacatgtgtttgtgcctgtgtgacagtttcactaaggaattccaaaactgtggatagcctgttacttgagaaaaatacacggtggcagtcttgcagatgtttttcccgcctgttagccctccaggttcaaaaactgtttggtgcattttaaggcggcagtctcaccagatcgcaggattctagtctaattggcttctaaccttcaatctaaccttgccggcttccttgcaaagcccggtgcaagggcctctttcaaaatgaacccactggtgtgcctagcagtcggtagaagaagcgggagggcgtccggtctgcacgcccgccgcgaggttacaatgctgaacgcatgagatggaagataccaacgggaggccgaggggatccacggcgcccgcgcgggctccggcttcctcctgctctcggcgccgctgggcgaccgcccatgacccgctcttgcgggctctgtccggttgacaggcgaccctgtggcccggggaagcgcgggagggcgccggcggaaagttgaagagcgtttttctcgccgccgcgtgcattaggagctcgacgagtccgccctgggcttcctggtggggctgggcgggcgggggaggggccgcgcagcagcagcggaagccagacctcggcgataagaggctgcacagcgacatgcaacagtcttttcactgcagctgaatgagttgtggcgcccacaatgctcccatgacaaggagctgacaagttccattttccgtcgcgggcatcttggaatcatgactcccacaatgccttgggcacttggtcgacagtggggccgcctctgaaaaaaaaatgtgagaggtaagtttccattttcacagtttccccgcgccgcttcattgttcggactccggcgggtctgcccgtggctgaaggaggaagtgcgaggaggtgctcgccggccgcggttctcccgggcaggggcgggccgctcgcggtagttggtttcgcgtccctcagcacctcctgcccgggggaaggcgggagggtgagccgcagccgctcctgcgcccttccctgccgcgggctctgcggacgctgtcacggcacagcccgcgcacggcttggcagcccagcgggacccagggagaaacaggggggcgagaagagaaacaggtgcgtgcaagtgtactcacaacttaatgacctttgtcgggggaaggtgtgagtccctctgagtcgagcggcgcgcgggtcttcccggcggctcccgcatccctggccccggggctgccatcccgcccggttttcatctgggccaaatatgtgcacgcaaaggttaattctctgcttgctacccataaattacgcatgacatgtttagctgggctgccttatatggagagtgctgtatttcaggccagtttgccttttgccaagtttacagggcggaagacgccctgtaggagagggctgcctcctccttttcttcttcttcttttttttttcatcgttttgtagtgcgtcactcaaaaactgtaagaaaagtaagtatagaagctctttgggtggagccgcagttggttgaattgctttcatgaaaggttgaaaagaatgaaaagtagttagtacttgggttctggtttttagacaaaagcaggacaaatatgtagccaccccccaacttttttttttttttttaaacggagccggaatctgttattggtagtaatgtgtcatgtgagaatactttgattccagagcctgtaacacgagcaggtatatggtggcgcttatgccttcccctcgcacagcactttacaactacaggggtgttgctgccagagtaatattgtattcttaaggctctctggggccgggagagtatgcggctgttgggattctggggtgtatttccgtggagtatgtctccccaggattaaagttaagaagctgccggaaaggttgttgccgctgacttcactttgtgtgcccaccagcacaggcacaagtcatagcagatggatggcaaactctgccatatactctgaggagtttcttaaattaatacgctaggagagaagtcataattaatgcttttagactttcgagccctctgcagcgtgctttgaaatactacaccggtggacactatgtcccttcctcctgggtttgaacacagtgtctgtttatacacagagggtgtttagtacctaagtattctataccagcacaagagagccactccacagttatctctctgtgtggattcctaagtgtgttggtgtttctccttgctgttgagataaaatattatcacccagagagaaaatgaaagttcaacgactgtaaaatttatcccaggaatgtgcagttcaatacttagaatgtcttagatgtagttatagatagaggcactgaataagttattttgtagcctgagaatgcacatcgctgtcacttgtatcttgctttcttaaagttggtgacaactaaggctaaacttctttagaaaacctaatgttctagtttttatctgttttgtgtatttgcatgggagttactttattattattattatattgttaggtcttctttgaaaatgtaggcatagcttttttagtcttatttgtttaatggggggtttccttgctgaagactacaaaagttgccttttgtgttttaaggaacaggttgggtcagcaacagaaaacctgttcatctataattatagtgtcacttaagacataataatcagatttcattattactaagagactcagaaaaacctcacatatgcctagtttaatttttttccttatgtaactgtgaacaaatttgtgtgtagatacacatcaagtgtggtactctgcgcagtcatgccaaagagaaactgaagtgttatatggtttgagatattattgcttgtgtttacatttccacatttgaggcaaagttagactccaagttgaattcattaaattttgattccaacattctgttcttcctttgggcacagaattcctatgaaatgaaacactgggttttgttccagaacaagaacagactaacccaaaatttctcctgggggaaaaaaaaagagtaaaattatatttctcattgaaaattgtatttctcattgaggaagggtgtgttactttattatataaaatgccttatcttcattataagaaaaaaatgcccttgcatttgtcactgttgccatacattaggcctgtatttgatagatctatatggaaacagagaataaataatcttgctgcaccttctggctttctgcttggtgatagatgtgcggattagagaacatctcaggtcttggttaggagaagctgaaaagaataggtgattgggtttttaaaattctgtatgcaa

SEQ ID NO: 1881174 - DNA, 4001 bp, Homo sapiens
ctcaaaaaaaaaaaaagaagctgcttccctgattcaaggtagctctataccagcttattgtcatgtctataattctgccaccagagattattttctgtgagctactaaagattcataacataaaaataatgtaaactatctgtgctgttaagatttttttgtttttgttttatttgagatgggatgtcacccaggatggagtacagtggtgtgatcatggctcactacggcctggaacccctggactcaggccgtcctcgccctcctcatcctcccaagtagctgtgactacaagtgtgtgccactacgcctggctaattttttaatgttttgtagagatgaagcctcactgtgttgcccaggctggtcttgaactcttgaactcaagcaatcctcccaccttggatcccacagtgctgagaaactgctgaaaatacaggcatgaaccaagtctcctggcaaagagttttacttctataagccattaacaactctaacactctccagagtgacatacttgaggatagttctttagacaatagctaagctttgaaagggaagacaggaaatgggtctatggtactatcctgaagagccctggaggcctaagaaaagaaaaaccagaagaacaagaagaacattaacattacttacaccaacttttttttttatttttttattttttatttgagacggagtcttactctgtcgcccaggctggagtgcagtggcgtgatcttagctcactgcaagctccgcctcctgggttcacaccattctcctgcctcagcctcccgagtagctgggactaacaggcgggactataggcgcgtgtcaccacgcccggctaaattttttgtattttttagtacagacggggtttcaccgtgttatccaggttggtctcgatctcctgacctcgtgatctgcccgcctcggcgtcccaaagtgctgcgattacaggcgtgagctaccgcgccccgccaacttccaacaactttcttatgtttctctggggcactcctacaattaagtaactaaaaagggcatctacaatatttctggaaaataaaagcaagcaaacgttcatataaatggttgagtttgcatttatagactgatcttatgtaccagattgtgcttaaacctcattccatgaattaattcatttagttttcacaacccaaggtactcgtatcatctccaaggtgaggaaattaaagaagaaatattaagtaacttacccaaagtcacacacctagtgagtagctaactaagacctcagccttgactgcagagtctgtgcccttgaacactaaactgtcaatctttccagaatgatgaaggatgataacgatgaagcaaaagaagacaaagaagcaaagctatctacaagcctgagggttttttcactgccagagttattgccaccaaagcttagagctcaaaatttgaaacagagctggagtcaggtgagctagactgagtcatctgatagcgttgttcaaacttgggtacaagagtttttgacaaaataatttcccagctctgtggaaggtacatttgctcttcttgacaacttcactcttctaacaatgagaaggaactccaggagtctttctctgaactggacacctgatggggcacagctgaactgaaaaatggctttgagggcatcccggccccatttcttactagctgtgtttcgttgaggaagtcgttgatccctttgggcttccccggaaccggattataacaacgctcccacctaaggggtgctgcgaaagcccgatgtaaacggctacgagctgcagcgacggcgaggggagcctggaggatggcgggcccagtcctcagaaatggaaaaacagaagccaaaggcgcgctgaagcgtggatgtgcggaagcggggagaaagggaagggctggtggggatgtcttcctcccgacgccgtgactgccggcagaacccctccgaaagtgcctggggttttcctaccgtcctccccacaccgaccctgggttccgccgcacctcccaccgctcacgcgggtccgtgcacccctcgctcccgcctctgcccactgagccatggcccctccacccacctcggcggcaggagcaggctcgggagacgatgccaccggttcctctccgccgccaccagcagcaccgacaccgcagaggccgccgccatgtccctggagcccggccactccgtgactccccagtacagaggcagctgcgtcccacacgccaaacccgttcctccactacgaagcctcgtgacccccgccggccaccgtcggagcctgagcctacctttgggctgatccaagaatgtgagggcgtctccacgaacaccaatcaaagaccagagcccggcttcagtagcgacgattgggcagtctggccacgtgctcgtgggggtgtggcctttgtttctgcgtcccctggggcctgctctgactaaggcaagggttttctccatcctccccctcttggttgcctgtcactgtttcttcctgcatcccgtggggtttcttcgctctcgtcaccttctgggagaagaaccctggggaagaagccaaatgcggatggacagcaggatacacaattctctagtgctctcagggatgaaaaaataaataagctaaagtgaaaatctttaaaccacctgagcttaaaacaggtattctaactgactattgggaaaaagaggaagtcaaagagcaaactgaggaacatctagagaataaagaaactgtaaacactacatgtagatgcttcatgaggaaagcaggagggagaaattagggaagataaaggaataaataaatgaattcaggaaaccagtgtcaaaggactaataaacccacaggttcacaaaaaataaaatagttatctaatcagaaatagagaaaaatgcacatttgacatgatttaaaaaacaagcaggggaaaatcacagacacaggaaacaaattatagatttgtaagatgctaattttgcttaacttcaagtgaacttaaaactctggatgaaatggatgatgttacaagaaaatacaatttatcaaaatagatcctggaagagacaaaatttaagcaaaccgttaccacagaaaaaatagagaagtttatcaaagaactatccttgctaccaccatggcccactttcaccttcaccttcacccctaaaagttacaaaagccctccatgtcttgcaagaaaattccacacaaatgagtaattgactcaaatgctattaattctgtcccagagcacaaaaaagatggaagtcttccaaactctttttaaaaagtaaacataactttgataccaaaatcaacaaagatatcacgcacacacacacgacagaccaatttcacatgtaagtatcagtggaaaaattctaaataaaatattaactacgctgggtgctgtggctcatgtcttgtaaccccccattgagatgtgacagcgtgctggcagtcctcagaaccctcgcttgctctcggcacctcccctgcctgggctcccactttggtggcatttgaggagcccttcagtcccccactgcactgtgggagcccctttctgggctggccaaggccggagcccactccctcagcttgcagggaggtgtggagggagagacacgagcgggaactggggctgtgtgcggcacttgcgggccagctggagttccgggtgggcgtgggcttggtgggccccgcactcggaacagccagccagccctgctgaccccgggcaatgggggacttagcacccgggccagtggctgcggagggtgtactgagtcccccagcagtgctggcccaccggcgctgcgctcgatttctcgccgggccttggctgccttcccacggggcagggctcgggacctgcagcccgccatgcctgaacctcccacccactccatgggctcctgtgcggcccaagcctccccgatgagcgccaccccctgctccacggcg

SEQ ID NO: 1881175 - DNA, 4001 bp, Homo sapiens; identical to SEQ ID NO: 315933

SEQ ID NO: 1881176 - DNA, 4001 bp, Homo sapiens; identical to SEQ ID NO: 315935

SEQ ID NO: 1881177 - DNA, 4001 bp, Homo sapiens
gtgggagaagaatcctgggtggatgtgcatttttctggggagaaggctgacagctttcatcagatcttcaggaggatctgcgagtccctccaaaaagactgagagccacctgactccttcgttcctccttgatcagtacttaacactttacatagacattcatgcatgttctccagatgtcctttatttatattcgtattcataagttctcatactacttctggtctttttagtagctcttttagggctgtagccacagaacggtcattctagtgattctgagcagggtggagaggagtgcagcatccctgggcgggtgggtcagtgaagacacgcccagctcacctgatattctgtgactggttgcagaacacaagtccctctcgaaattgtttaggtttgtggggagatatctgtaagacagagtgagaaagccttatggaaaaggccaagaagtgctcagcaggcctagcagaacgctcaggaatcccacccacaccatccctcatttctgggtctttcttcctggacatctcaggcctcagacctgcatccaggagctggagcaccgcagtgcttctgaacgcctcttccagtggcacctgcgggcctagtgtccccacacccgcttgggtgacagaggccaatcagttgtcaagcttatgacttccaatcagagtggtggggccctgaaatgacttgctctttgggtcactgtatgtaaagcaatttgcagctagcggcactgggcgggtgaccctgcctgagcccagtgaggagcaggtcgtctgcctgcggtgcttccaggacctgtttggagacgaccacaataagaacgggttcaaaatgttcgactcctccaactatcatggccaagacctgcttttcaaggatgccaccgtccgggcggtgcctgtcggagagaaaaccacctaccgcggctggctggggctggactacgtggcggcgctggaagggatgtcgtctcagcagtgctcgggcgcaggtaggacaggcccgccctgccgcctcccctggtgctattcagaccccttcaccccagaaccctgagggagcggggggcgctgcgggtccggggaggcgggtggaggcccgttcgcagcagtccaggtggggtgtcccgggaggattttggccaggaggctgcgggccgggagggcgggagcccggcgggtctcccagacggacctgggtaatgagtgtgaacgctcaaaacggcggcgcggggaggatctggggccacggcagagacatgcgtgtgctgcctttctggaaagagcgcatctggaagggcagcaggggaaaggagcacaaagagggaggctgcggcgagttcggtcccgaaagatgcccccacccccaccccagagcgggcgcctgaggcggccaccgcggcccgggcttcggggcctgacccgccgcgttcgtccccagcggccccggcgcccggggcgcccctgctcccgctgctgctgcccgccctcgccgcccgcctgctcccgcccgccctctgagcccggccgccccgccccagagctccgatgcccgcccggggagtttccgcggcggcttcgcgctggaatccagaaggaagctcgcgaaggccgggcccggcgtgggcgggagcaggcgcctccccgggagccccgccgcccacgggcgccacctggcgctgctacctgaggcgccgcccccgggcccgcgcggcccttcccgccaaccgccgcctcccgccacctggagccgcgcgggccgcgccggaggaggccggttgcccaggaaaccgctgagtccgggcttcccgccgcccgccccgcggtgtcgcccgaggggcccgcccgcctcctccccgcagccccgcgcccccgtccgcgaggccccctggggacgcggtggccgccgaggcgcctacacccgcaggccgcggccaggccgtcccaggaggccccggcgccaacgggacccggcgcgtgggacagcggcctctgctggcggcggcgggagggaggccggaccggggcgacggggagaagccttcgcccgcgggaccgtgtccggggtgggggctccagttcctccgaccgcccgtgcgctgggagggaggccgagcccggggaacgccgcgtgccctgcctcgtcccccactgtggccgcgccagctccatcccgggccagccgcgtccacgggccccctcccgagtctcctcaggctctcgcctcccctacccccgtgggatgcccaccgcccgcacccacgcccgagcctggcggcagcagccgccccccgcctgaagggagccggaggtgacccaggccgcgggctcccgaggcccctgaagggctgcgcgtggggacccgccatgcttctgggttccgaacgggggtgagctccgtctcctcacccggccccgcacccgctgggcctggggacccctcactccccgtgcccgcccctccgcgaggcagcagaaagcgcccggccggggcctctctctactccatcttgccacagttgtctgagaagccagaaaaagtttccagaactggcagcccttaaaaaaaatgaagaggaagagaagaaatgggagcaggcagccctcgtcagcagaccgggagccgcgtgggcgcggagccatttgcattccggtctgcgggggctcggggatgctggtgacaggcccggttcccggtggctcgcccccacctgcgggcgtcgggaaggatcccttccatctctcagccgcagaggaggccctggcagcgccccggctgtagccatgcaaccccgaggagtcccgggcaccttcaccccaccgggaggggccacaaggacctgggcctcggccaccaagctttgtcccctctcgctgtggggggctagtgattctcctccgacctgacgattgcttggttttttcaaaagggagttttgtgcggtgagaagtgtgtttctgtgtggctaactctgggctagcgtgccgtggccattgaaggtgtggcctgcgtgggtgcagtgtaagtgacgctggattgtcaggtggcagcaggggacccctgctgtgtcagtgctaatgaaacatgttggttggtttctaaaataaagccaaacaagccagcacatgcagaggcttggaccctgatagaaacttctgctgccgatttctttcgttttgttaggcactcaaaggcctacctgctccaccgagaagggcagattccattctccaagagccagtcagggaccactctcatcctctagtcagtgaggccccccgcgcccttcttcgacctggactggttctctggctcttgcagggcctccgctgccctggcacattccagctgcctccaccccatcaggctctggggtgtctgcccttctgtggatgggtgcagagaagggtgcaaacttctctgctgccccctgccccacacctccaaaataagcggcccacatcttttctctggcaagctcgctgctaactcactggaggggggcgtggggagcggatctcccagagaccctacagtgggtgctctgtggtatctactgaggtgggggtgggcccggctggtcttcatcagtgctctgctctccctctggaaggggaggttttctctgcttccctctctcatggcttcacttggcccccacaccaccacccctcgccgctgtggccatctcccagagccaggtcttgcccaccactgcacacaggccattttccatgaagtcggctcagttatcacaaagccagtcaattcctggggacctggatggccagagttgaccgactttgtctctgcatcacatggacgagtctcagctgcacagtcactccagctcgcctcatgctaccacttccctaccctgaacttctggaaaggaaagttaacctttgggcaccctagcccctcatctgaaaaacacacagtacgatcaccagcttggtgaggtggttgtgaagatccagtctaag

SEQ ID NO: 1881178 - DNA, 4001 bp, Homo sapiens; identical to SEQ ID NO: 315945

SEQ ID NO: 1881179 - DNA, 4001 bp, Homo sapiens
tattgtggtgaccattttacagatgaggaaactgagactcagatgagttaagtgccagacctaaagtcgcacaggtagtaagcgacacaactggaattcaatttcaggtgtcccttcttattccagagttcatgctccttttttataccattgattaacatcattaaccaaaggaatttctactaagcaacatttcattttttccccttctcaaatactattagatggagcagctgcaaaagcatgcaaatacatatttcatataacaccacaggaagtttttaaatattcatatgcagaaccagaagataatgtgaagtggaacctcgctccagaatccctgcacctttccagttgcggagtttccgggtgaggttagaatatctctaaggtgcccaggctcagattttaggcaaatatctgtaacctgtctgattgggtaagttttacatggaccacatctaccaatttcattcagacaaattgtgtaatgcagtgcttcataagtatgagaaaacacagaaccaattaaagacacatttataacatcctctactacaatctttaaggtaaaaaaatgcttcattttgagtccatctgcaaagaactgtatgaacagtttataataaagagtggcatgaaggttaagtctgtaatctttgtataagaaatttcccatttcaactggccaactggcaaaacaggctgctgtctttatagctctctgttggtccctggggatgcatcaaaataaataaatgttccctgccgatagggacaggctgaacgtctgctcatgcctaagaggccacccaagttacagaaacacgaagagcacttttttaacaactactcccaagaatgttactggaagtctgaaacacaatcgcaggtgatcacaggctacccctggcccaaggcttctaattaggtttcgaccttttcccattccagctgcactttccatccataatcctcctacactgtgatgtttccatgaagccctgtattcccagattggctaattcatagactctcagtgctgcaaagatccttggtccaacactctcacgctacaaaggagggttccactccttggccaaattaactatccgctgccacagcactgtcatgccttgcttggaatcttccagggcttcccaccactgactccccatcttggtcccccgccctagaatcctggcatccttattaatctctacattctaggcaaatcaaactatccattattcttcccactcaagagtattgttttgtttttgttaatactgaaccttctacccagaatgcccatttccaagtgccccaaatgactcaatcttaaaaaatccaagtcgatgccaccttctccccctctctcctccactccccaggtcggattgtcttcctccgatccgccttctttagcttccacaggcatccatctaatggcccattcacttcctacacctgcctcagctactggtctctgggaaattgtctcttgtggggcatacgctatggagggatgcttcttgtttttctctataccatgcgtccgatcttttggcttccctgagccacactgggagaactgtcttgggccacacataaaatacactaactctaatgatagctgatgagaaaaaaaaaaaaagcgcaaaaaaaaaacctctcataatgttttaagaacatttacaaatttgtgttgggcggcattcaaagctgtcctgggccgcacgcggttagtgagccacgggttggacaagcttgctctataccttcagtctccggtgagagtgcctcgcacaagtaactgcggagcaaatgttcattgaatgaaggaatgaggaatccaagcccagagaaaacatgagtgactttttccagcacgagtcatattaatagtctcgcatgccaaaggaatatcaccatccaactttccaaaatccaatacgataataattacttgtattattattcatattcacttcagtgaggacagtaggcttaaaaagccttaaacaggttgggtttctagtcccagctctgccacttaatagctgtgtaacctagggaagaaagtctcttgccctgtggactgagttccccagtctgtgaaaaagaggagggtggataagctccgttgttctctagtcatgtcaacttttcccacttgccagttggttagaacacggttggttgccggggcgcctcgaggtcctcccccactccgcccagcacacctcactctcaagccggggtcttcttctcgcaccgggaggcagctgtgtgtgtcctggggtctctcttggcctcgcagctgccgaccttgccgccggcggccgcgggacgactccatctgtacccgggagacacccgggaggcaggcgccagccatcactcggggccgtcctccagggccaacgccagcaccagcgccgccacgctgaaacggtcccggcggcccctccgcggctctgagacgcccgcacgccggggggccgacgcgctgggctcggcgtccgggcgctgccgagccggcacgaggctctgaccatggggagccgcccgctccgcccaggaggcggggcacagtcgctccggctagacctcgcttggccccgagcccagcttcgcccgcccgcccgcccgcccgccggggaactgcaccttctcgcgccccgacgcagccgcctccgcgcgcgcacgcaacgcacgcgctccagcgcctacggtcaaagcgccgcgcaaccagttattccgcccccggctccgcacccgcgtctcggacgttcccgcagccaacgtttagggcaccaggcgctgtgctaggcgccgcggttataaagataatcggttttgttgagcccaggaatgttcgggtacacccatcatgagtacacccactcttctagcctaacaaaaattcccttagggcccaaggaatcatggtacctgcaccccaagaaagcctctgggtctttgagtcagcaaagtggcggaggaaggactggccctaaaacaacctcactgcttacacacaccacaccacacacacacacacgccagatagccagcagagacctccaaccacacacacacacacacacacacacacacacgccagatagccagcacagacctccagaccccgccccgcccccctcccccggcccccctccgcccccacgcgccaaatagccagcagagacctccaggatatggctgtgagtttaaaaataaagctggggcagggagagtatcctttttctcactgctaaaaaaagaggccaggaatactaacctagctaagtaaggaacccttgaagactaagtgaactttatggagcgctgcacaggacgttgcttcaacctagtcataacttagatttttattctgatgtaaatggaatctcagctaaaaggattttttcccacttatttgaaggctaaaaaatatctcgctaattttatgtattttgtcataatgggataacaactacctaaatatgcaacttttttcgtaaagctattgggttgtgttatgaaggttaagggtgaatctgagtgatctgaaactttgggtctggattggcacctttggaaacagtccacagaaggacattgaaaacgtaattattgacaaagtggaaactagaacacttgagaagttgtagctttttttatgcattaatattttcttacatgttccttaatatatatccagagttataagctgaatcagatatgcctttcaatacccttttaatgtctcaaagagaaagccataaacatgcatttgctttatgtttctcaactatttcgatggagtcatcactgtaggaagtggttcatgattttatacaggagaggtattgtgagcatttataaagccatcctgcttatgagccaaatttattatgtttgctaggttaatctgttttctctaatcaaacacttaatcatccagtctcctctctgcgttatggattcatgaa

SEQ ID NO: 1881180 - DNA, 4001 bp, Homo sapiens
tcacatattgaaggatatttgattcttaattctaaatacgagctactcttatgagtacttctccctggtactatcataagagatttacatatgttctaatattgaaagctcacaagagaccccgagacagggaggtacacttacatttactattctcattttacagatggaaaaattaagacttcatgaggttaagtaacttaccaaggtcacacagccagtaagttaggggttcaaacccacaagaccttatggccctaggtattactctctccatattccatatttggttgaggagcaggtccagagaggttaataaacttgcccaaaggcatgcatcaaggaatggcagagccagagggctatgtgacctaaaaactattgcccctctgttttgggatagtcccccccacacacactcctgcccttggccttgaccaccgcatacagatcgtttctaccctcttcacctccaacttcattggcatctgcttcagccgctccctccactaccagttctacgtctggtatttccacacactgccctacctcctgtgggccatgcctgcacgctggctcacacacctgctcaggtaccagctgggacaacctgggggagtgggaagggatagggagttcctgttgggggtttatgtctagggcatgaggagctgcaggtctgcaggccttgcaactggatgaaacgtggaacctgtttctcatctccaggttgttggtgctggggctcatcgagctctcctggaacacatacccttccacatcctgcagctctgctgccctgcacatatgccatgccgtcatcctgctgcagctctggctgggcccgcagcctttccccaagagcacccaacacagcaagaaagcccactgaagtccacccctttccctcaggacctgagtctaccctcaggacctggggttggttggactctgcccttccaaataaaccttgctaagtccaactctgtgcaacctacatggaggtgggggcagccgatgcctggtccaggctgtgagggacacgtatggagcagataaagaattcactcaagcagtcctaagaggcactttattgcataggatttggggactgtggctctctacccttccactgtgttgcagggagctcagaggatggaggggagtgtgagtggggtgggaggagagggagagagcacaggcaggcactttttgtgggggcaagagggctctagggagggagtaagaagcagtgggggacaggctggcaccagcctacactttcccagcaccaagaggccagccctgggcggcagtgacttgagtgtgttgggtggggcgccagcccaagcagcagggggcagccttcacacgttcgctgggctgtagcacagcaggtgtagctgcaggttttggtcccagtggcgcagtagcaggaagagccctcgggctgcggccttgagggcggccaggtcaaggccgtcaggcaagtgctgggcccgcagccagcaatcagccttggccgctgtcagttcccactcgtcgaaggcagcggcgcatcggtgctccagccaggcgagtgctacggcagtggcccaggtccggccccgcaggtcggtgccgcccagcccttccgccccctcggaggcctcggtgtctgagccccgcccactgtccacctggcctggcccctcagagcccgagctgggggacgggctgcaggaggccgtggcactgtcaccctggccaacaccagggcccagaagtgcccagggcaatgaggccgaggtggggctgaggctggcgcggtgcacggcaaagggcgaggcacggcagaggcgctcctgcgagatgcgcacagcggcgcagaagggcgcgtccaggcggaaggagcctggtgcctcctgcagccgcacctgaggagagaggaggtggggggagaagcgagctgaaacagcgcccggccccggcggcaccaccctccacctcccgagtcctcaccaagggcaggtagtcatggtcgctgccttcactgttgttggcctggcccgggtcagggctacagagtttgtgacggcggcccatgctgagccgacagggaggacggggaggtgggcggcgaggaccttccgtgggagtggcagggtcccccaaagcacgcttggagttgccattttggtccgagtcccaggcgcctgctggagagcctctctgaagtcctgcagtggggatcatcagtgccagggggcggtctctaagcccaagtgcccctaccctttccctacctttgggtgttacctttagagtagacaacagtgggcagaggagctgcatctagatggctgtgagaggcaggaggggttcctgggggctcagcgggctctgcaggggcacatgggacaggagtcaggtttgtccaggagagtggccagtgaggtgagagctgcacctgagaggtcaccagaagaggcccctacctgagctgcacacctgcagggccccaggcaggacctccctagtagtagcatccacagctacagggcaagtgaagcaggagggggcagagctgaccttacttgtctgaagggctcgaagccagcacctccgggcatggcctgtggaaccaaggagcagtctgtggagcccccaccacccaccctctacagagggctcatagaaaaaattgcagtgttctccccagcttctccctctatcgactttaacagagtagattgccttgctaggcccagaaccagctcagactccccaactttgacaagaagtgatcaggctgaatcttcaacccatagcagagcaagagccccctggctgcccagaaattcagcactctggacaacacccagaggaagcattagctggcacattttcctccacctgcttctgcactaataaaacttggaaatgttctctctcttcatgatccaatgtggtagccactagtcacatttgactattgagtacttcagctgtggttagtgcaactgaggaaatgaactttaagtattttcctaaatgacaaagatttgtttttacgttgtgggtgctgtgaatcatgacaggatcacgttgccctctgtgctggctgctaggaagcttgtcagttctggatctgatccttgcaagagtatataacctcacagcatgcacctttaatataacctcattctcagtttccttttatttttactttttcccattgtcccgcttaattttttatcttgtctgtgatgagcctcaaatcctttgtgatcaaagcgaggtatagagagtgatcaaacacacagacctctacctttgctgtttttagcccatgcctttgggtcctgactggacccatgagcaactcaccccggtcagctgtggtctctgcccctcctcggagggccagctgctcattgtcccggaccacagaggctgctgtcagccgatggagtgcttggtcccaagcagcttctcttacaggaggtgagggaggctgtgagccatctccaggtccccacagtgtctccagcccaacacccacctcccagcacatgggctgctccccacacaggccccggatcaccacatggcagcgtggagcctggggaggcactgctggaggggccaactccccactaggaggcacagccgtgaataagaagggtggttccatcagcatgtcccagtccataggggctggggagagcaggtttcctggggaggcaagacagcaggggcatgggcagagtggtcctctgggctttacctccccaaggcctctttggtgtcagggaaaccagctccccatccaacacttacctgagtcatccaggccttgtcccaactgttggcctggctcaggacttgggccatctagtattgcacccaaagagggtttccggggtcggccggggacttggtttgcccggcctggaggggatgagaggcttcggccagccagagccgctctgtgctgacggcccagcacctcagtactc

SEQ ID NO: 1881181 - DNA, 4001 bp, Homo sapiens
ttgtagtgaaatggcctgggagattccaagggcttctctggagggggattggctgcagtgtagatttgcctctgaggaggctgccccagacttggcctcctcatgccccctcctgacctctgcccttctctggtcctggcatccctggagaaggtaggggtcttgacctaagtttagatttgatctccatgtgcagggaggctgtcctgggcctgacaggtcctccccctttctgaggtagcagtgccttgtggaggtttgacaccatgtccctagctccccaagcacacaccaggaaactgcaggggctcacggaggaagtgctgcctgggccagggggaccagctttcctccgtagagaccatgtgcagaacacttctgctgtgccaagaacatgagggagccagtgttttgtcagcaggaagaaagggcctgctgggatgaaagtgggaaggaaacagggttgcgtagtcaggagacacctcaggggcaacagcacaggcccagagtacctgctgcctccactgcgtctgtcctggggtcatgaggatgctgaggttgacgacaggttccaggtcctttcactcctttggccaaaggttgggggtaggtggcccaagtggcgtgctctctaggtagacaacaggagtggtcagagttccctcaaaggatcctccactccagagcacctgagaaggccgggaccagaggccctgtgtgatgtgtactccgcagctgtttggggtgggacatttctgtacttctcgatttgcttatggctcagccattacctgtgtcagtccatgattctgttgtaacagttttaagagtaaataaataaagctgcctgatgtcccatcacgcaggcttcgtgcttctgtctcgttttgcatctaccacctccctggatcttcctgccctcagctcagcccctcagctgtgaacttgtggatgtggacacgggaaggaccactgtgccacatagccctgcgccttggctacctgtggaactctcccctagtctgcctgataaagggctacttgacacttacttgcttacttactgtccaaaactacaaggacagtgacagttctgacaggcttcctgtggtgggtaccgagagcagcagctgtgccaggggactggggtggttaacagcaccgctgcttcatgctctttcttggtgaagggaggaggttccaacccccttctctcttaaaagacttggggccacagccagcccgttccccagcaataagcatctcactctcttctctacctaccttcctccttcctctttggggaaccgtggcccagtgtatggaggccctgagagaggagcccctagtggacagcagtggtcacaagggataaatagaactttattttaaataaacatttgcactctgtacacagccccagcagaagcagggctcagtcgtcagctgtcttgcgcacatcaaagctgccacagggtcctcgcagcagctctgccagtagcgcaagcagctgcccgtgctcctcctgtacgctggggggaagtgcagccagctcgctgcgcaggctccgctccaccatgcggcccagggcccgccgcagctccttcagcagccgcacggtacgcgagtcaccctccagccgcagcaggtcactgtcgctcagtgagatggtggcccggcgcccgtcatctgagggaatggaaaagatggtggggaactgtggtgaggccaggccccggaggagcagctgcagagcggggtgggcgggaggcctgcaggcacccaccacggatgtgcacgtccccgtcggtcagcagcagcacagctagcgggtgcacctgagaggagtcccggacgaagacgctgccattggacttgactgccatgaaatacgtcagccatcggctccgtaaccgtgtggcctccctagggaacacagggctggtgaggccacccttttggaccatcccagctgccccatccaggcctgcatgccctcacctgttaatggtcgacttgtgcagcaggatgttgcctgatttggtcctatatgtgacgctgttgggcttgaacttcccctgccgggtgaccttgccctgcctcacctgcagggatggaggaaaagacgggtggggctgagcaaggagctgcagacagggaaggaggctgggacctggtgaactccattccctcccagaggcagcacctggatgaggttggggtagaggccggccatcagcacgcccttcaccagctcctcctcctcactgtactcgttgcactgggcggaggccagggtgcagtccgagggcttccccaccaggaaggcctcataaatgttctctgagaactgcttgatgagtcctagggagacagaatgtgtggtggacctacagcccctagccacaggctggaggtgacagaaactcagtgggggtgggaggggctcaggagagcaggtgtgggcccgactgaccgtggatgaagcgcaggctgggtgcgtacagcaggttttcctccaggtaattctcccgggagctgcggtcctgccaacgcagcacctcctcccagccggcgacagcccgcacaaaggccaggtggtcactgccgctgtcatggctcaacagtgctttcacctgggaggggagaagagggcagccggatcacaggcaggggctagacaacgccccctcagaacagcagtgggtggacggctccaggaaggagccaggactgaccttgtccacctctgcccggttctgtaggctgctgctgaaggggtcccgggtgaggcaggaaacgaccaccagtagtgggtgcaggcaacggaagatggcagccaacacaatggccttggccaaccgggggtcggtggagatgtgagccaggcgctgccccagggtagtcaggtactcccgctggtccagcacccctgcaacggctcagctgtcagtaccaccctcgagagccactccccagcccagcccagcccagcccctacataccgatctcctggagcaagatcacagcctcgtccactgccttgatgtttggactgtccacagccttggacaggaactccaccgcctatgacagagccagagcccgccatgagcctgcctcccacctgcctggtccccaggccagcccctgccccgccccgccgcaccgtcttctcaggcatgtggattttcgcttgcagcaccaggttctcaagaggtgtgcgcaggatctctggcacttggaaagggaccattttctccagccggcttcgagggaacaagtggtaggcaaagccggactggcagcggcccgcccggccccggcgctggatcacattggctcttgatacccacactgtctccaggcaggacacctggaggaggtggcaagtaagcagcacacaaatgccacttcctcagtgcttccccactccctgagtaaccctcaccagccccctacatcaggaacactgagaccccacaagcgcggccttctgaagacacacaaagcaggtctaaggtagatctgggctggggaccacctcaaaacggagtccctcccccagtggttggccgggcccaggaggtaggtgccaccttggtcttcaggtcatagcgttcttccttgtgcagcccactgtccaccacatgcacgatgtcattgattgtgatggaagtctcagcaatgttggtggccaagacaatcttgcgcaccccaactggaggctgctggaatatggccttctgatccatcatggggatgttggagtgcactggtgggcaagacacacaccagttatgggcactgcttccaccagaattcccccctggaatgtgggcagggcaaggattttgaccccattttgatgaaacaggcgcagataaacactatgcccagtgaaaagtgccacagcttggtcagaaaccggggcccctggagtcccagttgggtcagtccctaggacagaggtcaggctggtttccaaaggtccctggtcc

SEQ ID NO: 1881182 - DNA, 4001 bp, Homo sapiens
cagtgggaaaacaaatatttggtatggtaacccaaacttatcactgcttttttgctcagtttcacacgttgtaactcaaattactctaaacgtgtttaactgccaaacagctacctgcatgttagaaaccagacaatacaaaccacctaataagaaaggttccctaatagaaatactaatacaaaaaaatgccttagctggagcaacttaaaaatcaaataatcatgacaaaagaaaaacaaatataaataccgactcgctctttattcaaacagtgtgctgtttcgcttatgattccacgtcctaaattacgtcaacgccgtttctgagtgccatctcgtcaccaactgctgctatcgactcctgtattttttaaaaagtctttttttacatcatataacaaagtacaattcaatttatttagggataaagccactataactaaaccagggttcactcaaattgctaccaggcgacaccaagaaaatcccaactatagaaaaaatcaccaagaaaaacacatggacacaagaacatcactaaaagctcaagcataaggtaagaccaacaattgtggaaaaaaaccctatgtccacaatctgggcaatgtttacaagttttcccactttgttctcatcaaccttccctagtacaaatttaattacatcatcttactgaacactactgactttactgaatctattccttgatttgatgttacctttcatacaaatcacagtagaaaaacgtatgaatttttttcaatacagccaagatgctggcttctcacctgtgaatatagttttcacgattggtaggtagatcataatttataaccaaagacacttgttgcacatcaatcccgcgagcctgaaacacaatggcatgttttaaaaattgattcaaaaaaacttgacacctgtcatgtaggccacaaaatagtagcgaactatactaagtggtatagcccactgtggagtgtggtcttttactcttccaaatagcccaagttggcaaaggttacttaaaaacctgccccccaaaaagctaacttttggtagatttttaaaaagcattaagagacttaccaacaagtcagtagtgatcagaacacgacttgaccctgaccggaattccctcatgataacatctctctccttctggtccatgtcaccatgctgcaaattaataaaccttaattcaagaatcaccagtcaggtcggtatttaattttaatcaacatgtatgagaccaagcgtccctggctgctacaggagaatagcagacaggtatagttaagaaacaactttattttaagcagggggaacgacaacacagcacttagcagctatattgtagtctgaatcctgctttagtggaaatccagacattttagaacacctcttaccagagcagaaactgtgaagtctctggcatgcatcttctcagtcagccagtccaccttgcgcctcgtattgagaaaaataacagcctgtgtaatggtcagtgtctcgtacaagtcacaaagtgtatccaacttccattcctgtaatgtttagaagttaaagttaacagtcatttagtttttccaactcttcagttaaaaattcattctgggccagccacagtgctaatgcctgtaatcccagccctttgggatcctagcacttagagcccagagttccaaccagaccagggtttcaagaaagtgaaactgtctctacccaaaataccaaaattggccagtcttagccagtctcataacccagtctcaaaacgtagaaattataaaaattaacttcattctgttaggtctaatgagatattgcaccaaatcttaagacaaaggacattggacattaagaaagaggtccaccccagtctttacaatctagtgctgttacttttcttcttgtgtgtactctgctagcattattgcaaaaaccaagacatggtcctagtgtctgcaattttagcacagtgcttatacaagaaggtaaaataatgtctaacaatcagacagttacctctctctcaacattaatataaaactgtttgattccttcaagggtcaattcttcctttttcaccagaattcgaattggatctctcatgaattttttggtcacttccaacacatcagttggcattgtggcagaaagcaacacaaccttaaaaagagaaaattatgttgtagcacaacttacacattaatacccaaaggaaaatgtctgaagccaagcgtctctgtcttactacggaatgaaggtagacagagttatgcatcaagtgctttaagcagggggaacgacaacaaaacacatcagttgtattgtaacagtacctgcattaaataaaccccatctctacctttaagaggggggtgaagtaatgcttacctgaatacttgtgtttagtttttggaaaatctcatagatttgatccttaaaaccacggctcaacatttcatctgcttcatccaaaacaaacattttgatccattttggagctgttagaaacaaagtcatactgtcatttctagatctactcagtgatacaatttgacttttcaactatgttaacagttttaaaaaaaatactctcttaaagacaatacttacaaaggtatcttctgtttaacatatcaaacactctcccgggtgtaccaacaacaatatgtggtgcttcagcctgcagtttttgcatttcatttcgaacatttgttccaccaatgcaggcatgacaagtggctcccatatagtctccaagtgccagaattaccttttggatctaaaacccaagccttaattattattccgcagaactccaggatcaatgactaatttttaaagcataaaggcaaatataatctggtctgccaacagcttttatgcatgcacagcacaaaactacttccaagcttaaaatgcagacgacctaactgctgcaaggtaaaattcccttaatgtctttcttatgccttgtcaaacttgggatgctgctgctccacgcatcagctagacaatccaagaataacgtttcctacattattcttcactgtaggtagggagtacgtagtgaaatttatgttctgtaattacagctagggcaaatgatttttttcccccagagggtattgtgccttatataatcctgacctcaataaagcctacagctttattaggaaggtttacttcaaagccaatatagcagtgagctttgaaaacatagcatgcaacagatgcatcacgaactacggagacagtcaaatggtaacatgtcactgcagttttcatgttgcacaactgcattcaaacttaaaaaatggggacagatctagtacatccaagagagcgcttcggattctcaatctattagtatacaaccctacaaaccatacctgcatacccagttcttttaaaactttcaacaaaaactccctgcatgcatggacaattaaaaggagggatctggtaggaccaatttatactaagttttaaattcttcacagttgtgaaacctgaaacctatgcaacacgcaagcagtttttttgaactacactatcaatacctgttgagccagttctctggtgggggccaatactagtgcttgggtctccttgaactcaatctccaactgttgcaggatggaaatagcaaatgtggctgtcttgccagtacctgactgagcttgagcaatcacatcataccctaaaaaaagtaggatacacatttaccgatcccacatcaaattgtcacttctacttcacaccatgtattccatttggaacattatgcccaaataatcaagtgatcagcaatgagtattctcttcatttcaggtcagtcccgaaagatgattgccatcatttcactttaaggaatacaaacaggtgctagtcccccagaggttactttcccttttatggttcatgtctatgtagaacaatttcctaaaaatgccagtttcttttacctttaatacagggaataatagctct

SEQ ID NO: 1881183 - DNA, 4001 bp, Homo sapiens
cacgtaatttgactagggcctgagttttaacagcattcttttattttattattatactttaagttttagggtatgtgtgcacaacgtgcaggttagttacatatgtatacatgtgccatgttggtgtgctgcacccattaactcatcatttaacattaggtatatctcctaatgctatccctcccccctccccccaccccacaacaggtcccggtgtgtggtgttccccttcttgtgtccatgtgttctcattgttcaattcccacctatgagtgagaacatgcagcattctaactggtgattttaccattaatcattgctccctgatgccattttccacattgaatcttgactgatgttcccactgccttcaagataaagtccaaataccatcatctattctcttcaaaatctggccttcctcttacttatttcctgaaatgttctatacctctctcttctacagaaacctcagtgtcagattttgacacactgagctgtactcttttgatcagctttgcacttgcaaacaggttcttctgctttgaatccctgtcttttgtctcacaccaggctacattctgtgaacccaaagtatctgagacaggtctcagtcaatttagaaagtgtattttgccaaggttaaggatgtgcctgtgacacagcctcaagaagtcctgacaacatgtgcccaaggtgctcagggtacaccttgcttttatacattttagggaggcagaatacatcaatcaatacatgtaagatatacattgactcgatctggaaggacggggtgggacaacttgaagatggggggggttccaggtaataggtggatttataaatgttctgactggcaattggttgaaagagttattattagtagaaagaaatgtctgggttatgataaaaggtggtggagatcaaggttttatcacgcagatgaagcctccaagcagtaggcttcagagagagcacattgagaatgtttcttatcacacataaggtctgtgatgatgttaatactggaggggtataatgaggcatactggaactcctcttccatcacggccttaactagtatttcaggttaactctggaatgtccttggctgagaggaggggtctattcagatgagtgggggccttagaagtttgtttttgatttacagtttcattcagcttttgggactattgcaaaggtcattttctctaagaagtgttctcttcctctcctgaatttcaaatagatatcacctcctgtttccactcttttcatacctgtgtcactgtactttttacactatactgtagcttttgctttattttccctttctccattaatagatcttaaaatccctgagattattttctataatttagaaattgtttttaatctctagtgtttgacacattgttagacataataaatgctcaactagtatttattgaaaagtagattacaaacagaaacttaaaaggaaaatttatgtaagttgataactttagaaacaatatttcaacagtaattggaaaaggcatatttaagcaaatgcacattgaaaagtctataaaatattagaagttaaacagaaaatacaaaaatatttttccaaatgtataagtaaattaataatgttattacaggaaaaacataataattagacttctaagacaataaaaaatatagaaaattagatgaagacacttttcacaattaggtaaataaaacatttagttaataatatgcaaaatattcaacacattaagaatcaagatatataattttgatctaagtagcaactattaaacaatttcatttgttacagtgatgcacaagctgggcagtacttttcatgaactcatagtgggactataaataagaatggacttggtactgatgggacttacagcatgctaccccaaaatatggcaacatggcatactgagtatgccagtattaaaatactcagtatgccagggtaccatattttggggtagctgaaggaattagagagtcatagaagcagtacgttcccgtgaagcttttgctgcccttctatcctcaactaggtcataaaacttagaaataattctctgattgtcccctggaacaagtaataagattttcatgtgagagatgcccgccctatacctagagaaaaggagtgtcattatcctggaaaacacagggatatagagaagaatctaaacaaacaggcctggataagttcccctcagctattactattagatcataccactttttgtccaatcagacttctctacaactgtctgctcttcatcaaacctatgcgtaaaaacatataggactccctgtttctttaggtcttcatttataaggtttctgtgccaggtaaaacttgaataaatttgtatgtttttctcatgttaatctgtttttgtcagttttattttcagaaccatcttgggaccttaacagggtagaggaaaaccctcctcccctacattacaaataatataattatatatctaaagcattaagtttctaacaatcttgaaccagttttatcttagtaataaattacttttaaaatggcaaaatgcattccaaaatatgtagacaaagatgatcattgaaaggttatttatcataagaaaattagaaaccattctcatgtttgatattaacagtaattttgagtaaattgtatatatgtcagtgtaacggaattatataatactataatattatacctatattataatatacataaaaaaatttcaaaaattatgttctgtgaaagttgcatatattatgtaaattaaaacacatatgcaagtaataaagaatattaacaattatgtctacaaaatagtaaggattatgaatcctaaatttttatttttttaaatattttttctctattaagtatatttaatgatcagaagaagagtaggcttaacacctaataaaaaaggataatataattatggaaatcaggaaaaagtaaatagcatgaactatgaaatatctttacattctaaacattaattcattgaacaacttttgtgtttgccactcagaatgttataaatataaaatcaaacaattgagagtccctggaattcaggcttctagtgtctagcagattatatatgtatatctgaaaagaaattgtaagaccattgaaataatcaaatgccaaatgggcgtaacagagccacatccaaataattactatagctacatcatctaaataaaaaataatctttactatgtcatgtaactaaatacatgcacacaaacatatggatagaaaacagtgatcaaatgtacaaacaacaaaagttagttataaccagcagagaatcaccacaaaatggcagatatattctgccaattaggaagaaaatgttcttctaggttatataaggtgatcctactgtttgttcccacaaaagggaattctgcatagaatactgtattattctgacaactgattagcattttgatgtgctcaaaatttgttcacatgaaaatgaattattaaggcagacagcaattcaaagtaacagatgaaactattgcacaagaattttttctatatttttaaataattggttgccaaagaatatactcaaggttaattcttccttctctgattaccgcagaggtaaagctgtgaccaatataaaaaaaaattatattgagacaaaagtattccttctgtcaatttagtctgctaaaagttaaaacaaaacccaggcattatctttttgtttagtaaataatgataaaatattatatctcaagattatcagagagtgttgatattttcttttacatagtagagacaaaaaatgaaaatatcataaaataatatattttgttagtaaaagtatcttgaaacttgtaaattatatttctacaagacttctccaatttgtaacatttcatactctattaattgccgttagaatgatgatctaaatatacactctataaaaactgcattc

SEQ ID NO: 1881184 - DNA, 4001 bp, Homo sapiens
ccagaaaatataacttatacagttatctgaagaggctctttcctctatgagatagtccatccacatagagttgctctcacaaatgactgccatgaccatttggaaagtttctgttagtctccctaggctcaacaaaaggacgcccagctgtaggacccagagcctctgtgcactctcaaagagccactgtgtggtctggttacttggattttattagcagaagtgattctctgtaaggtcagggaacaccatctgctttcccaaatactaggtacattcatcactgtggtggaaactgtgttgggattttaggccaggtatccagtgtggtggtcacaaaaactaagagcccaaaggtctcagtgtgcatgtgtatactaatgccatcatttctggggacaatactgtttatgatcatttcacttttctcacttcctcaccctgtacaggccacattaactggcactcacttccttgacaccctaggcactgccttgcttctatatttagcttgatgctgctctagagtgcactcttctcattacagtgtcattatcttaccttgggagggtcatttttgcggtgatgtgggagaatgtgacaaaccaaagctaccaggttgccatggaatgtaggtggagccagtgaggtctctaactgaatgggagagggtgtttccacatccctaaattctcccattgtgctttattaaagagtaaaaaatgcctcatatattgtctcttgttttgacatccactaacaaagttagtgaagaggagaaaaagcaatggagaagtcagtgggggaggcctaaacttttttgaaatctaattctgttgcccagttatcatattcatctaactttctcatcccctcacatagatctagagtttatgggtttagtggattgcagcatgttttgtaactgcgtttctttgtatgatgacactctaccacaagactgaaataatctctttaaaaattgccacacaatggcaccaaacctaataaaaatcattataattagatatctgcatcttttttcttctaaaggcattagtaaccaagtagaaaacttgcacatagcctctaaaccaagatcctcaagattgtaaattaaccctttaattaacgttagcataaaataagatagtccagaatgcaagcaacacatttctacagcatgtatctaaactgatagcaccgttaccaccaaaatgataaaggtaataacgttttccacaaattagagaaaatattgccaagtgattttttaaaaataaatagttatttgaaaccctttagtgttctcaaaacactgtaaaagtctaaagtcaattcagaggtcaaatatattcttccccaaactaatacagtgctgaaacaagacaaaatctggctggaagatataggtttctctaattcttctcccacagactttaaataggccatgagataaaccaaagaacatgtaaccatccacaatacgggggaatttaattctttctccaatctgacaggatgctagcagtgtcagcattggtattcttaggatgtctgtgattggtgctaatccttggcaagaactgcacttttctcataggttataaaaatggtacatattgtgtatatattacatacatgtatctgtatacattccatatgcataacatagattcagtgcagaaatcagatcacggagcaggcatctatgagtagcagcaaggagcacgtgctctttacatgacctacttacagaaggcagagtctccccgtcaggcagtcttcagcatgacaattagcagtttttcctgcagtttggtcagcaggaatgacacaaacctctccctagcacaagccactcagccctgtcgggttcgtgctgctctttggataacggcattccattaggagtgtgacacagtagggaaagagaccggttcactgtgagacctgctactcactctcgtacagtgtatcggccccccttcccactgcacagtggctgccgggctctgggcaggaggcatgtggccatcatgaaagtgaaccatggagtcagagttccaccgagacacgctggattgtcaatagccttcttctaaaggcagtatcttttagcacgatattgaaacaacctaatttggttccctagccttaagaacagaggaagcactctcttcaaattgaaaagaaaaaaaaaattaaaagaaggtatgaactagaaaggtacggacatggttgactttctgctttaacagaagaaggatcaaaaaataatttatggagactgtttaacatgcatgccagggatgctagtctgacatatgcttcaccttcttgtacctactacttttccacacagagtcaatcaaatgctttgttatcttctctgggtagagaaaatgtgctggtttaaattgccaagcttggacactcatccaaagagtacaagattcaccagcaaaaataactgggttgagaagcaaatgggaaacagattccaagtacctgcttgctgtgctgcctgtggcatctgttgactcctctgagcgttgtactgaaccggggccatgggccggtactgttgcgtggttgaggtagggtactgaccagatgggtaataatatacaggcatctgtggaagaaaggaggaagaaagcagagaatgaaaatgtagataatgtaaatttttaaacttaaaatatgctttcgtcttataattgtggtaggttgtgaagatggccaccgcaaacttctcccatgcctatgtgtatgtgcatgctacttctcccgtaaagaggcaaaatccatttcccaaacttaaatctgagctggttctgtgactttcttttaccaacgccatgaggcagaaatgatgtctgagtctttcaagtctgatcctaaagaagacttgcagcttccacgtctgtaggcggggaacccagccaagagataaagaagtctagactattctgctgcagaaaaaggccatgtggggaacacaggtacccccaattgactggttaccctccagttccaggcatgtaagtgtagccctagtcaagccaccccagccatatggagcagagatgagccatctgtgataaatcctgctcaattgctgacctagtcgtgatcatacaatggttgttttaaaacaagacttttgtgttttttagatgaaacaagagagagtgaaacagttatcatcaacaacgaaaacctacattttaaatattatatctaacttgaattgcttttctaatggaaacaggggtgaaacatgaaaactgctgatctgtagcctaaaaggagcagagaatgcaatcatgaaatatggtagtctatcaaagcacattgcagaatgattggtacacaccactattcaaaaaagtatgttcaatctaaaagggaaaatatgataaaaatgttgtttatgctaccttcttaactttcttatgactgagaatgaataaaattattctgattatttgattatgatccaaatcaaatgtttcctgatctgatagacttctttgcctgcctcagttcatttatattaaggtcactttcttactgatcttagttaattattttctatctctgggcttctgagttttcgcctatcatattctctaaaataacaactgaagtaccctagtagaccgcctacaaacattatatacataggataaaattacaagtcaattatttgagaactgtgattttcatggttattttgttttctgatttgctcaggtctaataggaaacacttttctatttcaatattgctgttgaaacatatgtaacatattttgctgcctgaggataaagtgggaacaaaatataacttaatctgtgtgaacctgtagctctgcaatttcatggaatcatgatgaattataactgtggctacataacatatggatattcaagggcaagaggctgaatgagtctaaagcaatcttgggtcagtatctggcaactaagtcattg

SEQ ID NO: 1881185 - DNA, 4001 bp, Homo sapiens
tggtcttaatggtgtgcattgaagatattactgacgataatgaggcaaaatattctcaagcatgacacaagtttggtgagggcccctgccaggtgacaaatcccctttagtctttcccagctagaaagttcaagacaatgtcactagacaaggaagagaataagagtaagcaggagaggaagcacctgagctttttgcaaacagcactggtccgccagacaatgatgtaaacaacgtctaatgacacccaaaggtaaaacaagaaatgctgcagaaggtgctagaaaagaaagagtgaaggggggacaagaagggtgagaaacacaaaccaatctacaggagaaaaatgttgaaactcaaggctaaatatggcatttatcactactttcctttgttgtcaagggtaacagataatcaattaaaataataaactttcgttaaggacaagaatactgtatgtgctgcaggggcaccatgctaagtgtctcatgtacataatctcattaacttcttgggacaaccttaaggcaagtattattatcatcacgattctagagcagggacaacagagacctggagatgtcagggtaattcacctaaggcctcgcttctccaaactgccaccgttggcatttaaacccaggtctcctgactccaaatgtgtgcactatgctgaatatgtatgaatacagacatacacgcatattgtgtacacttacaagtgtagcaaatatccagtgccctaatatggtggtgaatatgtttagttactaatgtgaatccaaacaccaatgaaagattagaaggaaacaaggtttttaggaccacaagttaaagaggtaggagaacattaacaaaaaggttacaaatatcttgccattaaaaccccacaaaccatgaagcctgagattccattgtttcctgcagccactgaggcaatgctggctttgagtcctgaatctgtctcaaccgtggtatgtaactttggacaagtcccttcttttagcaaactgcactgccctaatttataaggccattgccaagtctaggattctaccaattcatgctttttccaagctttcaattattaggtaatcaactttcatcgcacacctatttacacctttaccaaactcactggtcaattataattctcagtccctgttaaaagagaagaataatatttgggcatatgtagacataccctagaagagaaaagcattttttaatgaaaataaaaaaagaagggtatgggagttgggtggagagatttactctgataaagtacatcttgagccctttctttcctggctggtccatatttctaaatcatttccttgctttcacatagtaaattttctgctagatgtctagatatgctggagatcaggttacagtgtgaaggacaaaagataaaaacaatctgcatacttccatctggctcttcagaacaaagtctagagacttgaaatgtgaggagagaagcatgctactctagctgcacaacagatacagcaaaatgtcacagaaacaaatctttcaagagaatccgagatgctggaatgcgtatttcaccagaatttactccgagagcattaaaaaaaaaaagttaaggctcagatactgaacacaatgttgcctctgttacaagaagatgaaaagttgaaacagaccaatgcattagaaagtccatactgtactgcagagatgctattcttattgctgtcaaaagactcctggttttaaaacaaacaaaaaaacaccttctagattatttattcagacggtcttgcctagtttttaggactcaaaagtcaacactcgaggtttgactctggtcaaactactcctttgccacatggcatcacgccgcgcgagacagattttcagtatgaaagaaaccagcagtttccaatacaaacatgggctttccaatatataaaatttaagaaaagccagggtctgtatagaaaacattaaactggcttatatatcaaaatcatgaggtttaagcagaaatgcagcattaaaataatttacaaaatggctcaacaatgaacattttcctctgtgaaaaaaacaacacccttaatgtttttcatatggcacataaattttacaatacctgcaggaatattttcattggttaaaccaacaccataggtctttttagctcttaagcatattacgattcttgcctttttatggcatttttgttgttgtttgcacccaatgtaataagcttttgagaacaagaaacaaaccacaataaaaagaaaaaagaactacccctttgtaactgcaactttcacaagaggggtgggggagcagagcgatcgaaatctcgtttttatagctgctatcttgatgcaattagtgtaaaataattgtctgcacaggccaaagtagaggctaagttgaggcacttgagtgcattcccgaaaatgatttccctgcctcttccttcagcctgctgcagcagatgttggctgttaagccgcacagacgacacagttcatgacttttctaagacggctgtgtgccacatctgcagttgatgaaatggagagcagaagtgtggcagacacacagaggagagtgtgagcgaggcaggcaggcgcaggctgggccaaaggaactgtcttgaaggctggcctaaaaatagacacatactcacactcctccctccgcagccagctcataaaacccggcctgcctgtcctattatggagtcagcctatggcagacacttcctgcatccagcttgggctgcagataacacaaaagcatggaggcaagagtggaggggagcaggcggtgtagcatcctcaaactgcagcttcgctctccgagcctcggtataactgggctgtggtccaagttcagctgggcccccagagaaaggcaatgcttgtgtttagcccgcacaatactgacataacattaacagatttacatatgcaaaactgtgaagcaacaggcattccccctcaattgacccacagcttgtagtgtctgccgagttattccccgcttcggctctgtaaccaagtgggcggcatgcgaataccatctgggtaccacttattgaaaactggcagtcgctctgtaataggcaagctggcaataagagggaagggaataaattgcatcatttagttaacatccacttgctttgcggctgttaaaaaaccatgactgaataataatttggttatttcttttgccagaaactgctgtcagccaaattgtactacgcacgctgcagaagtcgacttgcaaaatttccacttgagaagggactgaggaggattggggcaaaatgggcaccaacctctggctgttagcagtggcgactcctgctgcacagtggctctgtgtcctccaagtgtcatcatcccaaatgtagttgacaccaagccctggttagccacctggccatgctgagccccagcaccaagctgtgatgtgtggtaacaccctcaagcagctcagatccaagggtgtatgtgacaagtggcatctacgtgactctcagctagccgtggaggcacatgtggccaagcaaagcttgagctgacatcccccagtttctgcctcaaaacagagtggggaagcaggtccacagaaagcctgagagctgcaggcctatatccctctacttctgtgcctggagcaggcagactgaatcatttctttctggtttactcacctgctttcaaatacaactaacaaagaaagtgacagaaaccttagaccaccacataaaggtagaagtgatcttcattcagtaaaacccatgtgtttgaagtggttctcttttgaatatatttgtaaagatatgaaattctcttatttactatatgctgtgcctgtgtgtgtttacacactatatatacacatatacacacatgtatgtgtgtatacacacatatacacacatatacacacatatatgtgtgtatacacatacatatacacacatatatgtgtgtatttct

SEQ ID NO: 1881186 - DNA, 4001 bp, Homo sapiens
aagtctatgccccattaagaccttcttaaaatgctgttgtcttaagccctctttcttctaataaaatttatacaaatacacacatacaagctgaaactactataaatgaaatattaggattttttaaacccataagcaaacactaaaacagtcactgtttgaatgcagagaaagtgggagtctaaagcagctgaccccaaaacagccttaccaagcccaaggccaggccaggcagtctgaacactacgaggtcacgtgatggtcacagaggatgacagctcccatgagtattctcaggcactgtgttagcttctcactcacagagtctcagaatgcctcctcaccaataccctgtgagggaaggccccacctcactagagcacaagaggttcctgagctcttcccagaaaatggttatcaaagggtggagctgggggaagcccagacagaacaagtgagtccccagggtctccttaacctccctcagctcctccacatgcggccctgagggaaagtgagcggcctcctaacccctttgatagggttccagtactgcaggtctggacttccttattttctggaatcataggaggtgacaatgcaaacccaggccccttatttgccatccctcaatgccaggccaggcccagagccctgtgctgacacagcccaggggatgctcgaaacccacctcagcacagtcaccaatagcatagtgagatgagcaaggaggtgcaagtaggcacaaatccccatggacatggcctcaggcatgttccacaggctcagggtctccctgatgagctcccagccctccttcagggagcctgcagagcacacccccagggagcagtgctcagatgagcaggcagaccccagatcccccaccccaggatgctctgttccactttgcagggctgctgcattcgccagtccccactgctttctggtgggatgtttgagttgaagtgaatgttgaagggcatacagctgacggagctgactgccttgcagaagttgtaaatcacctcctggctccacgggtcagctgtggagacacagcttgattggaggtagcccccctctaccatcagtggtgctgggctgccctgatctgcaccttccagctccttgctgagatgtcttcatgcttctctaagggactgggtcacgagacacccctgggaaggcccagctggcagaataggctggacactctccctcagcctccccagcagcccggcctgtgctgtcacctgtgctgatgatctcacttctctatcttaataacagcactgataacttttaagccctagcaagctgaaactgcaagacaaatgatcttctgccttagaagggctatggttgggcagtgtgtgcccaggtgagagccctgtggttgttagtagaaatagggagctggatgggcctggccccatagcctagtggaaagtagggccctctccttccagagcatcaaagtcttagaggctagaaaaaggtgcttgggtgggctgccaagaagcagaaggctagaaggctttgcaaggaaccccaacagacttcaaggtgcctgagagggctgggcttattccagctttctttgctttcatcctgttagcaagaaaacctgctcacagatggcaggtgggcctgaggctgccagtcactcaccaggggctataggtgccttgattgtggctgtttcttgaagcagctgctcaggccggttattgcagagcagttccctcattatccacaggtccttgttccagccctggctctgcaaagggactagggagggactaggcaagggctcagcctgtgccccacaacctgctctgagatatctcttttgttacttcctcatggacagcctcaaacttccaaatgaacagaccagcatggagcctccaggaaagtgcatagaattctgtctggtacccagagggaagggggttcccagtgagggcaggaccaggcttcatgcacctcttcaggaatgttctcctcatagtccagcctcaaggtgtgcatcctctgtgtgcatggagtccatggcaggctctgcctggggagccgtccagctgcacacctgcaatgtggtggtgaccctcttgaatgggtggttctgggccccatggctggcagcagagagggagatgttcagccaccaagcccagagccctgccacaggcttctgtgaggcctccatctgctctgggttcttgccctgagaggctgccctgaagtcagacagaagcaggtgggcctctcttccagggctgctctctcccccactgacagctccctagagggcgactcagacagtggggacagattcttcaggcagaagcactggagtttaggctggccggttcattccatacccccacatgacatgacacaaggcagaggctgtgggacaaaggcattgccttttcttctggcatgaggaacggcttaggaagcaggggatggtggggctggggttgagtgatgggctgtgggccacaaggagtgggtgggcactgagcaagtgtcctggttgtctgtccacagacccagaacgagtggcatcccaggagcctgtgaggggctggcagagacttactggttccagtaaaagccccatgtggatgcagtaatgctgcctgctggtccttggctgtaattacaaacaggtacaagaggtacccatgcttcttgaagctctcagggagtgggttccagctgctcatggtaggcacttttagtcactgaacgtgcttcaggtatgtccaagtttgattaagccaggcatcttgctgtgaggccctccacttcactaaggacactcttcctttctccccctggaagttggaccttccagttctggttctggagacacgatggccccccctggacctatattatcctggctcctatatttactgtcccagttctagtatcagacatttcttcaaagagcctgattcctttcagaatggtaggaaaacttgcatctggctgctgaatgagcacattgtatcttgtccctcattggcaatgctaggaagtatatgtgtgtgtctaacctacctatacacacctaattataaagttttctatgtagaactgtgtgtatctatattaaactaaacataagtttacattgatgtctccacctctgatctactatcacatgaatcattctagccttctcgccttgctaatttgtaacctcccacttcaacagtgagaaacctggttcccaccatctgtgacttatgtaagtcattgttttattccagatacagacaccgtggttttacaattgttcacaattgcttctgttggaaagaactttataaaatggaatccaatgatgaagtatagttcatttgccatcagcctacagattctattcattttcaaagttacttaggtcaacaccattttccctacaccttcagtgagtttttacctacatttgtgtcttagtccattttgtgcttctgtaacagaatacctgaggctgcataatttataagtaaaaaaggttcatttggctcacaatactggtggctgggatgtctgagattgggcagttgcatctggtggggcctcagtctttttcacctcatggtggaaagtggaaggggagcaaggggtgcaccagagatcacatagcaaaagtgaaagcaagagggaagccaaggaagccagactctttttaattacctagtcctgcaggaattatctattcctgtgagaacagaactcactcacccccatggaggacattaatctattcatgaaggatccgtccccacgacccaaacactgtccactaggccccaccaccccacactgacacagtgggggttaaatttcaacatgagcttttgcggggacaaaccacatccaaaccatagtaatttgtagcataaattctttttcacatgatgtattctgtcctgggatactccacatcctgagtaattttatttaatttgaat

SEQ ID NO: 1881187 - DNA, 4001 bp, Homo sapiens
ttgccagtggccccaccgtggccagttcccacaatgtgcaagattgcctgcatatcctcaatcgctacggcctccgtgcagccctgccacgttctgtgaagactgtgctgtctcgggccgactctgacccccatgggccacacacctgtggccatgtcctgaatgtgatcattggctctaatgtgctggcgctagctgaggcccagcggcaggccgaggcactgggctaccaggctgtggtgctgagtgcagccatgcaaggtgatgtaaaaagtatggcccagttctacgggctgctggcccatgtggctagaacccgcctcaccccatccatggctggggcttctgtggaggaagatgcacagctccatgagctggcagctgagcttcagatcccagacctgcagctggaggaggctctggagaccatggcatggggaaggggcccagtctgcctgctggctggtggcgagcccacagtacagctgcagggctcgggcaggggtggccggaaccaggaactggccctgcgtgttggagcagagttgagaaggtggccgctggggccgatagatgtgctgtttttgagcggtggcaccgatgggcaggatgggcccacagaggctgctggggcctgggtcacacctgagcttgccagccaggctgcagctgagggcctggacatagccaccttcctagcccacaatgactcacataccttcttctgctgcctccagggtggggcacacctgctgcacacagggatgacaggtaccaatgtcatggacacccacctcttgttcctgcggcctcggtgatggcataggtcacattttgggagttcagaggaggcctacaagggcaaggtcagatggcagagcaaggttggtcctcagggcctctctaagccttagggcccctcctctccttggccttggctgtttggttaactgtcaccttccactcagggcctctgctctatatctattcccttccagccagactggcagatgggggcttccccctacccctgaggatgaggacaagcccctcggccagttcagcgttcccgtgcttctcccttgggcagcctctctcttgagcccctcaccctgtttctttctgtgaagcgagaatgtctgaaaataaataggaccatgccatgggttctcagtgcgccttccctcagagtgaggcctcacgggggagccgctgggaggggagcgtggtacggctgcagccacagtaccagggcctggcaggactcttaacacccctctactgggctgggtacgtgcaggatgtgcctcgcataacgggagcctgtgcccatccctctggagtgtgtgagggttgagcttggctcctgacagctttgatgtgcgtgagcagagaccccagggaggacaggcctaaagactgcagtctggggtgaccagccacccacccacccaaccatgactccaccatggcactgtcaccatggcttctccagcctcagcttgtaggcctcgttggatggatgtcctttctgtctttggacagcccttagccacatactgcacttctggttgagctgaagtttgtcccaccccccagtgctgtttccttgtgacagcccttgtcctaggctgaacatccctagttccttcagccactcctctggggaccaagtccagaccctgaagtcagcccttcagtgggggtcccagcactgggatggtgggtccagccagtgatgaggtccagtgacccacacctcttcctgtgaccactggcgggagaagaggcaagtgggaatagaggaacggctgtgttggcctggccagcagcctgggttgagagagggaggtgccactgtcctgcctccttttgagcccccttgctcagtgtcagaaccctccgctggctgtccccgccgtgcgccacggctccaatccctatatgagtgagcagtagaatcacataggaataaaaagccatagagaacagcgaggcctggggctgctcttgcaggcacttcttccaccccaaccctcccctcctccctgagggtgtggaggggccctgggccagggctggcaggactttcccctgggaagggtttcccttccccacctgggctctgggcagcctagcttgcagacagttcatgacctgggggcctggctcacacagggcaggctggagattgggagggaggtaaacgtggtaagcgggctctggggaccagggaggtttaggaaaaggggagcttgcaccccactgggatgcgcaggcaccgcttcctttccttctgtgctggcatggagttcctgctgactagggtcacagtctctggggttatggtgatcctcgcatgatcctgtgccgtggtgctcctctggcagcgtctacatgtagcctgttcctgcctcagtccttgctcttgggagcatgagtattggcactgggttccaagttccaggcaaaagcaggataggagagctggggcaggggctgcaggagctgagggcctggcagccatgtccccagtgtgtgtgtgggtggtaggtgtgtgagtatacagacgttggtgttggcgtactcagagtgggaatgcatctctgagtgtacacatagatacttagtacagggcacatgactccctgcatccctgctgagggctttgggtatggataggatcttgcaggaggttccccctgctctacattgaccccttccctatacttctgtttgtaggggctgggaggccagggcccggattggaccccatagggccaaatggtctgtgagcctaacccgttagatttgctcactggataccccagagataagaaaggatgtatttggccacagtctaaatgctgagatgagaaaaccctgcacagtgaatgttttgataggattcattacttgctccataaatgtcaattttggatcattgaagtgcccgtcccttgctcttggcttctgtttcttccggctgctgctgccctcgtgcccacctcatcgtcattttctgaagcttcccctggcccagctggaggatttcaccatggagggtgtctggccctgctggctatagcaaccctcacaggcctctccattctctgcacttggcatgagccaagagcagtggggcagtgggcctgggcagcccttcagtgtcagctagtcccaagcgtttgatttatagttggagattcagagagagaaggtggcttactggggactgtacagtcccacataagggccacagaaccagggtaagaacctagttggaacctgcttgactatcctctgccactctctggggctcagataccctggggccaagcaagggctcagccagatccaggggatctacttctgcttccccactgcccctcaagggcttgggatggcgacacaaccatgcttggcctctccagggatccacacagcagatgtgttggaaccttcttgtctcagagggacagctccattgtgtgtgtgatttggcagaaaaccatgcgcagttgagtggtgggcttctacataaatgtgtgtctgcatctgtatgcacatctgtgtgtgtgtgcatgtgtgcgtgtgcatgaatatatgtataagcatgtgtatgtgtagtgcagcccacagccagtctctgagctctgctgtgccccatcccagggtggagacacacaggtgtagttagagtgtaggggatacaatgagcaagttgggcaagaaggcccagaagactggcagaggctagtgtgcctggccgagggagttgacttcacattgacatcagtggcaaacctcatgaagattttggcagggaataatgtcatgaagctgttttgggactttaatgctgagagccagcttccttacagcagagggcgggggttgggggcatgcaaggagatggaaggggttgcagataggagaggtgcattaccaggctctgagaccctctcccacctcccctatgcagcctcagctccaaagcc

SEQ ID NO: 1881188 - DNA, 4001 bp, Homo sapiens
tataaaaagggaggagggtagggaagggagtggatgtcattcatgggtcccactgaagttagcgtgaggacaaccctttaagcagttataaggccaggaatgggaggcatttgcgtgatttaggagtgcattttgaaaagatcattctggttataacatgtggaagagataaggctgaaatggaagctggagaggttgtggggagacccaaaaagggtggaagtggttttgaagcatcccctggagtgcctgtaacatagttcctgcccagcttgctgtccccactggagatttttttttttaaaacagggtcttgctgttacccaaggtggagtatagtggcacaatctctgctcactgcagcctcaaactcctgggctcaaaacgtcctcccacctcagctgcctgaggagatgatgagactacaggtgtgtgccaccacacccctgtctaatttttaaaaacattctttatagagattaggtctggctatgttccccgagttggccactggagattctgatggagcaggtgcatggtggtccctgggatcctgcttttccaacatgctgaagctgccacccatggaccacaccatgagtggctctagcttggactccgttggtcgtaggggagttggtaactggatgaattcttaggagacagcaagaagccctttctgaaaactgggactattttgctttgaagatatttgtccctaaacataatttagtacaaatttcagagatgcccttaacgatatagggatggagtgagggatagaactttacagaagtagactcaccctccataattctaaggtgatacagatgcaggtggctctggttaactcaggctctatgtaacctgggtgctatgcaaggtttgcatggtgcttgtttttatccgtctctctggttttcagagcagcaagaaccctatacaaacagactatagactgggcctgagttaatcagagtggctctggatctttgtcctgtagaaaactagagagaggaatatcctcctttttattagcgttatggaaaggacaccagccaacccagccactctatcttgaaaactcttgcttgggctctgaaaaatggtgatgtcacatataagatttaagttaggcacaaaatactactccaactctagagacctccattagttttccagctctgctgggtccatggctgtaaggacctggggaaaggaagcccatctgtcagcacaggtgatggcaagtattacctttgatggagtgtctggcagatcagtgccctaggaacaatcccatgcttggttctcgtccagccctcaggtcactgggacatgcactgatggagagctgtggaactctccctggccaagaaaggtgtttgctttccagggaccctgggaccatctaggaagtggatgcattacctgcatgtgtggctacaaagagccttcctctctccaggaggccaccgtcctattactaggtcctcccttccctctactttgccctattcaaagctaccatcaccaagtatcaaaacaaaggtcccaactccgcaaccattgtgtgttttggcacctaggaggaaatgttcagttgagtggcgcttaaccctcctgatggcccataacttcattttcacagtgggaaacctggtagcaccattttctctgtaggaagctaatgttaccaggagtgtctttttctttaaaagtggagcatttgtgttgggggataaacagcagcctcaggaggccagtgtctgcaggggagctgcagcagccagcccagaactggaaagccgcgtgcctgggttctggagccgagggtcctctgtgacgggtgtagctgcctcgccagagggcgcccttgcgggttctggagctggaatgctgcctgtagtgtggtgtggccctggtgttgtgaagtagccgttctctgattggcaacggcctgattcacaacaccagctgccccaccacaccatgccagggaggtctctggggcaggccgatgggcgtagagatgcctttgtgctgctgctgccggaggtggagagaggacagagaacagccagaagtgagaaccgggaagcaagcatatgctaacatttcactgccttccccagccccacctgaaagactttttttcgttgtgccttttgtgaacttccccatcccataggggtcatgggtgggtatccatggctccaaggagtcccgggtcctgaacacaaacttacctgtgtgttggtatttctctgggaagaggatctgccttcaataaatgctcaaagggaaacacagccctccacagcttaagtatgtccagtgtgggccttcatagcatttgatgatcaccatacctcccagaacaaagttttttccccaccaatgcttttctgggagaaatgcaaggaatcccattactgtgttgccaaacacagaaaccagaaaccagacatggttcttactgcatattctgagtaatttctttccctcggctgcccctcacccctccatttgtatgctgtccagggtccccaaacctccaaggccacgcttggagtagcttccatgtctactgaggatgatcagggtcaaaatggaacccttcaaggatgcacagcaatctccctgctcagtcctctacagagtggggaacacattccagataaaaaataagggtgaccaccgaggatttgaggcagtcaaacaaaccaaccaaagctgagactggctgaaaagaaatcaggtagccaacatggacacacttaaccatcacggcgcctgtccttccatcagccagtgacccgccagggtgcttcctcccctggcttcagcgggtccaggatcctgaatgtctgtactacggaaacccagtagtaagatcacttgggagctctccttttggtagctgcctggattttatcaccattatgaaattatatagcataaacttgatgtgaaaatagcatttgaagtttaaaccctatttccaggtgtcaataaacactttaaatgaacagctctttggcccaaaatggctcccgcatgctgtgtggttcttagttacccaatcaagaaaaatcacatttcccactttctgccatctatcttggaacccactttattttaaggacataaacttggcaacttcctagtactggatatggcatagaagttctgccaaagttcttgccagagttgggggaagcagaaactttgagtaatatatcaatcatagcttatcaccaggccacataaatcactgtggtcttggagttcagaaatgtctggatttttcctatctgcaatcagtgattctctgctgggacattaggctataatctctacactggggcctctggcccacagaatcccaggctgggaatgtaggttgggaacactagataaatgtgtgtatttgatgagcattggtgttgactaagttaacatggctggctttccaagcatcaggtagagacctggaattttttctttcccatggggctgaaatttctgcggactgtcttgaggaccaataaccactcactttgagaatgagcaagttccagaaagtgggattaactccttgtaaaaagttgctgaccaagagggtacatgggaaggtcacgctggtaccaggtaaaacctgtacaaactccaagaaattagacaacacaaacccacatcctggcgctatcccatctctgtgtctgaggggcaaaaggtgactcaggaataggtgagaaactggggccatgaacagactcatctgcagccaactccactttgtggttctgtcgagaatccgctagtgcccaaggggatacagagagatcaataaatcatcaataaatggccatcatgttttaacttccaatgcttgcaaggacttggcaccttaaagggcagggccaggcctggcacaggccctaccccctcttcccctaaccctccctattctcctcctctctgtgctttcttaactt

SEQ ID NO: 1881189 - DNA, 4001 bp, Homo sapiens
aatgatttaggtcttggatgttgatactacgatgctgtttccaatttctcagcctcccaaatcagtttttaagatagatgttattcagtaggagagaaggtaataaaaatcacatttttacttaccatcaaatgctttaaattgccagttaggagtctgagattttcataagcgacttaaaaaaaacaatccatagaaaccattgtcactttccctcaaagttttaattgggcactattagttctaccgtagtccaatccctgtttcttattcctaacaagtgagttcctaaggtccttatctataaatttaattgagtcaaactgaatctgttaacttggaacattcacctttgtattatttgggaagaaatgttttttaaacaattgtaaagatcacataaaaaggttcagattatcatgtgaacaaattggctttagcatcccatatacttcagaagcacaaatgtaatataaatttgacaatttataaattatttacttcgttgggacaatattacattagcttcctttattactgaattacgtacagagatgctgtacagagaaaaaaattatccttagaagggttaaaatgcagtgtattttgatgaatctttggataaatgtaaaactttgattatcccaggatgacggtaaaagattaagcaaaagataaacataagtacaatttcctgcaaattggtatcatcatcaaatttagtattatatagggacataactttttatccattattaaccaaaccaagtcccagaatatgtaagtcaataaaacagttcaatttgattttaaaaacacacaaaatcctttaatgccacattctataaattccaatcttgtttagaaatatatctgcaattaatttcctcaacattaatttttaaataagtttaggttgaagtattgcaaatatactgtgcctggtaacaaaagatattaaaaaaggttatcctagaatgatactgatttaccttgtatactatgaatgtctaaaagtaataatttttagaaacaattgaagaataaagactaaaatggaaacagaggctaacattttataagtttgttattaggaacatccagtcaccctaacaaaattccctacttatttcagtcatttctgcatcacaaaatagttttgcttttattatgcttcggtgattctggatagaacacaggaaaagaagataccctcgaatcaaacaggaacttgacaaagccatggttttaccctaattttttttttttccgaaaaattctgaattttgaggacagggaaaaaaagataggggatttttcttaccaagccatgctggtagaatatacttttacttaaagaaaacagggtttctaataaaaatcagtttggcacaggtacttaatttttacatctctttaaaaggacttgctctgtaacagctctgatacttaacaatgtaatatcaaagtttcgttctttcagtagtagtggttccaccaagtaagtcattttcaacaaaacaaaaaccaacttgagtaaaggttaagttaaccatccaaagtgttacaaagattaaattaactaggtgcttaggtaaatcaaacaccaagtgtacagattttttcattttttggttatatatcagaagagataataagaacaaaaacaaaggaaaaggatagattaaaatataatacatttcatttaaaatgttaccttaaagggaaatacaaacaattgataaaatagttgctgtatccctgtcacactaaagcagcacagtaatattggtgtttaatatatatttcactacgccaatatttacgtgctgctagagtggaacaagtatgtcagttcatccaaacataaaacgaacatctgatgatgaaaacatagttttgaatgaatttccttaaatttctagagcagcaaataatgattcgcatcttgactgtagcatgtaaaccatgatgtgctgctacagtactttaaggcctcaaaaatgtaggattcatccaacctagctttatagaaaaaaaagtaacaagaataagagaatctttgaagtctttaataaacttacctgtaaaattaaaaatctattatggtccaagtcaattccatggcttcgaagaagatttccaacatccttaaatgtctttttctttccacttatgtgatagacagaagtattatctctgcaggccgttctggatacatagaaattactgttaggaatgacttcataatcatccccttcctgttttgaggaaaaacaaaaccagaaaacaattgttggtattaagtcataggcctacttcaaaattcactcatttcatactgaaactaattctatggattaaaaacttcaattgaacatgcacacaaactgccagtagttctcattaataacccaacttagcaaagaattgatacttttccatgctgttttggtccctttctcaaagatcacaaaaatcaagaagccaaaccaaccagccaacgaaaaaacccacctccaaacaagcctaaaaacgtttatgattgagaagacgtagacaagattcccaccatatccaaaacccacacaaattattaacatgttgacagattaaaaagctgcagctttttaaaatgatgattcaaagaaaaaggaaggaaggtagtaaccgggtgatacactttagtttttttgtgtgggagggtaaagagtgtgccgttaatttaaagtaaaaagaatcacaaagaaataacaactaaattcccttgattttcttttaaacagatttttaaaaaaatcaattgcaaatctactttaacactttcccttaaccttaaaagttctgtcatactgaagcaaaggcttctaaaatttagataaatcaaatgtaattaatatgcaatggaataaaatctgatttcctggcaatctattttccaacccaacttgtacaatagaaagcacaaaagaaaccaaattaaaatagatgattctgtgtaattaaagcactttgtattaaaaaaaggaaaacgaattcaaaagacaaatcacctcccaatttcattatgtaattagttttctatatttttaggttccatcgagtcatttttgaacaatcaatttcctacattattaaacagaagagaaaaagtctcaacaggtaaataatctagacattttacctctagttgtctccatttctagaaaacaaacattagcttgtccttcccccatttctaaaggacttaattacagcagtagtcaaactgaagcaaagctctttcatatcacagatactcaggggccactaacattagagttaaaatgcactgaaataatgaagatggtaaaaccggctaactgctacattttcaagtttagctaatttattctaaagcaatcaaaatataactttaaaaatgaactgaatatttatagtaaaataatgcctatttagtactcaggaccctaaaactgctcaatgcttttattccaaaaaggattactatgaactatttatacttcatttctttagctaaaaaataagtattttaacaggcaccaccactcccccaaaataaaatacggtcagagataatgaaaccaatgctttccgctgtaattacatacaaatttcttaaagccaaaaataaaatatgtaatgcatttaagtccattttccttacttgaacttgccaataacagtaaaaatcccttaccttatcaattatcttttgaaaatgaacttctactgtacaactctgaatgtccttgtgttcatcagaattatgtattaatactgagagttttttagatcttattttttgtgctcgatagccaaacacaaaaagcatagaatcaataacattggatttgccactgccatttggcccgataatacaggaaaagcgctgcattaaaaaaacaaaaacaaaacacggaaaagttcataaggtcatgctaatactactgattttaactgaaactgttagatttttt

SEQ ID NO: 1881190 - DNA, 4001 bp, Homo sapiens
cgaatatattaacactgaaaaattttactcttaggaacttctaaaaaatttggttctttttaatctcaaaaataaatgtttatttttactaaatttagattacttttgctgttaatcactattactggccaaatagtctacatgttttattccaagtaatgatttaggtcttggatgttgatactacgatgctgtttccaatttctcagcctcccaaatcagtttttaagatagatgttattcagtaggagagaaggtaataaaaatcacatttttacttaccatcaaatgctttaaattgccagttaggagtctgagattttcataagcgacttaaaaaaaacaatccatagaaaccattgtcactttccctcaaagttttaattgggcactattagttctaccgtagtccaatccctgtttcttattcctaacaagtgagttcctaaggtccttatctataaatttaattgagtcaaactgaatctgttaacttggaacattcacctttgtattatttgggaagaaatgttttttaaacaattgtaaagatcacataaaaaggttcagattatcatgtgaacaaattggctttagcatcccatatacttcagaagcacaaatgtaatataaatttgacaatttataaattatttacttcgttgggacaatattacattagcttcctttattactgaattacgtacagagatgctgtacagagaaaaaaattatccttagaagggttaaaatgcagtgtattttgatgaatctttggataaatgtaaaactttgattatcccaggatgacggtaaaagattaagcaaaagataaacataagtacaatttcctgcaaattggtatcatcatcaaatttagtattatatagggacataactttttatccattattaaccaaaccaagtcccagaatatgtaagtcaataaaacagttcaatttgattttaaaaacacacaaaatcctttaatgccacattctataaattccaatcttgtttagaaatatatctgcaattaatttcctcaacattaatttttaaataagtttaggttgaagtattgcaaatatactgtgcctggtaacaaaagatattaaaaaaggttatcctagaatgatactgatttaccttgtatactatgaatgtctaaaagtaataatttttagaaacaattgaagaataaagactaaaatggaaacagaggctaacattttataagtttgttattaggaacatccagtcaccctaacaaaattccctacttatttcagtcatttctgcatcacaaaatagttttgcttttattatgcttcggtgattctggatagaacacaggaaaagaagataccctcgaatcaaacaggaacttgacaaagccatggttttaccctaattttttttttttccgaaaaattctgaattttgaggacagggaaaaaaagataggggatttttcttaccaagccatgctggtagaatatacttttacttaaagaaaacagggtttctaataaaaatcagtttggcacaggtacttaatttttacatctctttaaaaggacttgctctgtaacagctctgatacttaacaatgtaatatcaaagtttcgttctttcagtagtagtggttccaccaagtaagtcattttcaacaaaacaaaaaccaacttgagtaaaggttaagttaaccatccaaagtgttacaaagattaaattaactaggtgcttaggtaaatcaaacaccaagtgtacagattttttcattttttggttatatatcagaagagataataagaacaaaaacaaaggaaaaggatagattaaaatataatacatttcatttaaaatgttaccttaaagggaaatacaaacaattgataaaatagttgctgtatccctgtcacactaaagcagcacagtaatattggtgtttaatatatatttcactacgccaatatttacgtgctgctagagtggaacaagtatgtcagttcatccaaacataaaacgaacatctgatgatgaaaacatagttttgaatgaatttccttaaatttctagagcagcaaataatgattcgcatcttgactgtagcatgtaaaccatgatgtgctgctacagtactttaaggcctcaaaaatgtaggattcatccaacctagctttatagaaaaaaaagtaacaagaataagagaatctttgaagtctttaataaacttacctgtaaaattaaaaatctattatggtccaagtcaattccatggcttcgaagaagatttccaacatccttaaatgtctttttctttccacttatgtgatagacagaagtattatctctgcaggccgttctggatacatagaaattactgttaggaatgacttcataatcatccccttcctgttttgaggaaaaacaaaaccagaaaacaattgttggtattaagtcataggcctacttcaaaattcactcatttcatactgaaactaattctatggattaaaaacttcaattgaacatgcacacaaactgccagtagttctcattaataacccaacttagcaaagaattgatacttttccatgctgttttggtccctttctcaaagatcacaaaaatcaagaagccaaaccaaccagccaacgaaaaaacccacctccaaacaagcctaaaaacgtttatgattgagaagacgtagacaagattcccaccatatccaaaacccacacaaattattaacatgttgacagattaaaaagctgcagctttttaaaatgatgattcaaagaaaaaggaaggaaggtagtaaccgggtgatacactttagtttttttgtgtgggagggtaaagagtgtgccgttaatttaaagtaaaaagaatcacaaagaaataacaactaaattcccttgattttcttttaaacagatttttaaaaaaatcaattgcaaatctactttaacactttcccttaaccttaaaagttctgtcatactgaagcaaaggcttctaaaatttagataaatcaaatgtaattaatatgcaatggaataaaatctgatttcctggcaatctattttccaacccaacttgtacaatagaaagcacaaaagaaaccaaattaaaatagatgattctgtgtaattaaagcactttgtattaaaaaaaggaaaacgaattcaaaagacaaatcacctcccaatttcattatgtaattagttttctatatttttaggttccatcgagtcatttttgaacaatcaatttcctacattattaaacagaagagaaaaagtctcaacaggtaaataatctagacattttacctctagttgtctccatttctagaaaacaaacattagcttgtccttcccccatttctaaaggacttaattacagcagtagtcaaactgaagcaaagctctttcatatcacagatactcaggggccactaacattagagttaaaatgcactgaaataatgaagatggtaaaaccggctaactgctacattttcaagtttagctaatttattctaaagcaatcaaaatataactttaaaaatgaactgaatatttatagtaaaataatgcctatttagtactcaggaccctaaaactgctcaatgcttttattccaaaaaggattactatgaactatttatacttcatttctttagctaaaaaataagtattttaacaggcaccaccactcccccaaaataaaatacggtcagagataatgaaaccaatgctttccgctgtaattacatacaaatttcttaaagccaaaaataaaatatgtaatgcatttaagtccattttccttacttgaacttgccaataacagtaaaaatcccttaccttatcaattatcttttgaaaatgaacttctactgtacaactctgaatgtccttgtgttcatcagaattatgtattaatactgagagttttttagatcttattttttgtgctcgatagccaaa

SEQ ID NO: 1881191 - DNA, 4001 bp, Homo sapiens
cctaccgcccccagcgccccttccgcgtggtccacctgcacagccgggccccggatctgaaatctcggggccctccctgggcctagggttctttcgctgtgacccaggccttaaccaggaaaaggatcctcgcgacccggtgggcgcttagaccgggtaccgtctcttctcatcgaagtctcacatgtttgttttaataacatttcatttctcccattttacacatgatgaatattcgtcactggaataaggcagtataacattaaggccactttcacgacctacttaaaatatctcgttttaaaaagaatagtgttccgcggtttcaggttatttgcaagcattttctcgtttgagatatgggtgtttttttgtttgtttgagacggagtcttgctcttgtctcccaggctggagtgcagtggcacgatctcggctcactgcagcctccacctcccggattcacaggattctcctcctcagcctcccgagtagctgggattacgggcgcccgccaccacgcccggctaatttttgtatttttagtagagacggggtttcgccatgttggccaggctggtctcgaactcctgacctcgtgacctgcccgcctcggcctccgaaagtgctgggattacaggcatcagccactgcacccagcccgggtggtctttatgcccaataaataagcactctgatacagttggcggttttcttctcttgatacctgagaaatcacaaccatcatgatggcttccagaattaccagactttttttttttttttttgagacggagtttcgctcctgttgcccaggctggagtacagtggtgtgatcttggctcaccgcaacctccccctcccgggttcaagtgattatcctgcctcagtctcccaagtagctgggattacaggcacgcgccaccacgcccggctacttttgtatttttaatagagacggggtttctccatgtttgtcaagcctcgaactcccgacctcaggtgatccgcctgcctcggcctcccaaagtgctgggattacaggcgtgagccaccgcgcccggctcagaatgaccagcttttaatgtgactcctttaacctggtgtgctttaacaacgatccttaaagcttcctgttttaggcaacagccatttacgggccaaccaaataatgcgaccataatagaaaataggcctcagttggagtatcttgctcctctaccaataggaaaggtctttttctttctcccacaaaggttcccaaatgtcttcatttcactgtaacttactcaccccccaccccacccccattccttttaatagagaagctaactcagtagagagagttgggaaatccggagagcagggaaacccaggggcaggaaaagcttggcaaggcccctttctgggccagggctgaggccctgctgggaggcgccgaaagagcactgggcggacacgacattcccgatggcttctcgggtgcccactcaacgggagtgatcgtgtcattccaaagcgctttccattctgaaggtgcatgacctggagacaactgcttagcagggttgggaaccctcagtcaaactgaggacttcagatactctcatccacgaagacggttggggtggtttttccccaggaagtaagagggctatctttagcgagatgcgggctgaggcagccctgggggagtcactaccattgcagccctacccagaggtcctgggtccaccctccctcgccaatcctccccagggttccagagatggccaccagcctcggctctcccacgtctacacccatcacctccagcctgagggcgcaactgagaggaactgagacccaagcagctcagtaaagtatgtctgggggtcaggggcaccccatctgggccagggcgctgctcaggcaggagagcaggggacgaaatccaagcgcagctggaatgctctggagacaacagctgcttttgggattccgttgcccgctgtccagccgttggcggggggcgggggagctcctgcccccaggtcactcgccctggggccacatcagaacccgcccatccccagtcccaggaggaagacccgggagtaggttgtgaaacggagtctagagggaacaagacgctcacctgggccacagaacaatagaaggggaggtgggggcctcccctgggaccgggtcccgatccggattagatccgtggggcaggattagccctgttggtcccacgaagcctgggccactggtgcggtgacggtggtggggcgggcttcggaatccgtcaggagggaagcgcgcccgtggggccggagaggaagtaaacccgcgcgtccacctcggggacacccccgcgctcggtggcctttgtccggtgacgctgccagcgcccggagcaccaggggccgaaggggtccacagagcagccgcgggacccccggaaacccattgcgaccggccccaggagacccaccaccaggctcccactgtgccgagcttcccgctcgcccggccccgcgggtagcgaaagcgacaatgttcccctgaggccacgacagagccggcgtgccgagatgcccaaaccccgcgcgggggccagcgactctcgcgccagtaggcccttgacttggatcaagacgggggacgggggactcccaggacgcgagcagagtgaacgaggacaaggtgatgctccacgcgcttctacttcaagtctggtccggttcggcctggtctgggccagccgaacagccacccaaacactatcacagcttgcccttccgcttgctctggctgcctgcagacttggagccattttaaggagaaaccacctggccacgccccctagagaacccgagaagccaatccacgctcggccacgcccctctccgcgcgctgcggagaggccaacggtcgcgcgggtgacggttagggcggggcgtgcttccgcgtctagccggagaaacttgagccggctgccccgcccacggtgcccgaagccccaaaggctggaattaggggctagaagtctggcacccaccgcctggccaggtgttcgggacgcgaccaggtgggcggtcgccccgccccgggagcgcggcttaatagctgagagcccgggggccaggccgcggctgcggcccaggcaacgccctgagggtggccacgctgccaggtgttccactcccccgggactatgggcaagggcccggggcggggagggcggcaggtgctgacactggagctgcgccggaggtcggggaactcggcctcctaagactgaggacactcgcctgctgggccggtcgagctgtgcggtgccctccgggacgcagggggcgctgcagccacgctgggtcaggctccgcagggccctcccaacccggggactaacggcgccggtgacgacttcgccgcgcgttggtcagccatggccaccgctctcgcgctacgtagcttgtaccgagcgcgaccctcgctgcgctgtccgcccgttgagcttccctggtgagcttggaccccgcgccctcgaccatccagccccctagggccggcgactgccagcccagcaccttccggcctctcgggctgcccggcccggccccgcgcccctgaccctttccctccgcagggccccgcggcgagggcatcggctctcgccggcggatgacgagctgtatcagcggacgcgcatctctctgctgcaacgcgaggccgctcaggcaatgtacatcgacagctacaacagccgcggcttcatgataaacggaaaccgcgtgctcggcccctgcgctctgctcccgcactcggtggtgcagtggaacgtgagtcctggcccgcagtgtggaaactgaggcccagagtcacaggccctcaccctgcttggtccctgcaaacttggctttcctctgtctcctcctgcagtggatggagatggggagaggctgcgtggatttgtcgtattaaatgtgcctcctccctgcacaggtgggatcc

SEQ ID NO: 1881192 - DNA, 4001 bp, Homo sapiens
tccccaaagcaatggtattgagaggtgaggctcttgggagatgattaggtcatcaaagtttaaccctcatgaatgggtaagtgcccttataaaagaggcctaagggagtttgttcacccttttcaccatgtggggatgcatcaaaaaggtgcattctttgaagcaggcaagcttcaacaagccgtcatcagacactgaatctgctggtaccttgatcttaggcttcccagccttcagaactgtgagcaatacatttctgttgcctataattacccagtctgaggcattttgttatagcaacttgaagggactaagacactttctgacttgtcatcaccttctactccagacccactatccatgatcctttcaaagaaacttgttctaccagtccccgagtaaactttccatccaagctgtagtcccaggagaaactcttcagtcctttttaaggctcctgaaactcaaatccactcttaggaagtaaatgggtaatgttctcacgactttatttggccttaattgggggaaaggaaaccaataaaaccatcactttaatttctttattcatcaatagtatccgaaaaggaagaatcaggagttacaaaaacaagttaaatgcaatatagaagcctactaaatacaaatacaagttcacaaacacatatgcaacagaaacttgtttagattgtttcttgaagtttgactacttaaaaacataggtgtaaaggaaagacattcagactggtccacgtgggcttgttagcaggcagaggaaccctgctttccaaaaactgatatagtccagagtcacggcatgtgggaatgtttccatggacactggatcttaacagatgctatagtgtttacaaaactacacacacagagaaagcccaaggaagcctgcaggctaagccctatgcttttagagggctgaaggaaccaaacctagtttaatcctgtttgtttgctccatgcaaaactttatggaagactccccagactaggctatttagcagcttccatgaatggtcctcagatcatgtgattctacggcatagacgacagctgccctatttacacagaagctgcagaactcaagaggaatgtggatttgctcttgggagttcaatgttgcagggtagagtagtcttggatgataaccatgttctaaatgactagtgaagagacactgtggtttcttgcttttaacaaattggtgtactcttgccctcctcccatagtgtccaagggctggtaaaacctttgattaaggcgtgctgctgtgagttctccaaggcacttggacagggagctgcatttcagactgaacaagtggagtttgaagagtttttagatgggatggatacataaaagcttgaaatgctaaacaaagtggaattttctcctttcaaatgagaacaagaaaaactagaaggaattctatttttggcacaacagtttctcacagttgcctgtgcattacaacctaaataatttccttctgatggtctttaatctgctttctgcaaatgagatcttatgtcaaggatttaatctttggtattccaaatgcatctgaaacagggtagtgagtggggttaataatcacagaagtcgaaagacacaggactaactgtaaatgactgacctccccaagtcacagttttaggattaaatctccattttcttccccctgttgaatctgaaactttcttttatcctcatctctaagggaatgctttctatttccagccggaggttaaacatgaaatgcaaatatgaagacagagtggggtggttctctttcccactctcttcctgctttacccatgaggactccatatcatagcacgacctgtagggtcatcaggctgagatcaaatctggtcatcttgtttttggccatctgacatttcttgttctagtaacaagatttcatttattctatagagaagaaggaaaaatcacaggaacctatctcccctctggaccaatgatcagaaccacagaatttataacttatcaaatcaaaaggttagtgcattcttaccagctcactgaggaaactgaggtccagaaaaaagaagagacagggccaactcaccctcctagttagtcgaatgagcatattggtaggctgggatatcctaagccctgcttggctgcccttgtcgccatccttgggaatactgatttgcctcaacttctcagaataaataaaaacaaattaatgtttggatcttgaaagttttttatgaagatgcttcttcccctggcttcggtctaaggcacccttgctcctctggcagatagtggactgctggaagctaggggggccaactatgggctgcatctagtatgtggcagggtgggggcatctgggttatttcagcccctgcaccaggaagaaccccaaactccttccacctatgaagtggtgggactactgaaaaataattacaaaagcttaatacctagtcaagaaaataaaatattaaaaaacaataatataatgataataattgaagaataaagtcaacttgccaaaaaaaagtgttttacagagaaatagcacctttggtaaaaagtatttttaaaatttggttaggtcgctaaggggctcaaagtatacaagtatctgcatcatttgggtgtaccctcccagaaactccatccaagtctgagggacactgggttaactagcagtatggctatgtatctagaggcagttattgggaccaagagatgcgtggatgctggaggtctgtcatgctgacggcaatggaaagaggctggaagcagagagcgttcctctccgtggagcttcccaaacctctcctccggggacaccctgctaagttctctctggcatcgtgtgcactccctgcagcctgctgacagatgcagtaaactcaaaagaggttcagatttgggtctgttcctctttcaatcgtgatgcagtttccttactagcctccagccccagagcaccatttacagtttctcttaaagcactcctagaaatgaaggctgtggcccttcccttcctagccagccaccttcatatcctttattgcaaaacaaataaacaaaataaaactcattgctatataagcaaatactggtgatttggcgactgtagcagacacttgtgtatactgaactcagcgctgaagtggagaagatgctgggatccagacactggtctgtgcctcctcattagatctctttggtgctcactctcttggtcttttcagctgtttcctttgagatgcaagagaaaataggcgtcatggaaatattaaacaactgttggaatttatctgttcctcaagactatatagcattggcatttacaagcttatgctgaattttagttgtttacttgtcgggctcctccacggacaatgaacaatttgagaacaagaactatggcctattcatgacatggtcatgcaggggctgtttactgaattaagctgactccatttggactcctatgaaacaagcagatcagacattatggttcccattttaaggatgaagaaaatgatgttaaatggaaatgctacaagatgttcttaatccaacaagtccaaagaagtgttaagtacaacaggttctggaggcagactgcctgagcttcaaccatggctgtgctactttttgggtgaccttgggcatattatgaaatcttctgtgtctcaatgtcttcaactgcaaaaccacagtaataaagtaccatctcttacaacagtgcctggcacaaaatggccaataaggacataagaagatgctcaacatcattaatcacacgggaaatgcaaatcaaaaccacttgacacccgctaggacagctaaaataaaaaatagcaataacaaaaccgttggtgagtatgtgaagaaattggaactctatggtgaagatgtacagtggtgcagtagctttggaaaccagtttggccatttctccaaaggttaaacatggagtcaccgta

SEQ ID NO: 1881193 - DNA, 4001 bp, Homo sapiens
cccagttccatggtagtaatgaaaaacaaccacccacaatcatagtgaaaaccagcagcctggcagcatctggagggagaagactggtgttggaatgccttcaatgcaccattaccagagaattgtcattatttgacctgtctgggtggttctctgaaagacccatttgcaaagcttttatttgaccatactcaaacctctcttggtgcaaacagccttttccctgggaaaatttgttgaaaacaatcagaggcaactgtttaacatcatggctgctgcacagtgtgtaacagttgtgaaaaacaataggttaaccaagagcttaaaagtaagttaggcaatgagatgtccataggaggttttgaaaagctctaacatgttactggaaatacagaaggccttgcagccagtgtaaggctttctgcatgctcagaaaagaccagagaaagtcccaacatctcatctctaactaatcttgtgggtctgtgcaaacatccagtgaccactaaagtgtagctttaaactgcctggttgagtagagacatgcctcagtgcacacacaaagtttttgttgtcaaagactgggagatttattggttccagccatttaaggaaatttttttccaatcattagctgataataagataatgagtaggaccagatcaatggccatacatgacaaaaaatgcatactttacaggattatttcagaagtcactaaactaacacatggcaacaacaacaaataacagcaacaaaccttggatagaggtgagaatctgatttccagagttgccacattatattattcaaaatattcaattttcaacaaaatagtcatggcacgtacaaaggaaaagaaagtatggctcgcatataggataaaagtcagtcaatggaatctgtcactgaggaagcccagatgttggacttacaagacattttaaatcagctattttacttatgtttaaagaactgggccgggtgtggtggctcactcctgtaatcctaacactttgggaggctgaggcaggtggatcacttgtggtcaggagttcaagaccagcctgaccaacatggtgaaatcctgtctttactaaaactacaaaaattagtggggcttgatggcacaagcctgtaatcccagctacttgggaggctgagataggatagttgcttgaatccaggaggcagaggttgcagtgagccgagatcatgccactgcactccagcctgggtaacagagtaagactccatctcaaaaaaaaaaaaaaaaaaaaaaaagaactgaaggaaactgtatgtaaagaacaaagaactaaaggcaagtatgagaatgatgtctcaccaaatagcgaatatcaataaagagacagaaaaaattttccaagaacctgaataaaaattctaaagttgaaaattacaatgacctagaatgaaaaattccctggaggggctcatataagatttgagcagacagaagaaagagtcaaatgtgcttgaagatagaccaatgaatagtaaccagtttgaggaaaagaaagaaaaataattatgaagaaaaaagaacaaaatgggttaaaatgcctcacataaccaataagataaaactcaattcaaattgggaaaaaaatgaatatagccacagagaagtgtgggacactgtcaagggcatcaacatatacataaagggaatccctcaaggagaggagaatacttggaaaaataatggctgaaattccccaagtttgatgaaaaacttcatccagtaagttcaaaaaacttacaataggatgcattctaatagagccacacatagacaaatcattataaaattgccaaaagacaaaggcaaagagagaatccaaaaagcagaaagggagaagtgaatatcacatgtaaatgatcctcatactgcttctagcctccatgaattctgatgaattcatgtgattcctccatcaggagtcatggaagctggaagcagtgggatgacagtcaaaatgctgaaagaaaatgagaggtggccaggcacggtggctcacacctataatcccagcactttgggaggtggaggagggtggactgcttgagctcaggagttcaagaccagcctgggcaacatggtgaaaacctgtctctaccaaaaatacaaaaacaaatttagctgaacatggtggggtgtgcctgtagtcctagctactcagaaggctgaggtgggaggatcacttgagcccaggaggtcgaggctgcagtgagccacaatcatgccactgcactccaacctgggtgacagagtgagacctggtctcataaataaatgaataaataaaagaaaaataaaaaaagaaaatgacagtcaaccaagaattctatgcccaccaaactattcttcagaaagaaaggtgaaattaagatatgtctagataaagaagaattgaggcaatttgttgctagcagacctacaaaatactaaatagtccttcaggctaaaatgaaaggatcataagcagaaacttgaattcatgtgaagaaataaagagccagttaaagtaactatataggaaaataatagacagtataaacatatttttgtttgtaaatctttctctcctaagaggcaactgcataaaacaattataaatctgtgtgaatgggtgtacaatgaataaagctgtaatttgtataacaaaaacagttcaaagaaggatggggagaatggagctatttaagaacagcattttttggctgggtgtagtggctcatgcctgtaatcccagcactttgggaggccgaggcaggctgatcacctgaggttaggagtttgagaccagcctggccaacatggtgaaaccccatctctacaaaaatacaaaaattagctaggtgtgttggtgtgcgcctgtaatcccagctactcgggaagctgaggcaggagaatcacttgaacccaggaggcagaggttgcagtgagccgagaccacagtattgcactccagcatgcgcaacaaaagtgaaactacatctcaaaaaataaaaaaaaaggagcatttatttatttatttatttatttgagacggagtctcactttgtcacccaggctggagtgcagtggcgcgatcttggctcactgcaagctccacctctcaggttcatgccattctcctgcctgagcctcctgagtagctgggactacaggcacccgccaccacgtctggctaattttttgtatttttagtagagatggggtttcaccatgttagccaggatggtctctatctcctgacctcctgatctgcccgtctcaaaagaactttgctctgttgcccaggctagagtgcagtggcacgatcatggctcactgcagccttgaactcctgggctcaagcaatcatcctgacttccaagtagctaggactacaggcaggtgccaccatgcctggctaattttttaatttttttttgtagagtcagggtctcgctatgttgctcatgtctcaaatccctaggctcaagcaatccttctgcctcagcttcccaaagtgttgggattacaggcttgagccacccctccaggcaaaaatattttttaaaatttttgtaattaagttggtattaatccaaattagattggtataaattagaatttaacttgtaatatccagtgcaactgctaagagaataatttctttttttttgagacggagtcttgctttatctcccaggctggagtgcagtgatgcaatctcagctcactgcaacctccgcctcctgggttcgagggattcttctgcctcatcctcctgagtagctgggattacaggcatgcaccaccacacccggctaatttttgtatttttagtagagacgggatttcatcatattggccaggctggtctcgaactcctgacctcaggtgatccgcccacctcggcctcccaaagtgctgggattacaggcgtgagccactgcgcccagctagaataatttctaagataca

SEQ ID NO: 1881194 - DNA, 4001 bp, Homo sapiens
gcaatggcaggagacagcaggctggtcagatgtggcagttgctggggatggcctggggcccaaatgcccactgtaggaagaattgctacaaaggttcctgcctccctcccccaggtctatgcatagcaggcagaggcctagactgtatgaggggctatggagtcagacgtggcactcctcagacagggctccaggtctgagttcactgcagacgcccctcctaagggaaaaagagaagctgaccatggtgtgagggtcttggggatattcagggccagcaaatggaagggttgtaccatgtttgtgtgtaatgactcattcatttcacgtgtgtttcttggcacctgctgagggtcaggacctgtgtgggcacgggccacggtctgggtgttgtcctttcagaggtccaggcccagcatattgcccagcaggtctgggattgctccggctgccaccttctgttctggatggacatcccccttactaggaaggtctggggttgaagcacaggcccagcaaagctgcaagaaggggcttccttgtcagcttgggaagctgtctatgacaccataaagggtgggcttggtatgtttcaggggatgtgaaaccatcgctattcctggaccccagacataatccatcaggaggggtctctgagcagaggggtgcaaagagtagccttttctagaatggctgggctctgtgcacccttttgaccaggccaggccagggggtagcagtgaggaggccaggcttcagaccatacataggttcttgattagggagcctgaatgaatctggggaaacaagggagatgggagagaaggcaaagctggtgagagaagacagaggaagtgggaggagggaagaactaattcaaacttgaataaattccgtttgaaattagccacttcactaaaataaatcaaactctttaaaattcaattcagcatgtttactgagcctcagctctgagctcagcctgatgtagttgcaaagatgaataaaacacaggccttgcccttgaagagctcatactctagaacagacataggcaaaaacatataaaaataaacatggcataatgaaagttgtagtagagggataaattaaggacaattaactcccctcacaaggggaggggatcatagaagataacatttggcctggaccttgaaggagttcaccaggccaataaggttgagaagaagtgggctttcaggcagaggaaacagtagagggtgagacccgaggcctgagaatacttgagaagctagagagtagccaggctgtgtgcccagccatcagaggtagtgagagaagccggagcagcagggtctgggagaggaagtggctgaagatgaagtgagaggcaggtcacagtgggcacattagggccttgaatggcagatggagcaggtgagaatggcaggaggagcagcagaggggagatgagggctctgcaccacatgctgggtgtgctgctggccgaggaattctatacagaaccaagtcattttcaaggtgccagaagcaggagctcaggagggccaggactcagtgggaaattcatgggtgactgaaagaaggaggtggacatggatttgtggctgagggtggagcgaggggctggaggaacaggatgtcgtagcacgggtgccaacacagctctgaggagctgggaggctggggtagggctgagggcagggcctgtggctgcaacagctgcagactcccactttgcccacaagactcctcgttgccagcaaacgggtgtggcctgtagtcctcagtcaccctgggagtcctgcttggaaagcaagctttgctacatgcaaagggcaggagactgatttgtgaactctggtgttggtgcctctggcagagaggggggtcctgagcccggatgccggcgtccaggcccgcgtccccgtgcaagtaaccaagaataggcccattgggacctgcacagcctatcctggattacttgaacgaggccacggccttcgccagggccttggtcctcctgctcttggctcctgtggcttcattccctcgggagagaatttctgaccccagccctgggaccttgtgatatcacagcacagccaggatggagggtgggggagctcctgcaagaatgggtcagcagtgggcaggccagtcatgcttacagtcacgtggtacaaaggattaatttctctcctaattcttgctatgccattgggcagcctctcctttgtctcatcatgagcactatgtaacacaagccaagatgataaatgcagaagccttaactgcttctcagatgctgagttaattcagttgatgcttttgcaaatgttaaatgcccaagtgcctgccgttttggctctgtgatggcttttaaaagcatgaagtgtggaaacactaggaaaaaagctgcctctccccgggactgtttcctggcaggatgtcctggagaataagcaagaaagcaaggacatgggagggaagggacttgcgtatcaggaaaagagccctgggccaggaggcaggagactggaattttcattttaattcttcccatcgtatgacctttaaccaaccccttccctggcggagcctcagtttctccatctagacaatgaggcagctggaccagctgattcccaagctttctccagttctgacaccttgcactcaagaaccaaagactactgacattgctaagaaaagacatcccgttgtggctcaagtaccaggaaagtctccttcctgggatatcaggccagatacgctccctttaagaccttggacttgacaaggaagatggttagatcatccctgtggaaaatctgacaaaagccccccagcttcaacctctaaagctagttttcctacaacattcccaatttgttcataaatgaagttatttccggaagagctttatgcagataaggaaaaaaaatcagaagcaacgaagacgcatgccaactgactacggcatctttattcatagcagcctgcggatccgaaaactcacacccttccccctttttcttttggggtgggtatttgctaaagattctctggagaaaacgatgcaggaatgataagatcagtctggagcagctggcattgaaaatggacactttttcccgagagtccaccataagtgggtgacttgtggcattttcctgttgcctgctaggagagtagccgaaagcaattacacaaggaagttaattagaccatcaagctaggccagtgggggatacggaaacttctgaaattcaaatcaaagaactatttgaacttgcaaccgcatctaatatttacgactatagtttccttataatctcagtataaaataaattcattggagtgaaaaaaagaaaaacattgtatttattacagtatgcttccttttgattccgtaataaagttattactgaaatgagaatttagaaataaagttcataggaaatgtaagtactaaaaaatcttaattgaaactcaaatttagcttcagtttcttacctgatgtatagttccatcgatttcaaccggaacaataaaatcagcattactaataggctagagaaaaaagagactataattaatatgtctgaaggaacaaaaaaactctggaaattttagcaagaaaaaagcctgcctagaccaatgttttggttattggaaaaaacagttcaggaggaggatgatgaagcatgccttggttccttaaaataagcacaagcaggaaagcacattattttccactgtgaatgtcattacattttcagcatcttggtccaatatcacctgcctggcctcaaccaaaaagtgtggcactgcctggctagaggatggggctcctgaaaactccagctcttgcccagagtcttgctggggtgatggggaatcactgctagccaccagggggaggagctgagcatgtaatgggctccgaggacagtgctgcttgagggaaaactatttgtacttggacccacaac

SEQ ID NO: 1881195 - DNA, 4001 bp, Homo sapiens
gcaagactcaagtctgagtctgtctgggtctagcaactgtgttcttaactaccaaactacccctaaaagaagaagaagaatgtggaaagagagaacactttgactattctctccttctaccagggtctgactacagggattttggtaagtatttatagaacccatctacattttacacagctatttatcatcctttaaaatgtgttattgcttgtgctcaaagggaacacgaaaattagggcaccgtatccattccaacttgtagattaaaggaacacagaatgttttttgaaacattagaaaaattagatgtaaaaccacaaataaagaaaaaaacttatctttcagggagcagaccccttgaaacaacatattttttgcttcaacaaatactttctgctagcattactgtggcatactaagaagtttatcgatttagagttatcaagctctaacctccaaaggaaaagcctaaccccgagcaaacagcaatactgacatgtcacatagcgtaatgaacactggactcgggagccagaggactaggatttatgccccaagcctgctgcatactagtcacatgacctagctatgtcacataatctctctgcatctcgcctgcttattctagactaggtcaattccatttgcactttataaggtaggtatgaagatgatgacctttgggagcattatgcacatctttcagagtttgtcacatgtaaatattggcaatatcttgggttaccttgtgataaagtcagggaaacagatgcagtgatttcacaggtcagagaaggatattcaacttaaaaatcccattctggattttctaaggtcacttattgagccaaaaaaaaaaaatgagctcagaattcctgatataccatcatgtgtcaatgggacaaaaattactaatatttatctcactagtttctgatacaacaggaaacctctaacaaacaggtagcataataagctatatggatttgggcaagtcacttcacttctgtgggtctcaactatacccattcctccgctcacttgtgattcaacaaatatagtaaagggtactaattcttaccatatggacctcagagagactattaggaactgtgaagtgagataatgaactgtgaaaattctccgaaaacaatgaaatgtcaaacaaacctggaggacattatgttgagtgaaataagccaggcacagaaagataaatattgcatgatctcactcaagtgtggaatctaaaaaagttgatctcatggaagtagagagtagaatagtggttaacacctcctctaagccactgtgagaaggactccatcacttgcaaatacaattgattacacaaagcacaagcaagtcaacttttcctgccaagaagatttgttgcccttggtgaaataatagcattctggccagaaaggaaatttcatcattttcctatgacttcgattctgacttttgcaatatgcatgcctgggcttcagagtccagaacccaattctggccctgttagtttacagcctagagccagtgatttgatcactgactgagctgaggatagatttgctaactaccatagctgggtgccaggccgaccccaggctcaaatcctcccaacactgaggctgcatagacaggctctccagccaagcaggcagcagaagtgtcctgaatgtttaccatgtaccaggcacagagatagaggaggaaatagcatacacagagctcctgctgtgtcaatcacatctcattcttttctcgtttaatctttccctgatgaggtaggcagtattagctctgattttcagagcagttaacagatgtgaacaaagttaaaataatagaggcgggattgtaatctaggattaacactgaaatttaagctctttttcagatgaacgaaagtgcctgccctccaggagctcacaatctagtgggaaagtcagaaaggtaactcaatagactgtgagctccttgagggcaaggaccattttaaattttttcttgtatcttcagcatcaagcatgttgtctaccatgcaaaaggcacttaataagtgcttgctgaatagacaagccatatttagatgttgcccttcataaaatacaaacctaattatattactcatctgacttcacaaacctcttctagctcctctttgtcaaactcctgagtactacttagaaagtccttgaagggcctgccttcatagtctcatcttctgtgattcccttccacatcctctgtgtaccacacttccatcttccaactatcttggcatataggtggtgttcaacaaatgttcattgaatgggcaaacaaagccaagaagggatatatctgcataacatcagaggcatcaatataatgccttatgaacaccaagggtagatttatccaactgaaggcatcaggaaggtttcacagaagacaggacaattgatttgagtcattaactctaaaatctcaaaggctagatgacattgcatagggaaaattcaatcctcttttgctattaattaggcaaatgacatcataacaaaacatttttctttaaaccagaatatgagctgtgccaaattccgtcatctaaaggatatgggtttaggccaaaagcccatcatatagattattgtttttcttctcccaagtactttggaaaaactaagtctcatttggcatgcagtgcctctcagcaaggtcatggttcttctgccgtggtgcctggggcagttaaggtaagaattgtgtttcaaaaaaatacctcagacactgttaagaataagataacgtggtgaaaccccgtctctactaaaaatacaaaaaaattagccaggcatggtgatgggcgcctgtagtcccagctactcgggaggctgaggcaggagaatggcatgaacccgggaggtggaggttgcagtgagccgagatcgtgccactgcaccccagcctgggcgacagagcgagacttcatctcaaaaaaaaaaaaaaaaagagtataagacagctggttagacaggatgacatgggaatattcagagctttggtcaagaaatcagaccaatgagtcagtaagaaagggtcattgaattactccattttcacactgctataaaaaacttccctgagaatgggtaatttctaaagaggtttaactgactcacagttccgcatggcagaggaggcctcaggaaacttaaaatcatggcagaaggggaagcaggcaccttcttcacaaggtggcagcagagggagaagcgagcaagagcaaggaaaactgccttaaaaatctcagatctcataagaactccctcactatgaagagaacagcatgggggaagggcccccacgatccaatcacctccctcccttgacatgtggggatcacaattcaagatgaggtttgggtagggacaaagccaaaccatatcagctagtaagaaagtgggggacactcccaaattagcactttcatccttgatcccagcattagaacagactatggtataccagggtgggggagagaggaaatctgcctccatctagatcacaggcatcactgggtttgctcatctgcaaaataaagcagctgaaaccgaactagatgatctccattacctggaaattggaaatgagggagcatggagaaaagagataagctataaccagatatattcatttaaagactcatacacaagcacagcaaagctgttgatattgtgtcctttcagacagcctgacattgaagccctcagtcagcacaaatatttcacttgagcacacacataccaggtgccttagcttttctctcaagttgaagtcttaaagcccctgcctaatatctgtttgaagattagaagtagctttcacatccttgatatcaaggtcttcactccttgttttttgtgctgcttttaaatagcacactgagataacaaatgcaggagaagcaaggcttcaactagatgcacacttgttgagtgcttgtt

SEQ ID NO: 1881196 - DNA, 4001 bp, Homo sapiens
agacgtcaaatctatatacataggtctaaaattttggtgtgaatatccataacgtaggaaaatagttatttttgtagcagggctctaagtgctatattaaattgtcaacctcccttttcttgttttatatctacgctcgttgaattttatttccccttgaagggaagcaaagtttaatgtaatttataaggtaagtctaaataagagcatctttaacctaaagtatctgttacacacatgaatatcttttccttgactttccttctggtttggtaaatttgggtgaatggtggtattctattccagaatcagaccacagcagaaataaaaacgtcctctgcagaagtggagtctcccttgttaggaggggttgtgaaataaatgtgccttttggaattccctaaatatatgggggagatattcctttcacagggacttttatttctcacaaaagacacagttatagttttttagaaacttatgaggaatattaatttaaaggggcaggagaagtaaatagtgtagacatgaacatggggtaatcagtagccctcttcagagatctaattttctccttttttaaaaggaaaagagaatgagatatatcttactaaagcaagtgtgaatttaagaggtatataaattctgaaaatgttaaaaaacaaaatggaatttgttccttgatccatttattctcatttttgttacattattagactataaactcccattaggtctttcacaagaattcaggaatcttaccagctgaagacatagacggtgaccataagcagctgaataatgaactgcgttgtatccttgcttatcacggatccctggatttgcatcgtttcttaataagtattccaggcacctatatacaacaacaacaacatactgaaaatcctaaatcctgcatattaaccaatgataaaaagagactgaaattaaaaactgacaatttttcttatacttgagtaatataaaaatcataaatgtattacactataaaaatgtcatttaaatgacactgactaaagtatcataaaaatgcaaatgaaacattcatgagaatcttcttgattcaaagtggatacctcaaaagtctgtcagacagctttttttttcatatgtgaaggctatcttttacacagtctctatctataccaccacctattctactaaacaatgttggataggattaaacttttcgtggtggtgagtacataatattggcaatattactatttatctatctagaacacagaatgagtaaatttttcatcatgaagctcaagaaaggatgttaaacaaaacaaaacctcaagaaaccaaggtcagaactcaatgaatctgaattagaggactaagaagaggtatataaacagagtaaagtggtaagaaggtatccataagagatacttcatttcatttctgtgataataaaatatgaggaaaataattttaaaaaacactatatgtaaaaccactatggaaaactgtatggagattccttaaggaacaaaaagtaacactaccatttgatccagcaatcccattactgagtatctacccaggggaaaagaagtcattatttgaaaaaggcacttgcacatgcatgtttatagcagtacaattcgcaattgcaaaaatatgaaacaagtctatttaggctatctatcaacgaacgagtgcgtaaagaaaatgtggtatatatacaccatggaatactattcagacatagaaaggaacaaaataatagcatttgcagcaacctggagttggagatcattattctaagtgaagcaattcagggatggaaaacgaatatcgtatgttctcgctcataagtgggagctatgaggagacgcgaaggcacaaaaatgatagaatggactttggggactcagggggaagttcccaaattgtacccaatatgtagtcttttatccatcatattttactccatgtgagggataaaagactacacattggatacagtgtacattgctcaggggaccagtgcaccaaaatctcagaaatcatcaataaagaacttatctatgtaaccaaaaaccacctgttccccaggaactattgaaataaaatacaataaaaataaatttaatcatgtgtttgttttttttttgccattggttctgtttatgtgatggattacgtgtattgatttgcgtacgttgaaccagccttgcatcccagggatgaagccgagttgattgtggtgggtaagctttttgatatgctgctggattcagtttgccagtattttattgaggattttcgcattgatgttcatcagggatattggcctaaaattctcaaggctttggtatcaggatgatgctggcctcataaaatgagttagggaggattccctctttttctattgtttggaatagtttcagaaggaatggtaccagctcctctttgtacctctggtagaattcggctgtgaatccatctggtcctggacttttatttgtttggtaggctattaattattgcctcaatttcagaacctgttatttgtctattcagagattcaacttcttcctggtttagtcttgggagggtgtatatgtccaagaatttatccctttcttctagattttctagtttatttgcgtagaggtgtttatagtattctctgattgtagtttgtatttctttgagctcggtggtgatattccctttatgtgtctatttgaatcttctcttttcttcttcattagtcttgctagcggtctgtctgattatctcaatagatgcagaaaaggccttcgacaaaattcaacagcacttcatgctaaaaactctcaataaactaggtattgatggaatgtatctcaaaatagtaagggctagttatgacaaacccacagccaatatcatactgaatgggcaaaaactggaagcattccctttgaaaactggcacaagacagggatgccctctctcaccactcctattcaacatagtgttggaagttctggctagggcaatcaggcaagagaaagaaataaagggtattcaattaggaaaagaggaagtcaaattgtctctgtttgcagatgacatgaatgtatatttagaaaaccccatcgtctcagctcaaaatctccttaagctgataagcaacttcagcaaagtctcaggatacaaaatcaatgtgcgaaaatcacaaagattcccatacaccaataacagacaaacagagagccaaatcatgagtgaactcccattcacaactgctacaaagagagtaaaatacctaggaatccaacttacaggggatgtgaaggacctcttcaggcagaactacaaaccactgctcaatgaaataaaagaggacataaacaaatggaagaacattccatgctcatggacaggaagaatcaatattgtgaaaatggccatactacccgaggtactttatagattgaatgccatccccatcaagctaccaatgactttcttcacagaattggaaaaaactactttaaagttcatatggaaccaaaaaagagcccgcattgccaagacaatcctaagccaaaagaacaaagctggaagcatcatgctacctgacttcaaactacactacaaggctacagtaaccaaaacagcatggtactggtagcaaaagaggtatatagaacaatggaacagaacagaggcctcagaaataacaccacacatctacaaccatctgatttttgacaaacctgacaaaaactagcaatggggaaaggatttcttatttaataaatggtgctgggaaaactggctagccatatgtagaaagctgaaactggatcccttccttacactatatacaaaaattaactcaagatggattaaatacttaaatattagacctaaaaccataaaaaaccctattagaaaacctagggcataccattcagggcataggcatgggcaaagacttcatgactaaaacaccaaaagcaatagcaaca

SEQ ID NO: 1881197 - DNA, 4001 bp, Homo sapiens
cagaaaatttcttgaacttcagcaccatcgccagcagttcactgcctcatctttcaacaaaaacttattttccaagtaattattgccatcatcctcaaagaggactacagacaagtcatttaagaaccatagctgagatcttatgctttgcactacagttacagctgaggaaagctgatgctcaagacctcagtgaaacaatccaattaagttctcagtgagttttaccataaaagttaaaatgcatctcaaacaatgagaagataataaataggagattatttatctgtcttcagagcacaaaaagctttctaattacataagaacacatttttaaaaaaaaagaagtctggctgggtgcagtggctcatgcctataatctcagcactttgggagactgaggcaggaggatcacttgagtccaagagttcaagaccagcccaggcaacatagcaagattctctcccaacccctcaccatctctacaaatgattaaaaaaaaaaaattgctgggcatggtggcatgcacctgaggtcacaattacacaggtagctgaggcaggaggatcgcctgagcccaggaggttgaggctgcagtgagctatgatcatgccacagcactccagccttggtgacagtgtaagaccctgtctcaaaacaaacaaacaaacaaaatccaaaccaaaacaagtcaatagattttatgtaataacatctttaacattctgaagatttaaagaaaaagccataagcaatgttgaaacaaatattatccaaggttaatatagttatatactaatagttctcacaaatcaatgtacaactaaacatttttatagaaaaagggacaaaagaaaatgaattagcaatccaaaaaaggaacaaatacaaagaattgataaacatggaaaaataaatcaaacttcacataaataaattcaaacatacacaatttattatctggaaaagtggtaaattttttttcagttaccaactcctttcctgacccccttatacactgctgacaaaaatggaaatttttaaaatatttagcaacacattacaaaaaccttgatttattctaagcaaattaccatcaatgagggcaaaacatgtacacaaacacacacccatacacatgcacattacctacaagaaacacctagtcaaaaatgtattggttaaatattttctatttctacaacaaaatcctaggaaaccaccaaaattattatatacacagtatgaaccaacttttatgtttatatacacacagaaaaaatactaaaaagatttatgtcaaagcattaacagcataggtatgagctgagaggaaaaataacagaaaaaattttaaaataaaaaaatcaaagcattaacagtaaatttcttggggtgacagaattacaagccatttttctttccttcttttgctttattacattttctacaatgattacacattacttttatagtcagaaaagtaaatgaaaatgtttaggaattataaatcactattaaaaataatatgcagtcaaagaatagtcctcaaaaagctgagctgaaaacttattttaagacttatttaaagagagacaagttctcactatgttgcccaggctgtttcaaactcctgagcacagcaatcctcctgccctggcctcccaaagtactaggattacaggcataagccactgcacctggcctgagctgaaaacttctgataagaaactgctaggacagaggcctggtgaggtggctcacgcctataatcccagcacttagggaggccgaggtgggtggattgcttgagtccaggagctcgagaccagcctgggtaacacgacaaaaccctgtctctactaaaaatacaaaaaattagctgggtgtagtcacagctacttgggaggctgaggtgggagaatcacctgagcccaggaggtcaaggctgcagtgaactgagattgcaccactgcagtctcagcctaggcaccaaagtgagaccctgtctcaaaaaaaaaaaaggaagggaggaacggagaaaggaaggaactgcaaagatgacagccaagctcctagcccactatgtgctgtagaatcaggactgtttgcaggtttttataaactccaggatttcctttctgctgtcataaatggaggccttccagaaactgaatctgtttttctcattcacagagaatgctacccaccaaattccaggactgggaatttcttattagaaaccatattttagaatgttaggatgcaatattatacctcactgacaggtgacattcattcattctctcaacaaatagttattcaatacttactatgtgctagtgacactctctaatccaggctgaagcttatttttgacataaggcttgtaaaacaaatgcctgttcttataagtagaaaacactgggggagaaacttatttggaagaacgctacctgagaacatattaagaaaaggagtgacaaaacagtgttgcgtggtgagaaaccaacctgtttcttaaagtatccaattgcatattcatctgcatatgtgaggaagttcaggatgtcatgctttatgtgatattctttcaaatgattcatcaggtgtgttccatagccctgtgtggaagttagtatacaaacaaatacattagactggggagaaaaatttttacaaatccatcaggaaatgatggtgaattcagaagtttgtacttttacatattttaccaaccaggacctttcctgaatgaaatatattaacaccctttcttgcgtttcttaactttgaaaataagctataaaaccaaaacaaaatcaaaatccttgcttcaaagataaaaatcatcatttgaaaatgtaagtttctagttatttgaaaataacacaccagggccacaagttcctagctcaatcttaaagatcacttgctgaatagtaatataaaagttttcagaatgaatgtagattatgaatttctgcttatctttaaggtatttgagaatctcagaagaaaaaaaaaagatgcaaatgaaaagtgctaatcttcactagaatatttagtaatccaagtgtttactgtacaccacaaactggcaacccttctaaagaactgaatcatcacatacatagcattttaaatttggtcttatcagacctttccaagtaaggtctgagaagcccagaatctctgaatcagccagaagacattagaaagtaactaaaggtagtcaacaatgttgaataaactcagtcattgaaatatttttataatatcaagttttttcagtgacaaagcttacagaaaacgtgtaaatctaatgtgattgttttggaacctcataaagagagataaaagtaaatccaagtgtccagacccaaatatcttcacataaattttctgcaatttggtggcacatttttctaaagaactcaaatatattcccaggtatgatctcatggaatcacagtacctcaaggtcagaaggatctttggaagtcattctatctaaccccctaatccatatgaggctagaggtcttttgccatctatcatgaaaaggcaatctgctagaacaccgccaacgtaggccaattccttggtggtgagatagaccaattcattttcaggcatcatatagttgggaattccttcctaacgttcacccaagatctggtcattgttatttctacttattgaccttagttctactcctagagttacaaagactcattcctgcttttaacagcccttcaagcctttgaagattatgctctctcacacatgcccatccgtactttcccagtcccaagccaagcaccatcaaggctatagtcattcctcatatggcatgactgaatgacaccttatcaaactaatcactttggtttttatttttttttttttgagatggagtcttgctctgtcacccaggctggagtgcagtggcacgatctcgggtcactgcaagctctgcctcccaggttaataccatt

SEQ ID NO: 1881198 - DNA, 4001 bp, Homo sapiens
atattcctttcaaattgacatactaataagcataacagaattttgaagtgataaggactcaaaaataaagatgtaagatgaaaactttcatgcttaactgtattgaagtatcaacttattctaccataattgccttggagaaattccaaattatattaataattgttcaacttcaaggtacttaatgctacacagaaatggcaaaatgcgtatgtttttaaatctgtataaattattatgcatcaatgaaagtattttttaaaacaaatgatttaatctccaaaaagcacatctaaaaatcccttccacttactagagttaccttgcaaacatcttccttctcagaaagtgcttctggctgactttcagcaggttcacactgctcagccaccttgtctaacacagtctgtccttcatttattggtgtggaagaaaccaagatatcaggctgttcacagttaacaggagttgcacttcgtccactttcttccatttctgcttcctcagtgggtataactaatgtttcatttacttcttcagattttccttcagcagattcaactgttttagactttggagttgaagaattaactataataggcactaaagcatatcccttgcctgacaattcatcatctgaattgatttcacttacactccggctatctaatgactgtacactaaatgagtctattctttcaaaagcatcagatgaacagcaactctcagtgagtttttggaaatcatctaaacgattatattcaggacaagcagatgcagagagaagctgaaaagatgtctgcatcaagtgaagacttgattttgaatctgtagtctcttgtctcgagctcgctgagctctcacttattacactttcatgatctaaaacttcaatatcactggtggtagaagtacctgatgaaaaggtactaacaggaggagaaggtgtattgctctgcctgtcttcatgtttttgttccttaggttccaaagctatgtcctttgtttctgctgtgagagactgcgtagacgtattagatatactttccatagttgttttcacatcaattacactttcagatactttcaaacttacagttggcaccttcatatccgattctttattaacagtttcttcgtgcttgccttcagttttaggtgatgaagtacctgctgccagagtttcccctgaaacacacaaagaagagtcttttacttgtgattcagttgtttcaggagttcttgactggccaatgtgcaaggattcatgtaagctgcttttcacttcttcttctggtcgttgtgattttgctggaggttttgataccactggactcttctgaatggtctggacatcagttggcgagagaaaggcactgaagaaattttcagattcatcgaccacagtcctccgaactggctttgtgattgctttaggagaggctattggtggactctgaggttcagtgtttgatttcaacccccaggttgaagtatcccatcctccactgacaggggaacttattcctttaacaaaaaagtaaatattaaaaaagaacacatatatgttacattaatatttcaatcatcattataaatcagtataaatataaatttagaaaaaataccctatgaaatacctgtaatttgcacctgctaaactccttgcttactacatcattaagtagtttccaagttaatacagggacttacggaagaaaactggtgtgggtccacctgagaggaaggaggagcacagacaaaagactgggcctggcctggactaccagatgcgagtatgttattcctccccacaacaaattaaggaagtaacagtatatgttttataacccacagtaagtccaagatacctatgattcatctcataataacacgctttacttatcaatatgaaataaactaatatggaactaactgaataggttgggccatgtgcagtcacagaaaaatgaccctacctattcagtcagtttcatattaatttttacttgtaatatcagtaatatagttatgagctagacaaagggcaacactcaaaaactgaactcagtgggtatggaggttcacacctataatcccaacactagaagagtcatttgagtccaggagttcaagacaagcctgggcaacatagtgagacccctgtccctacaaaaaaatttttttaattagctgggcctggtggcccacatatgtggtcccagctactcaggaggctgaggtgggaagatcatctgagcccaggaggtggaagctgcagtgagccatgatcaaaccactgcacttcagcctgggtgacagatcgagaacctgtctcgaaaacaaacaaaacaacaaaagcctcaaaccaagataatggtgacaaatgttctttcccgaagatcatattaaactgatgggaatggtaagttctagagaacaaattcattttcatccacttaatcacaggctgattctctaaatcccactctccaagcccactctaagaggaagttttgttctcaaattctaaattatgtcagaaattacaaggtcattataaatttcagaaatgtgtgtttttttaagaactattgctctttgacatagaggtggttgacactagggtttttaaaaaagcgctacaaagaaaatgactgttttcttggggaaaaagttaattatcatatcagtcatacaaatagctactactaaaatcctgatttttaaaaatggcataatcaggatcttaaaaatggtatattcgttaaagtatttaaagcatttctttaaaaatgttttctttttcaaattaaaatgtggctgaacaaaatattcacaaaatattcacaattagaagttggtggagagagcacaagtaactaaaagcttctaaaaactatcaagccttatagtagaatctatcctttaatatgacttcaggccaggcgcagtggctcacgcttgtaatctcagcactttgggaggccgaggcgggcggaccacctgaggtcaggagttcaagaccagcctggccaacatggtaaaaccctgtctctactaaaattacaaaaattaggcaggtgtggtgacgcaaacctgcaatcccagctactcgggaggttgaggcacgagaatcacttgagctcaggagacagaatctgcagtgaacagagatggcaccactgcactccagcctggatgacagagtgagactgtgtctcaaaaaaaaaaaaaacaaaaaaacaaatatatatatatgtaaatatatgtatgacttcaaaggcagttaggatgaaaagtatgtagaaaacttcagtttggaggcatagttctacacattcatttgcacaatatccaaaccagagaaaatcaaaattaaatatgcaaatgaacaaccaagattatgtctgattaatttaaatacattcaaaagatgacaggaattaattttgcctcttggagaatactttatataatcccagggttatttggtatccatctaaattataccattctgaagactatgggcattttccgaaaacaaatatccttatatgtaaaacctatattctatcttatctaaagtttagtaattctaattaactggggcacatatgaaaaaacagagttactccagcaaggttatatgacatcttgtaaaaagtaaagaggatcatcacatacacacatggaccaaaatatcttaaactgaggtacctcaaatttaggtcctgacttttcaatgatgtaaaattaagaacagaaaccagaaaggagtagtcaagtacatctcttatcctttttcacacaaaggttcacatcccccaacaccagcaaatctttaccccacacatcaaatgctgaactgttccttagacttaagagtcaaaagcaactgaatgaagatccctgaaagattaagctcaatgaaactgcaaagagagacttggctattcagaaataaaatgtgataccatccagaaatcttgggtcacaca

SEQ ID NO: 1881199 - DNA, 4001 bp, Homo sapiens
taaactgcatttaaattgcagtttgagaggtaggcaaagtttttggaggaactaatgacatcagccttcactggggagatggatacacctaatcagagctgaagagccaaggaggaacgccacggttttattctcggcttacttggagatttgcaactgacacctaccagccagcagaccgtagtgaagcaggatgcttaaagactagtaataatcatctttcataaatatatggaacactttcaggtttacacagattaacgctgagatgcacaatatgattctcattttaccaatgaagaaagtgaagccagattttaagtatttgcttaattccatgcacaattctctttctaccaaaaccatatattctgatggactagattttctggttaacaagggcagaagtaactacattctgtaaactgaatcgtcctgctgagttctagtgaaacaaaagcttacaacatcataaataaaaaaccctgcttggggtggaggtggtgggcaagtgtaagcaccagcatggtctcagggacctgacagaaggagggtggcaagagaaggaatcaggcagattaaggggcatgaaatgtgaagagaaagacggctgaagccccaggtgccccgcctgctgagcagacagatggctgcaagtcccaacgctctgataaaaaaaggaaaattaatttttcctgaatggccctggagtaccagcagctgacatcggcaggtggataactgagccagcccttggggtggggagtgggagagggggaagaagggtgggaactttcttctcaagtaagaaggaaaacactggagaattcaataggtgtccaagagtttctggaagttctacaggcaaatgtgatcaaagaccttcaggagaaatgtgtcccataagtgacagcatctattgaactctaaaaatgaatgtgtctgcaccaagaaaactagatgttcagcttccagcatgataaacatttcatatttgagtcacctctgctacgcctaacaagcagaggcggacgagctgctgtgccaaacgctcccagatgcacactctcggcaacttgttgccatgcagcattgtatacagtcacgcaccacgtgacgacgttgcagtcaacgacagaacacacgaacagaggatggtgccagaagatcatgatggagctgaaaaatccccattgcctagtgacgtcttggggatcctgaccctgtgcaggcctaggctgatgtatgtgtttggcttgtttttaacaaaaaagttttaaaaaattaaaaacttacaaaatggaaaaaagcttacagaataaggataaaaagaaaaagtatttacttttggctgggtgtggaggctcatgcctgtaatcctggcactttgggaggctgaggcaggagggtcgcctgagcccaggagtttgagaccaacctcggcaatatagtgagacccctgccaagtaaaagacagacagacagacagaaagaaagaaagaaatttttgtacagctgtacaatatatttgtgttttaagctgagtgttattacaagagtcaaaaaggtttttaaaatttaaaagtttctaaggaaaagagctgcagtaagctcaggttaatttatttttgaagaaagaacatttatttctataaatttagcatagcctacaggtgcctgaatagaaaaagcttacagcagtgcaaagtaacgtcccaggccttcacactcacccactgacgcacccggagcaacttccagtcctacaagctccactgatggtagatgccctatacagaggcaccatttttcatgttttactctttctatgtactgtactttttctatatttaagtatttttagatatacaaatatttacccctgtgttatagctgcctacagtgttcagtacagaaacatgttgtacaggtttgtagcccaggagcacgaggctacccctataccatacaccccattgctcccaggctacagacctgtataccatgctactgtaatgaatcagcacacacatttgtgttcccagcagctgacaagattaatcttcaggatgccaggaagggactcggagaaagctacaagctggggccctggcttccccggtaagaaatgtatgtctgcatagagttcctccagacaggcctgctccctgcctctggaagcctggcagagaggaaacgctttccatccgtatttcccactggctggcatcatggcgtgaagaggggtgtgtgtgtgtgtgtgtgtgtgtgtgtgtgtgtgtgtgtgtgcgtgtgcgcgcgtgcgcgcacgtgcaaagagctatcagctatttccaaagacgactcagtaaataagagcttttctgtaaatctgagtatctgaaggacttttgtggggaaaggtgtgaggacatgttttcgtttggcatcagagtatgtttggcaggggcaatgggtagaaaccacaggggcgtagattgttttaggtttaatagacagaaagacattctaacaaactcatccaatcatcaaataatgggctgctctgaaagtggccacgtccccactgtgggaggtgatccgcttgagactgacagatctgggatgctgcaggcggaatccaacatgaggcgagataccctcggtgtccctcccattcccagaattctgcgacgatatcaacagaatctataatggtctgctagagttaggaaagatagttcaattcacctttctcattttacacaggaggaaaccaaggtggataggaagggactggacccgaggcacctgagtctatctttccatccccttatcaaaaaagagtcagtcagcaggggcagggaggtttgttcagcatttcagtgaagagaaaggggtgttgggagatgggagggaggacagtgaagtacaagtggcttccattttccagggcagatgacacactgggcacctccacacttccctggagaacccaggctggctcggaacacagtccctaggcctcagcaccaggaggctgagacccacgggaatgacactgtggcagaagtcagctgcttttgcagtacatagcaggatggggttcctgtgactgaaggggcagacacggaaactcagactggaagagctttctactgtagaaaagaggtttttactgtgggaaagagattttctacagtaaatctttgctgtcaccttagatggataaatggatggacggatggacagacggggatggcaggacggcagtcaggtaggcaggcaggcattattctagtgcttccctagggtaagagaaaggttcacccgactcaggctgcagacataaaaaagtgaaacccatgccctctgataatgaccaacattccctctatggtgtagaagctatgaatggcctggctggatacagtttccactaaaacctacaccactgagatttcccaatgatcagaagccctcagcaacagtctgagagcagccatgcacggctgcctttaattacacactgatcacagcatcaccagggccgtcaccatgctgggaggaaaagcgataacatcattttgctggagagagccccacacgtcagagcagaaatgcagcctttgccaaatgtgactgtggacagagatgagagatccactcggacagcgctcaaacgccaacgtaggaccctcagtgctcctataggtttgaatgaaaagactatctttaacatacacctgtatactgcaacccaccccggcccaaaaaaataaatgggactcagtgacccaggctataaggtggctgggtaggagactgcaaaacatctcaagagctgctatttcctaattcaggaaatagaggatgtggtctaagaaccatcactccaggacctcaggggcagaggggacaggcaggggactgagcccaggaacctgggttctagtcctgaccaagcggccccgggtgaacgcaacttaccgaaaacttagtgtcttctacaaaacaaggat

SEQ ID NO: 1881200 - DNA, 4001 bp, Homo sapiens
taattagttgataagcatgaaaaaaacttcaactttgccagtactcacagaaatgcaaattaaaataaagaaaaggtatgtattttcttcctatcagattggtgtcaattcaaagcgataatactcagtgaggctgaagctagtgccctaattggtaatggacaattggcgtattagcctttctggaggcaatttgactacattattgaaatatttcaagatctttcctttgactcagcaagtctacttccaggatttgtccaaaagaaataatgaggatggtttcataaagatgcaagaataatatgttaaatgcattgcacataatctttttgttaaaagtgaacaaccagagggctgagggtctctgcctccatgcccacgtctcaaaattgctaactcctgttgattccactgtctgaagagctcttctgtgtctacttcttcctagttgcactgccatttcctagttcaggccaccatcacctttcacttggattactgcaacagcttcctacatagcatcccatccctttccggtttactctccacctggcaggcaggatgagatttttaaacacaaatcaaataacctcccactcctgataaaggtcttcactggcctcccatagccttatgtccaacctccttgacacttatggagagctacggtgattccaatgcctgattaccttgccagtctcctctccagactgccaacagatacacttctgaagctcaaacgggccatgatgatctctgggcatgctggtgttccctctcctagaacacagttcctcacactattctaccctttcctaacctatgttcctcacattctccagggctcagcttagcaggaacttccttagggtcaatctctcctgcttctccagcacttgagtgaaatgtagctcttaggcacccactgtccacagcatcctgcacttacccaaaaccacagcactggccacattatgtggatttaactgtgggtcatcagtttacaggtgtctcgggtcacttctatcattgcatgaccttttcagagaacacaaaagcctttgcatgcccaatatctagggctcctttccttattcatacaccaagacttttttgttcgtttgtttttgagacagtctcactctgtcgttcaggctggagtgcagtggtgcaatctgggctcactgcaacctccgcctcctgggttcaagcgattctcctgcctccgcctcctgagtagctgggattacaggcacccaccatcatgcccggctaatttctgtatttttagtagagacaggtttcaccatgttggccaagctggtctcgaactcctgacctcaggtgatctgcccccctcagcctccaagagagctgggattacagacatgagccaccacacctaaatattcctcaagaaactggctaaataaattacacatctatacaatggatgtgtactttacacatccatctacacaatggatgtatactacacaaccataagaaaaaaaataaaacatttacttggaaaacatcaggaaatagtgtaaggttaaaaaaaaaagaaataaaaatgctgaacaatattctagtatgctgctacagtgtatgaaaaagcaggcatatgaatatatgtgctgattcatgagtcaaatatctctctggaaggacactgggaagggaaactgagtgggtgaagtcaaaatggggagaaaggactttccctgtataatcttttactgtttggctttgttagtatatttcatatttcaatgatagcttactttggatttttgtttaactaagtagtcgtaagcgttttagacaaaactctttagaggagaaacacaaaggctaatcttccaccactcccaaaatgaaacaaaacaaacaccttacaatttccagtgctcttgaacaaggctgtggagaggtggcagcggtgtcttccctgcccggtgatggagcacgtcacaggggagcactgctgccttctctctcgggtctgctttgctcctcttttgcagtccttcactcaaatttcctgagcagcaaccactgtaaaatactccggctgtccaataatacttaggtacgtttcattttcttagaggcaatgtgaaactatgacagtttcttctcacaaagtggtgctggaatcaaccttaaaggaaaagcaaaactacgaatttctacagccaagagtactaactacaaattctgcttttgtgtcccataatattagaaaataaatgaatggatgaactaaagaaaagaagaagaaggaaaaaagaaagaaaatcttctccaacagacttctccttttcctttgacttggaacagccatcatggcaagacagagtgaggctgtttcttcttaatcagtactgggctacagagtccatctacaactaataagttgtaattcatgccttagatctgttttccctgcagctaaaagatacgttcaagggagtaatatgctctggatctcctgtattttctagcactgatcagctaccgtgcattatctaccagcatatggctgtagagagaaggacctctccaaaaagagaactgcaatggagagagagaaaattcagcagaaatcccaaacaaaatatggtaattatgaaacatcttacttcttgtcttattaccaagatgaaaataaatacctccaaacaaaactgctaaatttaactaccaagatttttaaaagtacaccctgaattcaatattatctaagacatggaagaggactaatggtactccaaaatgcttaagtgagaagaaaaaaattcaatctaattgtcttaggaaaacatcagatgaaataatatgcatgttattcccaaacaaaggatgttactaacctgaaataaagatagatattgaaaagttagtccttgagacaatgcgtatgctaacagctgatactacctaaaccacatagcagaatggttttcaaatccaggcctaagaaatacatataaattcagattcaactaaaaattaagagctatcctaattctggcagccataacgaattaccatagactggtagcttaaaacaacataaatttgtttctcacagttctgaaggctggaagtgtgagatcagggtgccagtgtggtcgggttctggtgagggccctctccaggctgcagatggccaccttttccttatatcttcacatggcagaaagacagtgagctagctctctggcctcttcttataagggcactaatcccattcatgagggctcctccttcatgacctaattatctcaaatcatcacactggggattgtatctcaatgtatgaattttgcagggatacaaacatgcaatcataagtttattctatgtcagaacttagtgtcttacctatacaagatgctttcatatccaacatctcatcaagttcttaaaataaccttgtcagggaggtgttattctcattgcaagggagaaaactgaaccttaaaaaaagagacttgcctggggtcattcacgtaataaatggcagcaaccgaactggaacctggaccctcagactctaagaccaatgcatgttctctataaataatatttgtgaggttttcttttctatcccttaaaggcaacagttgttagttaaacttcatttagacagaacattgacaatgcaaccaggttattctgtctgctgataaagaaagtctctatttaaattgtttttataggaacagaacatttacgtgctttttttctaagggagaggagagaatgaaatgggaagagaaaaagactaaaatgagatcaaatacaaataagcatttaattgttcctcttctatttcatacatctttttctaattcaagtcacttaaatatagtcaatagcttttgtgcttacatatgtgccagacacggatctaagtacaatctgggttcctactctcaaagatctcagaatgtagcagaagagccagaccttcaaataaaatttta

SEQ ID NO: 1881201 - DNA, 4001 bp, Homo sapiens
ctcctagggcaaggagtttgcactgttagggggagaaatgaagacaacaaaaagggaagaaagctggacttctcattagcgttttggtaactaatttagtgcaaccttgggttggcgagaaaatggcttgctttgtggggggaaccctagacctctccactgtctgaatattccatgtgtttgtttccctagagggctagagaaccctggacacagagttcagcaagagagagtgaaattaaaagaggttgtgagtctttaaccttgagcctgaaatgaatgtgaatcaatcccagactcttggcttccttgaagccgggtaaacattcgagtatgtagaacccatctcagaccagggcctgtgcgttttctcagagccctctgacaacgggcatgggtctccctgttccctttgtgctgacgaaaccaaaacatctgaaaccccgctcaccaggtcccttcctctccttcccctcacccccacgcccaaatgcagcttatgccaaaaaaaaaaaaattcctacctttagggtaggcagggaggggagatggaagagccttttttttttttcccatagttttttccatttcagcctcggagagaaccgaagtggagacttgagatggccgtggcggggtgtcccaaaaagtctcgtccccacagtcttgtccagagcagttcattttttctgttgtctccatgccacggggagggcggaggggcctcatctcattgtgtgtcatcccctctgcgttgtcagtcacatgacagggtcctgccaccatccccctgccccacacatacactaggtgttccagtcagcatctgaattgcacttcaacctcagaacacactgagcaccaggctaggcagctacagccttgatgctattcccattctacaaacaagaaagctgaggcctgcagcgccttctttgttttcagttaatcaaggtgtaacggctcacttttcaggagatcagaatatgaaccatctctgcagagccacaaagagggactccagggggaaagagctcagagcagccacagtggccatgatggagcaccagcataaaggccgtgtctggctggctcttatttggcacttgttgcctcttatttaaagcacaattccagcaagtggggtaccctggagtcccagctcacagtatgcaaggtgaaaggacagaggtgcttttcagaaaacagaaaagtcagcactaactagtaagcgatgactgacagcaagggagaaaaaacaagacaatccatggggtcttacctaagaccaagaaggataattgacaaagcttatgttaaattcttctctgtgcactctaaattagaagtcagaggagcgtatgacatgctttagaaagaattccctctgcaacagtaaaacaaaccttcagcgatgacacttaaaatcatcaaccacagtcacctagaaactccacttccataaaagagggctttccccaccagggtttcacaaaggagctacccctgggttccgctgagagctcaagtcctgggacttcaggggcctccccacgaccgtctcgtccagtcccctgcctccccgcaggcctgtggtgcagggcagccactgctctgcaggtgggtgccacttggcctgcacacagcagccgactaaggctctgtcctggaggcgccaacgccgccttgttttctccacctctgactccactccgagttggggctgggacgagaggaggaggcacctttgtcccaagtcccatcagactcttgagatgacaggcactgctgcccctcccaggagtccagagaagggacacctctcttccaagtgagggtcccgtccctctgcaccctgtgaggcaggacagaggacaaccagagagctagtgtggcttgtccacagtcaaggcaccagatgtggcagagccaggatgcaagttgggtctttctgcctccaagtccagtgctctttccactagccttgaagactcaatgaccagcctcctcccattcttcagcggaggaaactgaggccccaggacgtgtggttcacaactgagacagaaaatgaaagaacttgctgttttgtgactcagttccacacaccccagaatcccactggggctgggtttggccatctgattccagcctcgttttttggttttgtgttttcaaagcacaaataaagaaataaacaaaatcccccaggaaataagagaccccaaagcaagctccaataactggccggccagggctttgagtctatactcgagtgtttacctcccaaatgcatgaaggaaagaaacgctgggtacaaacgacctccgttcacattgtccaggcttccaagtgtagccgtgtgtctgtctgtgtgtgccatgtggctcccggcctccccgtggcatgcagcccgcccccgaatgtcatctgtccgccagctcccatgtgctttctggctgcctctgctctgcacctcagaaagccctgggttggctttggtttgctttgctgcctttggtttgatgttcccgttctgtttggccctcatgtgtctctctcatcccaactcatccaaccgtctctcctttctgtgccttttctgtttgtgacacgtaacatgttccatgttgtatggtttcttaactgtgtgtggttttcctaagatgaatttttttaatagcctctcctctttcctacttgattcccacctggtcctcctccctgtctgcatggttgaacctctgctttaaagtgaacaaggctcagtctctcactaggtgtgggtgcccgcaggagtcgactgtgcttcctttaaccactgttccccatcatctctttgatggtgcttggtgattcctcctgtcctaacactagtttctaccaaaaccaaagagatttttaaaaaccagctcaaggatgcctataacctgagccccctttttcactctcccccatcctgtcaatgctaataacacccagcgactatggattccagccacctgctttgccctaacccttctcccacccgcccctcctgtgagccccccgagcctggctgtggtccctgggcagtgctcctgacccctgtgcttcccttgcagatccgcgtcgtgaaggcgttccgtagctctctctatgaaggtttagaaaagcctgaatctcgaacctccatccataacttcatggctcatcctgaattccggatcgaagattcccagccccacatccccctcattgatgacaccgacctggaagaagatgccgcgctcaagcagaactcgagcccgccgtcatccctcaacaagaacaacagcgccatcgacagtgggatcaacctgacgaccgacacaagcaaatcagctacctcttcaagtccagggagccccatccacagcctggagacgtcgctttagctgaggaccctctcgcctgcccgcccgccctcatggaccccgctgccacccgctttccgggcacccatccatccaggcacccaactcacccaagcagcaacgagcaacaatcggaaaccaaatactggagagaaaaccaacgtttccacccacagaccctttctctggctgcgatgctgtttgaactctttttcacttcaaggcaaggggcgggatctccactgggggcttacgggagtgagcggttttcccaaaacaagcccttcctggctcccacccagacatggaccagccatgcacccgcccagccaccacgtcccccgcatgaatgtactgtacactttcaatcctccccttgtttggtttttgggggttggggaggggtttttgtttgtttgtttgttttcttaggcgggaactgcaaacagactcttttctgagactatttatccaatccactggtctgtgagtttttgaaatgcttgcacagcatggtctcagttgtatagattaatttaataactttttgaaattgcagagcttaactcgcctagtagatttgcaccaatggaaccgaagaacttc

SEQ ID NO: 1881202 - DNA, 4001 bp, Homo sapiens
tgtggtggcgtacacctgtaatcccagctactcagaaggctgaggcaggagaatcgttttaacccgggaagcagaggttgccctgagctgagattacaccactgcactccattctgagtaacagagtgagactccatctcaaaaaaacaaaacaaaacacctaaagttaacaggcaaactaaatattacattaaaatatcaaagtgtattaattagaaaatacagaattgattaacacaatagctgattcttataaaatttcaattaacaaaattataaatattaaaagtaataaaggagtatgcagagagaaattttaaacaaaataatatgatagttaatctcaagatattcacttatatatcttggaaagtaagtagcagaatttacttatgatattgtagaaaacctgaatatctaataaccatggaagaaatgaaaatgttattttaaagtatttataagaaaagacattgtggctgtacggttttatcaagaatttttttcaaactttcaaggaacatgtaattaccatgctatatgaaattagagaccaaaggaaaatctaggaagcttttcattttacgaagcttgcacagccctgattcaaacttgaaagaaatacaaactacaggtgaatttcgtttttaagcagagatgtaaaaacttaaacaacataccataaaatagaaataaaaagcaacatataaagaactacccgttaaaaccaaacagcaataccacaatgcaagaacagaccataactcatcgcatcaactatggataataagacaacctattttgcttaggttgaattttctaatcaatacaataagacttttggaaaggaagaggcaatttagtattatttgcagttgagaaaattacatggttaacaacctcgaaagaatccactaaaaaaattctgaagtactattaagagattttaataaattgaaaagatacaaatcaatacaacaaaaagccatcgcttcctatattatagtaataaccaattagaggtggaacaaaaggaaggaaatagccaggcgcggtggctcacgccaagatcgcgcgccattgcactccagcctgagcaacaagagcgaaactccgtctcaaaaaaaaaaaaaggaaataatccataatccatgtacataggaacaatcatagtaagtaaagtaaaaaatatgccgggcatgatggttcacgcctgtaatcccagcagtttgggaggccaaggcgggcggcggatcacctgaggtcaggagttcgagaccagcctggccaacatggtgaaacctcgtctctactgagaatacaaaaattagccgggcatggtggcatgggcctgtaatcccagctactcgggaagctgaggcaggagaatcacttgaacccaggaggcggaggttgcagtgagctgagatcataccactgcattccagcctgagcgacagagtgagactccgtctcaaaaaaaataaaaaatataaaacatatgaaatttcaaatctttcctgatatctatatctattcgtgttcttatgcatatttaggtccttatcaatatttatttatctacacagcgttcctagatggtaagaacaaatttgcaaaggtatcagttcttatattagtttacagatttgatgcaattgctattaaagtctctaaataatttcttaactatacaattgtagagtttatctggaatgagtctgaccatccaagaacatgaaaatatatgaagtggagaattccctgctagatattaaaattcatcatataaatgtaatatttaagacagtaaaatataggtactagaatagacatgtgaaaccatgtctattcatgaaggtagttcagaaacagattctaatggatttatttttaacatatggtaaagattcctgagcaccatttactgagtcctttgttctctgctacgaactactacaaactagtagagaacaaaggactcagtaaatggtgctcaggtaaagggttaactacttggaataaaataagactattatttctcattatgccatacaccaaaatttcaatgaacttaagacaaatgataaagttgaaaccagttttcaaaaaacacaaaaatatataggtgaatgggatactaagtaggttttatttccaaaaaaaaatttaaaattctaaagattgaaatatgcaatctaggaaaatatatctcacatatacgaatgcaaaagcttaataatatatacgtaatatttaacacataaaatctcagtgaaacaatagacaattcacagaataagtcaacatggccacaaaatgtgaaaatgttaagcctcaacaactaaaaaagaaattcaggttttaaacacaggccactttcaatctattaaattaacagaactagcacaacagttctagggatgtaacaatatatatcaatatccttaaaaatgttatataaatttttattatacttacagtaatctcttgtaaggaaacaaaaatatgaaaatatatgaacactcaatgttgacattgataactatagtggcatagttcaataaattatatgtctatgtgatttcatattactcattcacactgtaccataaaactttaagaaattttaatgacacagaaattaaaatattaagtttttaaaagcacagtgaaaaatgttgaaaatatgtttaagagctatatttatatatattcatactaatacctagtgtatacacatttcggaatctccaaggaaattcactgaaatgttaacaataggggtctttgttggattaatggtgagatatattttttaacatttcatattttctaaaatgaatatacacattacaacgataaatgaataggcattgctataaaatgagacagagaatattacaatgtagtttagaaacaatgccattcaaaatgtgttgactgaaaaaaaagtaaccgtccattattgatagatttcatttatacagaagcctcatttcctgtcagtttttgataaattagtgatcactgtactttgctctaaaatgtaaatagctcccttcttccactgacacagcacagatttgtaggtcttcatgaaaatacaaaatgtacatacattaagaagtgtaagcacattcattcaaaactatactttttagctcttgacactgaaaatttatcatcttttaatatataaagcatattattttttaaatatatgtgcatatgtgttttaggcgcatatgtggaatcctatgtatttgaaaataattcttgtccaaataaagtaaaccacttagaatatttcggtgtaattatgatcacatagcttaaacattaattacagggaatgaataaatgtttccccagattctagcaggtcttcctgcctttctcttccttccaaaatcccaaaatgaagttccaagaggatgtatttctttttcctagcttctaattagcccagtctttggtttagttggcaagggcgacttttgcataagcaatagctctctttcaaaaaagactgatgtgggagattgtgaaagacctataaaggtcctgtgatcttcagtagggtccatccaagcacccaaacagaagcctccacagccacgattgccccacatgtcacatagggaatgtatttaacacatgcaatcgtggattactcccttcccatcatcccttttctactggcacaagtcagaggtgctgttccaagtagaaaatgtgggtttgcacagcaatttagagtgtgcattgcttttttgtctgtttgtgggacactggaagataggcctggcacagttcatccttcgcaagtgcttaatgccatccctggggacaggaatatcacaagcccagaaaaacacagcttttagccacttggtgttgaaaatttcaggcaaaattccaaaagccctcaaagctaatgttgaattgacaaagtgccaaaacctctctggcattaaatttccactctttattttccc

SEQ ID NO: 1881203 - DNA, 4001 bp, Homo sapiens
gcatgaggtcatttaggttttggaatattttgtatattatcttttgttgttagagaaaggatatattcagtcattagggttagacagatatagctctttcagtagcatgaccatttctccagcaacaatatgtttggagaaagaagaggaagagataatattgttttaacattcttatgactgtgagaaactttggtggcttttatacacaggattataattaataataacaacaacaacagcaacaaacacatatagcactgtaggcctggtcctgttacagtaagaaatagaatgtccacattaactctatgaggtaggtattatcctcagatacagttagtttaaataacttcccaaaagttagaaagctaagtgggagagctaggatttggctgcagcccctaagaacaaattgggaaagatttaagtcatagatgaagtactctgagggtgccttaagacaatggctgtagcctgctgtttatggtcacaactacatactcactggaatgttcatggccgagataaataaagcaagtattcatccatatttcacatgttactcacaggcattgctgcatggaagagattgctctcttgatggattttaggagctagcctgggttttaccagccgttgaggttgcttgcagccttagtttctctccctgccttctgccactgtcaaagagggtttagcctgcctacagagggtaaaataattaggataacagtgcaccagagaaagttcgaaatgctcttactcttagggaaacctttccaaatcaagccacttaatgctagcaaccatgaaggtatagttgccccagaatagtgtgtggttttccactagcagtgattttaccctagtgttgactgatcccatgtggtggatatatgcaggtaagtgcttcttgggaacagaagggatgaagataaataagagaaagtttgaagtcatgatccgtggagcctgtgctatataggaaaagaagtaaaaataagagtgggctgttatataaggatatagcacagaagtaaggggctgacggtctctgtgggtccaaaaagaagtgaagtgggagcaactgcttgaaagtattagaaggataagaaagaatgttgattgagcgggatatttacattttgtgtcagagaagacttttagcactcctctttgccttgatggtgttacctgaatatgcatccattttttttttctttttttttagacggagtgtcgctctgtagcccaggctggagtgcagtggcgtgatctcggttcactgcagcctcgcctccagggtcctggttcgagcaattctcctgtctcagcttcctgagtagctggggattacaggcacacgccaccatgctcagctaatttttgtatttttagcagagacagggtttcaccatgttggccaagctggtcttgaactcctcatcttgtgatctgcctgcctcagcctcccaaagtcctgggattacaggtgtgagccaccgcgcccagccacatccatttgttaatgacttaattaaaatgtgtcataacgaaaatgatcagtaggccaggcaggagctcccaggtacaaccaaggtgaagctgatttcacatgactttataatcttcaagcccatgtttgaatatttgaacataataattgttatgtgattaaataaaaacagagggcatagactcgttctgtggtgcagatttaccctatagacttatatgctcagtaggaagtacattgagtttttataagcagtgataattctatcttccaaatccattacgcttcagttagatttaatttttatttatcaatatttatcttgattaatgatcttacctctagctaggttacaggttccatgagaatagggacagtgtctgtgtctagtttctccctagcccagtacaaggcatatggtactcagagacttagggatttctaagtctcttgagtaccatatgccttgtactgggctaggtgatgtttaggatgggtccttaaacaggatcaaggccaaaccacttacattatagtgaggcagtcaaggtcctgacaggtaagtgatctgctcagggctcagagctaggtagtgagaaagcctgtgccaaaacccaaatctcattcctcactctgttctttgcaccatatcactctgacattgaatcaggttcttgtagtgatcttctctgtgtgtctagggccaaaaggaaatgtgtttcctaagctagagcttcccaacctgtttctcaatatggctcacagagaagctgggaatatttgtctagaacagtatggtaaacaaaggaggctttggagggcagccgaagaaagaggtcccctaggagactaatgcccagaaacctccaggctacccaagggggatcataccttcacacacctctcatctactatgctccctgtaactgtggaaaaactctttcctaagttaatattagatcacttgaacatcagtcccatagtgcacagatacaatagtttcccaggctttaagactctgtataaaaattgttcttcaaaccaaaaagaaacatgatccttttcattgtatttcttgaagtacctgatatacttagatactgctgtatctgtaaataaattatgataccttataaagttttaaaggaaatttacaagtgttattttctagtaattaccttgaaagattacattggtccaggaaaatgttttctgaagcaatgttaatcctactagccaagcatatcacttagtccccactgtgagatgagggatatgtgcttaaattgtgaaacaaatatatgagtcaggtatttttcctttgagtccaagtggtttatgactttctttcctgtgttctttgtatatgtgggagttttataattttttatcaagaatgaaaggttggcctgtgttcttactggtgcaggctgtcacatttctctctgttgcccagtcaggtgctatggcatgtgctgcttctggcgtagtgtactctgtggatgtaccagcatgttcttcaaggtcatgactgattttccagacctttggaattgagataaatgttaaatttgtagctatctctgaatttcttccagatacttttcttcatttgtttgtttgtagggtaaacatacctgatagcagcaatttaagcatacccttagaatgaccatgtatggccagtgcacctgaatgtgtgttccaaggtagggaatccaggaatggccaactcggagattcattccttactatgataaatatctgagccccctgctcatcctgtggaacatgggcttattggggattaaggccctgagttttaggttaaatgaaggttaccagatggaggtcattagggggagggtgttaaatgaaaatgctttataaactgcatgctgtttgcaagcagttgcagttttcctgcccagcccgcagccactggccatgcagtcatgttgtccagcctgccgccactggaccatttctgtacataaggcagttctcctgtcccgcctgccaccagttctccactctctccccatatgtaagcccctagtaaaccccatgtctcatttgctgcctctgggtcttttcttcagcctcttgaacctagtgccttccctgctgaggttaataggggtacagcacaacagtgttgtaacacagaaagtgatatttacagggatatctctctcacaatatctcttaggaaaggtaaataaaatgttcacaacttgtaggtgagtaattccttagataagttgtttcttaacttgggaggagtttgggaaggaacctaagcaggctgcagaggctgggcatgggagcttgtcatggctggaagttgaaatggtcaactccaggcagatctcctggggcaaagcagcctccaccaccagtagcccttcctttctgtttctttcatagccccactgctccatctgaagcctgaacccttccagaaaattgatggatagat

SEQ ID NO: 1881204 - DNA, 4001 bp, Homo sapiens
gcctgacaatggaaatcagaaaatttattattaataagaagcagaagtatcaaaatattatccaatattcaaatattattcattatttcacagaatcacattcatatgtttcatggaggggggttaagattaaggaagagtctgacattattcatgaagctgcagtacctttcagaaaccaagatgtattgagtgcttgtcacacatccagcttgtgttaagtgcggggtaatgttaaacagaaatatgcatgatttggtaatatatataaggaagataaaattcaatcaaatgaacacacaaatgaatatttagctacacattgacacatgtattaaggcggaaatatttttaaaatgataaattcaagactgttcctagaattatagaatgtgacaatgcaggggatgaagttttaaaataatgatgttctgaatttccccaatttctctgaatacctaaccccatatcccagcagcttttttagacaggatacagtctttaagtttgaggtaaacattttaaaatgagcataagcaggaacattaaaaagagaggtgtttaaactacagcaaatgtgatttaattccgccataaatattgctaagcactgaaatttggctgccttccagaaaaaaaaaataataaagtagaaccagctataatcccagaatatgttgtttttttcacaggaaaaagacaagtctaggtgattcctttaggtacataatagatctgaatccatgttggaaattatatccctgcccaaaaatagtgttttatctttttgcaataaattaactatgtgctcctacattataaaaattgtttttgctaaggacttactaatgtgtcatcaaatatgcttatcctataccttgaaaaaaagctaatcttgtcttcaactatgaattcttttcaactgtgttatttctataagacttatactttgttttgtcagattgtatcttaaatgaaatacatgattctaagaaaagtaaactaaacaattatatgccaataaagcccacatattataaatgtttgtctacagaataagagaataatgtgtaattaacttgaccagcctccaacaaaacccatgctaaatagaagaaggtcacttattttgatgagcagactctaattgcttcatttatatttttgattttttctcagagataattagaaaacggatgccagatcctgcattctgttttacaatactaacacaaattttaatcaaacgtaatttctgagaattcctttttgggggaatgaaaagccataaggtttttggtggaaattgcttttatttaagcaataaaaaagtgttaatgaaattgcttgcattctattgagcaatggtagttcaaagatctttgttactgagtgtattagtttgctaggtctgccataacaaagcaccacagattgagggttttaagccaaagaaatttgttttcttacaattttcgaggctagaagtttgagatcaacgtttaggcaggattggtttcttctctggcctcactgtttggtttgtagatagctatcttcttccatgggttttcacatggtcttccttttgtgtttgcctctgtcctaatctcctcttctttttgatttttattattatactttaagttctagggtacatgtgcacaacgtgcaggtttgttacataggtgtacatgtgccacgttggtttgctgtacccatcaactcgtcatttacattaggtatttgtcctaatgctattcctccccaagctccccaccccccaacaggccccagtgtgtgatgttcccctccctgtgtccatgtgttctcatcgttcaactcccacttatgaatgagaacatgcattgtttggtttcctgtccttgtgatattttgctgatattttgctgagaatagtagagtgagccctaatccaacattactagtttcctcttcttataaagaagctagtaatattggattagagctcactctaccagacttatattagcctaattatctctttcaacacctgatacccaaacacagtaatattctgaggttccgaatattaggacttcaacatatgaattttgaagggaccattcagcccacaaaatcatggataccttcctgaatgttgctaaatgttatattgtgaagaaaaattaaagcctggtgagtccatgacaccgccagcatataccacagaaacacacccatgttgtttccaagtaaaatgtggatatacacagacttgcaaaattagaaaattaagagatcaattattctttatgatgaacaatacaataaaatggcaaagtgcatagaaggaccaccaaaaacctcttctacacttctcattcccaaaacaaaggaaagcatgcttggaaagattactgaaaggctctgaagaacctccacaaaaaatttgcatcctcttgatatggccttttgttgtagtaagttgcagtactgctcttcagctatttcaatagagaggaaagtcagtgaacaaaaacccctgcccccatttatttctaatggtcccgatagtttgtgtataccggggactcacatagagttgttctcagagtgtgtagacaccttggtaggcatttatttgtggtctacatttttatcaaagaaccctcttcgtagctgtcctattaggtcacaagggatgtagttcttgttttgtacatcatcatgctcctcactctcctgcttttaataaaccggctaatgtgctctaagcattataataggaatcatgatctatcatcaggtttgatccccttatgtaaaacagtgccagggctcaagaggagctctattatgtatgttgattgattgggcaactgacacttccagaatctaggtgatgtggctgcataaagcactggcagtgtgttgtaacctgacacaaattgccttccagtaacctcctatgaactctgtaatctttccattggggtttggatatttggttaatggataacaaattcacactctttcctacttgccagtttaaacctttcacatacctaatatgtaagttgcacatatgcttttatgacacttgaaactcaacatacttaacaccaaattcatccacttgttttaaaaattgctttgtctcagccgggcacagtgactcacgcctgtaatcccagcactttgggaggccaaggcgggtggatcacgaggtcaggagatcgagaccatcctggccaacatggtgaaaccctgtctctactaaaagtacaaaaattagctgggcgtggtggtgcatgcctgtagtcccagctatgcaggaggctgaggcaggagaattacttgaacccgggaggtggaggttgcagagagccgagatccttccagcctggcaacagagtgagactccatctcaaaaaaaaaaaattgcttcatctcattgtttttctatttcttttctttgaaacttactgttggcatctgatgagtaactttttctgttcctacttcaataaacagataaattctaattatttgtcatttcattatctcttacttctattcaccccgttgctggttaggcatcttacgatttgacattcatatccttaaaaatcttctaattgatattgctgcctccacttactatctatttcagttattcctcactgctacgaaaggctttttttgtaaagcatatttctcatcataaaatctcaaaacacttgccatattaaaaataattaatataataataataaataaataaacctgtgatctctctttcaatttaataaaatgcagattctttattcattcagataagatgttgtctaggtgtatttccagtccaggcttaacattaaccctcttaatatagttagtattttggtttacttcagttagttgctcttccacaaatgccactgataggatcatccctctgtgcatctacatacactgtggtcatggcctgtaattctcccttacccatgtctatc

SEQ ID NO: 1881205 - DNA, 4001 bp, Homo sapiens
ctaaataacagccaagaccactcctagagagtcacactgttaatctaaaatccctgaactagagaatgttggaaaatatataacatatgggccattgcagcttctacccaatgatgtcagacatcactaattgatcacagagttgttccctatggcaccttaaatgtttacaacattcattatccatcagttcaaggtagcactctgaatgaaacctcctgaccatcctgtttctagatactctttttcaaacacacacacacacacacacacacacacacacacacacacacacacgagagaaccaaagggcaacatttggtctcttcctgtcaagttcctgtcctgccttctagcctgacttcccctgggacttgtatttgccttccaagtctgattgacagagcaagactggatcccatcaaatagcctggagagccagacagaagtccatgctcaaaatccagaccccatcagatgttgtttgaaattcagagactgcagagactgctggcacattcttggaaaagctctgaccttgggaagaaaacttacttccatctctaagaaaaaatactagataatgatttttttaagcccatgctgggagttggtggcaggatgagaatgcacatggtaacaggacaacagtgggtactggcctggagcaggctcctacgtggcctccccagagtccaggctttattctcagcattctctatggtccagcctctctccacttaaactacacttcagataatggtgtttgctacaactctttacaatcaattattttgtcattgtctttatttaaacatgtacacacacacacaactagagggaatgcactggagaatgacacacaacgcattccaaggaaataacaaaattttttctggcttgcgtgcccaacccacaaacttgaagatcaccagggctttatttagtttggttcccattatcattatgtgaggcatgttaataactggactccagagctttggttttagatacttgttcctcacctctctcatctagagttttaaaaaatagtttttattataaatacatattttttgcttttcctgcccacctaacttttaaaaaatccaaaaatcccatctactctcattagagttgaccacaacaaaactgcatgagaaaaaaaaaaaaagaatcctttggatcacatgggtgtcacaccattgttggccatgggagctcagcctaataaggagaagatatgacaacagagagagcccagggtcttgggccctttgcacagaacatggtgtccttactggcagtttgttttaggcttaacatattaatttattgctaaaacaggccgggtacagcggctcacgcctgttaccccagcactttgggaggccaggcgggtggatcacttgaggtcaggagtttgagaccagcctgaccaacatggtgaaacctcatctctactaaaaatacaaaattagctggcgtggtggcgcattcttctaatcccagctactcaggaggctgaggcaggagaattgcttgtacccgggaggcggaggtggcagtgaactgagatcgcaccactacactccagcctgggtgacagggtgagtctctgtctcgaaaacaaaacaaaacaaaaaaactgatgtagtaaaatgtgctttacagtaattacaccacaagaataaactactagcttagaattatttgttgtatttcactaatgccaaagacatagatttttatatgtaatacaaatcccttattttataggtaagataaatatggcccagagggataatcagaactaccaaatgtcacatagccacttagtaacagaagaggcacaacagcaagttctcctagttacagctctacacctcatgacctccatggagccatccaacctgaccaccgggttatctacaagggaattttttaaattaaaaaaaaattcccttgtagataatctagtgatcgggttaaaaattcctttaaaaaaatcttgcagcagaattaatgagggtaaaggtacatggattcttttcttttgactccttccatttttatacctgaagttactccatgagaggaggaactcagtctgcatttactcataactgaactctcaacatttaagacatttcactaaattagtaataaattgatggcagcatagaaatttgtttcaaaattactcaataaaaatacatactgcatttttctccagatattcccccctaaattattggcatagtcattagccctttataggagtttttgaatttggcaccttgacatttggatgggctaatactctgttgcaggaggctgtcctgtgcactacagaatgtttagtagcatcgctggcctctgccctatacatgccagtagcataccttctggttcctccccatcccactgtccagttttaacaacgaaaaatgtctccagttgtcaaatattcctgggtcagggttggggtgggttgtggagcacaatcgcccctggttgagaactcctgatctaaggtgacagcatatccacccaccctcgaccgtccaaccatgtgattcatgggacatggaagcttgatgaatcaaccaactgaaaattaaaagatacacatagaaagcactcaggaggctgggtgtggtggctcatgcctgtaatcccaacactttgagaggctgaggtgggaagaacacttgagctcaggacttcaagacccacctgggtaatatagtgagaccctgtctctacaaaacattaaaaattaaccaggcatagtggtagcatctacaatcccagctacttgggaggctgagaggggaggatgacttgagcccaggaggttgaggctgccatgagtgtcatgattgtgccactgcactccagcctgggagacagagtgagaccctgtctcaaataaacaaagaaaaaaaaagaaagcactagcactcaggaaatataagtatgaattgaattagatatactctaatctgcttatttcaaacatcatcacttttgaagacattatgctaagtgaaataagctggtcacaaaaggtcaaatattgtatgattccacttacttgaaatacttagaggagtcaaattcacagacaaagtataatgtcggctgccaggggccagggagaggaggaacgtgcagttattatagaatgagtgcagagtttcagtttgggaacatgaaaagaattacagaagtgggtggtggtgatggctgcacaacaatgtgaatgtacttaacactactaagctggacacttgaaaacagtgaaaatgataaattttatgttacatgctttgaccacaaggcctaaattagaccaaattatcacaaggcctaattccacaaagcacgaagcaggcccagcgcggcggctcacacctgtaatcccagcactttgggagaccgaggagggccgatcacctgaggtaaggagtttgaaaccagtctggccaatatggtaaaaacccgtcgctactaaaaatacaaaaattagctgggcatggtggcaggcgcctgtagtcccagctacttgggaagctgaggcacgagaatcgcttgaatccgggaggcggaggttgcagtgagctgagattgcgccactgcactccagcccaggtgtcagagtgagactccatcccaggggaaaacaaaataaagcacaaagcacctagataagatttaaaatccccacattctcccataaacttgagtttttgcttttgtagttgttttgttttgttttgttttggttttggtttggtttggtttggtttggtttgacaataaattccttagctaaggaatccaaaagctaagaaaatcttcctcttcatttgtggctgagagcacaggagcagcagagacaaccgcggctctggggcctgctgcagagcagcacaggcacacaccaggacatgggccctcagggaggccccctgatttaagagtcttctcgtgtg

SEQ ID NO: 1881206 - DNA, 4001 bp, Homo sapiens
cgcgggggtcggcgcgcagcgcagcaccggggccacaccggggccctgcaggcaggcgagggcatggagcaaatgctccggaacctgcgggagaacgggcgtgtaaaagagccacggcacggggcccatctcccggccgcacggccccgcccggctcacgcccacctggccgtcatcgaagcgcgcctgcagcgcgcggtgcggtgccagaaagtctcgggaacgcaggtggcgggtgcgcgtctccttgatccacaccggaccgcctggccccagggccgcgttgagggcccccagcgtctccccgaccccaaggcgcctggtcgccatggtgaccggaaggagtaagcggaaccggaaaaaaatttagggaggtggaacttccggaaaggaccgactagctggggcggggatgcggcggtggtccccgtaagtggacaggtgcgccagtggtagccctgtcggctgctttcgacctaccgcccccagcgccccttccgcgtggtccacctgcacagccgggccccggatctgaaatctcggggccctccctgggcctagggttctttcgctgtgacccaggccttaaccaggaaaaggatcctcgcgacccggtgggcgcttagaccgggtaccgtctcttctcatcgaagtctcacatgtttgttttaataacatttcatttctcccattttacacatgatgaatattcgtcactggaataaggcagtataacattaaggccactttcacgacctacttaaaatatctcgttttaaaaagaatagtgttccgcggtttcaggttatttgcaagcattttctcgtttgagatatgggtgtttttttgtttgtttgagacggagtcttgctcttgtctcccaggctggagtgcagtggcacgatctcggctcactgcagcctccacctcccggattcacaggattctcctcctcagcctcccgagtagctgggattacgggcgcccgccaccacgcccggctaatttttgtatttttagtagagacggggtttcgccatgttggccaggctggtctcgaactcctgacctcgtgacctgcccgcctcggcctccgaaagtgctgggattacaggcatcagccactgcacccagcccgggtggtctttatgcccaataaataagcactctgatacagttggcggttttcttctcttgatacctgagaaatcacaaccatcatgatggcttccagaattaccagactttttttttttttttttgagacggagtttcgctcctgttgcccaggctggagtacagtggtgtgatcttggctcaccgcaacctccccctcccgggttcaagtgattatcctgcctcagtctcccaagtagctgggattacaggcacgcgccaccacgcccggctacttttgtatttttaatagagacggggtttctccatgtttgtcaagcctcgaactcccgacctcaggtgatccgcctgcctcggcctcccaaagtgctgggattacaggcgtgagccaccgcgcccggctcagaatgaccagcttttaatgtgactcctttaacctggtgtgctttaacaacgatccttaaagcttcctgttttaggcaacagccatttacgggccaaccaaataatgcgaccataatagaaaataggcctcagttggagtatcttgctcctctaccaataggaaaggtctttttctttctcccacaaaggttcccaaatgtcttcatttcactgtaacttactcaccccccaccccacccccattccttttaatagagaagctaactcagtagagagagttgggaaatccggagagcagggaaacccaggggcaggaaaagcttggcaaggcccctttctgggccagggctgaggccctgctgggaggcgccgaaagagcactgggcggacacgacattcccgatggcttctcgggtgcccactcaacgggagtgatcgtgtcattccaaagcgctttccattctgaaggtgcatgacctggagacaactgcttagcagggttgggaaccctcagtcaaactgaggacttcagatactctcatccacgaagacggttggggtggtttttccccaggaagtaagagggctatctttagcgagatgcgggctgaggcagccctgggggagtcactaccattgcagccctacccagaggtcctgggtccaccctccctcgccaatcctccccagggttccagagatggccaccagcctcggctctcccacgtctacacccatcacctccagcctgagggcgcaactgagaggaactgagacccaagcagctcagtaaagtatgtctgggggtcaggggcaccccatctgggccagggcgctgctcaggcaggagagcaggggacgaaatccaagcgcagctggaatgctctggagacaacagctgcttttgggattccgttgcccgctgtccagccgttggcggggggcgggggagctcctgcccccaggtcactcgccctggggccacatcagaacccgcccatccccagtcccaggaggaagacccgggagtaggttgtgaaacggagtctagagggaacaagacgctcacctgggccacagaacaatagaaggggaggtgggggcctcccctgggaccgggtcccgatccggattagatccgtggggcaggattagccctgttggtcccacgaagcctgggccactggtgcggtgacggtggtggggcgggcttcggaatccgtcaggagggaagcgcgcccgtggggccggagaggaagtaaacccgcgcgtccacctcggggacacccccgcgctcggtggcctttgtccggtgacgctgccagcgcccggagcaccaggggccgaaggggtccacagagcagccgcgggacccccggaaacccattgcgaccggccccaggagacccaccaccaggctcccactgtgccgagcttcccgctcgcccggccccgcgggtagcgaaagcgacaatgttcccctgaggccacgacagagccggcgtgccgagatgcccaaaccccgcgcgggggccagcgactctcgcgccagtaggcccttgacttggatcaagacgggggacgggggactcccaggacgcgagcagagtgaacgaggacaaggtgatgctccacgcgcttctacttcaagtctggtccggttcggcctggtctgggccagccgaacagccacccaaacactatcacagcttgcccttccgcttgctctggctgcctgcagacttggagccattttaaggagaaaccacctggccacgccccctagagaacccgagaagccaatccacgctcggccacgcccctctccgcgcgctgcggagaggccaacggtcgcgcgggtgacggttagggcggggcgtgcttccgcgtctagccggagaaacttgagccggctgccccgcccacggtgcccgaagccccaaaggctggaattaggggctagaagtctggcacccaccgcctggccaggtgttcgggacgcgaccaggtgggcggtcgccccgccccgggagcgcggcttaatagctgagagcccgggggccaggccgcggctgcggcccaggcaacgccctgagggtggccacgctgccaggtgttccactcccccgggactatgggcaagggcccggggcggggagggcggcaggtgctgacactggagctgcgccggaggtcggggaactcggcctcctaagactgaggacactcgcctgctgggccggtcgagctgtgcggtgccctccgggacgcagggggcgctgcagccacgctgggtcaggctccgcagggccctcccaacccggggactaacggcgccggtgacgacttcgccgcgcgttggtcagccatggccaccgctctcgcgctacgtagcttgtaccgagcgcgaccctcgctgcgctgtccgcccgttgagcttccctggtgagcttggaccc

SEQ ID NO: 1881207 - DNA, 4001 bp, Homo sapiens
gggcacgggacaggaagggagggactgatgcagagaaacggggccaacatgttgcaggagggaagaagcaggaagaatcaagggtggttttgaagttgcagggtacccagggcaacagtggtcagagtttgagaaagaaaagtcacagcaggcactagtttatgggtgttagacatttattcatttgagcacactctttgccaggcactgggccaggcctgtgggaagcagaaagtacctaaatggcatctgtagttggaaaggcttgcagagctcagaggccttctgcttgtaccccactccctgccctcccacaagcagcctccactagatgccgtctccaccaggaagctttccttgacttcccaggcaagattgagtggccctgctgtttttctctgggtttacccctatgttaggtttcctccatggggaaaaactatttccttgtatccctctgaccaaactgtgctttctgggagagcaggagccagcttttatccccagggtctagcactgtatctggcatatgctagacactccacaaacgtttgctgaattaataatgacaaacaccacatgcaaggcaccatttaagtgattcacacatagaaattcacctaatcctcacagcaaccctaagagctaggtactactcttgttatcatcatctccattttacagatccattaactgaggcaaagaggttaagcaatttgtccgaagtcatatagctagtaagtgacagagccaggcagtctggttccggagcccttcctcttgagctctacaccatgactgcatgtggtagaaatgaaggtctggagcttcaagtcccataacaacaacttggggctatagcatcagtgccctccaagcaaaggcttcagggaaccaagctgggtttattgactcactgcaaagagggagaacacacaccggaaggaaccgtggggcatctcagttagaggatgctgggaaggactgatcctagggttggggattttgctaagtgatggaggggagactgaggaaatgaagtctggcttcactctgaattggatgccatcaggaagaaagggccattctataattgagtaccttaattcatatctagaagagagtggagcaagaccaaagctgtgattggttttttaaacagcagcaatcactcatattagcaaggataggagaatgtttagttacttttgtggttggatgatagtcctgttttcgtctgtgttcagttgtgattatcaagtgattcttactttcttctcaatccatcaaggtcacagggtgaccctgtctgaagttggtgttctgtgacatcgcttctgtgttgcaaaacaccatgccgagctctgagagtcagggcagctccagctgtcacgggctacttttctcagtggtaaaataatatggatacattgttcccgaacttgacattaatgccaatgtattcctcctcaagcttctccaagtttcctagagtgttgagtcgctaggagtgggcagcttcagttgtagggtggaggaggctggcaggttcacaccaatcccggaacgtttttaaggtcccctggctacagtttctcctttgcttctcttttgcctcagcacacagctaagggctgaggctgcagtgttccaaaagcacctgggaggctggcaggcccacactgctaatatgcactcatcaccattatttttccagaccatatatggcctccagtgccttccttcacccagcaccctgtgtggccttccactgatgaaggaccttgtatcatttaaagcaatcacttctctcctttcttcctggaaattggagacctcttcagtgaccacaaattatcagctgcatttctggctgaggcttctgcattgttcggctcccccaccccatccccctcaccctttcccccttgacccactttcttcccagcaggggaaggccatctatttctgccctcccctgactccctgaagctatttgtttttaggagcctagtttatttacagctcattcctgttcagaatatttccatcaggtggacgtgtttgggagcagcttccccctccctcctccctcccagtcaactaagccaggacttcacatgtctattttggtgtcatccgagtggcctgtgggtctttctcatggactgtctctatagaattgtgtctgagctcaggctccagtctggaaaagccccggaaggctctgttgtattgaaagcaatcctgtgcgtatctccgtggagcctgcagaaacctgggagcagcacgtggctcagcaccaggcagctgccttggaaatgccaaccatcacggaacttcaggaccgcatgtcccaacttaaagacatcaagctcatgttgtatgtggccagtgcattgccaaattatgggtaattgtttaatgcaggctttggcaagtgtttgaagcttttgttgtcgatgatgctggttttgccctttggactcaatacccattcttgaaaaggagactttctcttgtttcatttcaagaaactgaggcacatctttggaaagcgattttctccaatttactcttggaaagacatggatttgattaaagagtgttaagtctaggtgcaagtggccatgtgagccagtacaactcacttactcaatctgaaacttagtttcctcatctgtaccacaaagagttttgcccaaatcatctccaaagtccttttgcctttttttttttttttttttttttttgagacgaagtctcactctattgcccaggctggagtgcagtggtgggttctcagcccactgcaacctccgcctccagggttcaagccactctcatgcctcagtctcctgagcagctgggattacaggcgagtgccaccatgcctggctaatttttgtatttttactagagatggggttttgtcatgttggccaggctggtcttgaactcctgacctcaggtgatccgcccacctcagcctctcaaagtgttgggattacaggcatgagccactgcacctggcctcctttagtccctttttaaaataagtatgacaccagaaccaccactgtatccatcttcatctaccctcttgcaaggccagccccacaataggttactggaaatagccatttccatttctgccttctgtttttccatcaagtagccttccctcccaccccctcaatccaacaaatgtgtcattagaaactgtcaaaggaaagaagtgacataagcatcctgcctcagcaggttgagagaattacaagtgcagccatttaactgttctgcacctgcctgtccagttggtggactagtcagctttttacttcctcctcctcttttggggcctttccctgcctgtgggaacttgcatgagagagacagaccccaaagaagagagaaagccaagggcacacgctgtatggcagctcagagtgctttgactttattgtagtgagttgggtctcagctacagtaaagttcttacattaactgaatgcaatttgcccaaaattccccccaattcacatgttccagagaaggctgcaccctacaattttccttcaatccccacaacaaaccttgaaagacaaattctgatcctaaaagttgcacgtaatttgaacttctctgaaagaacatggtagagtttgccttctgctgtatgtccctgagcaggcaaggatacaacctacaaagaacaatttgtggtttggtggctgtgcctctgagccaaattacccaaggcagtccactcaagagtgatggagactgtctcagccacccaacgccagcgggggcccagactacagaacacgattttacttcaaagccaaggtaccagctgccagccaaggtaccagctgccagcacaaggtacttgtgtcagtcaaggtcacaagagggacacagacaagtgcacacacccgttagcatgtatgccaggtccccaccaactctactgtgaaacccctttgcattgcaac

SEQ ID NO: 1881208 - DNA, 4001 bp, Homo sapiens
attttttaagttgcagaaacaaaagtcttaattccatcttaactcctgtgtttgaatctggacactggggcctttgataccctcctttgcccacattagggagaggcttaattgaaggctgggccctacttcctggcttcatctttgcctctgctccccgctcttaccccagatctttttggaccatcaccaggtctcttctagactttttcttctcccgagtaacttgaaattgcctggtcccaggcaccttgacttggagaagggatgaatgtatgagatgaaacttcaggccgggcgcggtggctcacacttgtaatcccagcactttgggaggccgaggcgggcagatcacgaggtcaggagatcgagaccatcctggctaacacggtgaaactctgtctctactaaaaatacaaaaaattagccgggcgtggtggcgggcgcctgtagtcccagctactcgggaggctgaggcaggagaatggcatgaacccgggaggcggagcttgcagtgagccgagatcacgccactgcactccagcctgggcgacagagcgagactccgtatcaaaaaaaaaaaaaaaaaaaaaaaaaaaaacttcaaagttctgccatcttggctgcttcataggaaggggataaagaggccatttaattggttcaactccacaagaatttttttcctttcaactccacaaatatttatattggtactcataagcagtgcaggccttgccgggtgtggtggcacgcctgtaatctcagcactttgggaggctgaggtgggtggatcgcttgaggtctggtgaaaccccgtctccactaaaaatacaaacataagccgagcgtggtggcgcgcgcctatgatcccagctacttgggaggccgaggcaggagaattgcttgaatcctggaggcagaggttgcagtgagctgagatcttgccatggcactccagcctgggcaacagagcaagactccatcttaaaaaaaaaaaaatgctgggcacagtggctcacgcctgaatcccagcactttgagaggctgaggcggatgaatcacctgaggtcaggagtttgagaccagcctggccaacatggtgaaaccccgtctctactaaaaatagaaaaattagctgggtgccgttgcggccgcctgtaatcccagctgctccagaggctgagacaggagaatcgcttgaacccaggagaaggaggttgcgatgagccgaaattgcgcccttgcacaccagcctgggcgacaagagcaagactctgtctttaaaacaaacaggccaggcgcggtggttcactcctgtaatcccagcactttggaagactgaggcgggcagatcacctgaggtcaggagttcgagaccagcctggccaacatggtgaaacccccatctctactaaaaatacaaaaattagctgggcgtggtggcaggcgcctgtaatcccagctactcaggaggctgaggcaggagaatcacttgaacctgggaggcagaggttgcagtgagccgtgattgcgccattgcactccagcctgggggacaaagcgagacttcatctcaaaaaaataaataaaaaataaaaataaataaataagtaaacaaatgcaggctgggtgaggtggctcatgcccgtattcccagcactttgggaggctgaggcgagtggatcgcctgagcccaggagttcgagaccagcctgggcaacatggctaaaccctgtctctaaaaaagaaaaaaatttaatacagtctgcgatgctcgtgagtcattatggtaaagctgttagtcaatttctccactgatgtagcagtttccaattgtcctttaatcaaagcataaatgacaaggtcaccagtaagtttttgtctttgagattatctaaaactgagtttcccttcaatattttcttgaaagagaatctaattccccaccttttcttcccccccacctgggggctgcaggaaagatatggagagagatttgaaggctgactcaaacatgccactcaacaattctagccaagaggtcacaaaggatctgcttgatatgattggtgagtacagtgggcaagtccatcctgtccttgggaagataggtccttcacatgggtctgagtcagcaaatatctcagatataagaaatgctctcggccaggcacggtggttcatgcctgtaatcccagcactttggaaggccgaggagatcgaatcatgaggtcaggagttcaagaccagtctaaccaatatggtgaaaccccgtctctactaaaaatacaaaaattagccaggcgtggtggtgcacgccggtaatcccagctactcgggaggccgaggcaggagaattgcttgaacccgggaggcagaggttgcagtgagctgagatcttgccactgcactccagcctgggggacagagtgagactcccatctcaaaaaaaaacaaaaaacactctcttctagcttgggtaccatacatagcgagatctgtctcttaaaattttttttaattagctgggcacagtggtgtgtgcccataatcccagctactagggaggctgaggtggaaggatcacttgagcccaggagttcaagctatgatcataccactgtactgcagcctgggcaactgtgcgagacctcatctcaaaagaaaaaacaccaccaccactttttggggggagagacagagtctcatcatattacccaggctggagtgcagtggcacgatcacagttcactgcagcctcaacctccctgggctcaggtgatcctcccagctcagcctcccaagtagccatagtactacactagtactacaggtgcacgccaccatgattggctaatatttgtattagggttttgctgtgttgtccaggctggtctcgaactcctagtctcaagtaatccacttactgtggcctcccagtgctgggatcaggcaagagccaccactcccggccaaaacactcttatctttttatttggtagatgttttgctcagactctgcattgattagggaactgaatgttaacaaaacctgtcccttccctcatacaactgattatcttgtgaggtgatagatacatcaatcaggtcatgtcatcaatgtttagatgcactgagtccctgaaggcaagggatggtggccactaggacatggtgattgagcttaaatttttaggaaacaggacataggcaaaaaggagagagtaatttagctggggtcagtaattaaagattaggagaaaagggctgggcacagtggctcacacctttagtcctagcactttgggaggctgaggcgggcagatcacttgaggtcaggagttcgagatcagcctgggcaacatggcaaaaccccttctctactaaaaacacaaaaaattagccaggcgtggtggtgcacacctgtaatcccagccacttggatggctgaggcatgagaattgtttcaacccaggaggcagagggcagaggttgcagtgagccgagatcgcaccactgccctccagcctgggtgacagaatgagactctgtctcaaaaaaaaaaaaaaaaaaaaaaaaaaaagattaggagaaaaattagaagtcaaaagctttcctataattctaccacccagagataaccactgttaatatagatatagtatagcatacatcctgtcagactttttttctacatacaaatctgaatgtcctgtatgtgaactacatgtgctctattttttattttgtctttttattattagtagtagtattttttataaatagagacaaggtcttgctttgttacccaggctggtcttgaactcctggtctcaagtgatcctcctgcctcagcctcccaaagtgctgggtttacaggcaaaccatgccaatgtgccctgtttttaaaaaactcatactacagctcctagtaaagggatgtataaccgtgggtgctgcctgaagctgttgtttctgaaggatctccaggttatgag

SEQ ID NO: 1881209 - DNA, 4001 bp, Homo sapiens
aagtccttttcagcgaatccaggctagctcttaagagagctgcagagttctggctccagctgtgctccttcctcttcccttcctttaaagaatacgaattattcttagatatgggtcccaaaaatttagacaatgattcacaggagagctggggaggcagagagagtaaaacacaagccacctgcttaggtttcaaggtccaatcattgacaacacacctaatcaggttaaactggcactaaaatgctgcctgtagctgcctttgatatctgacagatgttgcataactatattgggaaaggccaaattgtcatagtactcattggagaaaaggagacagtaaaaatttttaggtaaagctaacctacattcacctaataaatgctgaataaataccagcaatgctagagaagccatttgtatggatccatggtgtttggttcagctgggttgagatctccatgtttccatcattcctcaggcactataagcctgtgacaaaatggtgtccttgggtcacacatgttttggtcccagactcggtgtccaatatgtcagcccatcaaggcagatggtgagcaggacaatgtttcagaactttggaaaatataccacttaagagtccagccagggaaatgcctgaaattgaaaaataatgtaatagaatatttgatttgccaccatagaccttaactgggaagattgccacattgaaatgagtggacagcttggctgacttcgatccttcagctctgcttagtaactgcacatcagtgggttgggtcctagactttcaatgggtccccaaagtccctcccctaaacattacacatctacaagcacatacccccaataatatttggggctatatccataaagttgcaacattagcctaagagcaaaggtctgagccagtggtcactgggtgtttcctcggagggactgtaggtggccagcagaatggatggcaaggcaaatgaaatgtcatttccatttcattcagtttgctttttctccatgctaccagctactgacttggcctcttggaaacaaagttgtttttctgtgattcaccagaaactttctggacctgaatacctcacttctccaaggttagcctctttgagccattaagaagtgttgtcccttgtccattcggggttgaatgtctgttatttccctccccactgccccccgccaatattccttgaacttctcagagaatatgtctttggcatgcagcctgtggaaggctgtttattttaaacacctgcaattctctcttcctcacctcactccccttccaaacaaggaatcactcttagcaaatctaaagtgctagagagctgatggttctggaagcagccttcagctaataacagatagggaaggtagtagaaaatcctctagcttctctggccctcaagcaggaccactctctgaagtgtggtccacacagtcttcctgtagttccccggtgaggtcaagctccaggtttctaaggcaatatctgacttaataacacatttttaaaatttgctttgttccttttctatctcacttgcctatgcccctcttggtatttcctgagaccttccaaataaacgatttacactagaatcctcctctcagcatctgccttgggagagtcagtctccatgcagtagggaggctgtgtaaattacatgctgagattatgccttgcattatcaggaagcacacaaaaagcaaaactacacaaagacttggtggatgaaagaccttctcagaaatgagaagactggcatttgataacatgctaagatggccaacatctttgagtggttactctccatttcccacagtgaattataagtcccagataggacacggtccatgacagtttttgtttaccaatgtgtccccataaggtagacacacagtaatattgagcagatctcttataacacaatcactagttgaatgctttctatgcattaactgattaatttgtgcagaaaagatccagccctttggataacacaactccgttggttaatggtgccctttctatgggaggaggattcctgatactgctagtgctgtcctgatgaccagcagggtcacagagatgggaactgactctgccctgggagttggcaaaggagacttttcatctaggtcttgactattcctaggagtctaacggttaaaaaaaggaaatggagtggagggtgacaattatttatttattcaacaattgtgtaatttagtaccagctttgtgacaggaattctgctaggcataaagaagaagtagtgttcagggaccctgccttctcagaattttgattgaagcactattcactttgcattctttgtggagttgtaccacgtgttcctagtggtagacagcaaagaagtaaaaaaaaaatttaaaaagattatgataaatacgaagtaatacagcagtgattcttaaattttaattggcatctagatcatgtgaggatcttatttaaatgtatattctgattcagtaggcctgggatagggcctgagattctgcatttctaatcagggcgcaggtggatacagatgctgctggtccttggagcgtattttgaatagtatggtgataggctgtagttctcaacctggtctgtgcataacagaacctgaggaactttaaaaatgactgatgcctgactttactccagcaatatttgtctaatttgaatgggagaatcctggcatgatagttaacattaggtgtcaacctgactgggttgagggatgcctagatggctggtgaagtattgtttctgggtgcgtctgtgaggttgttcctggagcaggttgacattagaattggtggagcgggagaggaagactcaccgcatgtgggtgggtgccattctcttgggctgccagcatacctaggtcaaaataggcaggaaaatgtgggataagcttgctttctgagtcttctggctctttttcctttccggtactggatccttgcttctgttccccctgccattcgatatcagactccaagttcttcagccttcggactctgggacttgcaccagtgtccaccccaagggctttcaggccttcacccgcagactaagggctgcattctcggcttccttggttttgaggctttcagacttggactgagccactatcagcttctctttccccaggttgcagaccacctattgtaggacttcgccttgtaatcatgggagccaattgttcctaataaactcccttttatgtatacatatacgctattggttctctctctctggagaaccctaatatacctgggtattggcaatttttttaaaactgctttattgggtgtaaattacatatcgtaaatccatctatcttattatacattttatgtgtacaagtaaataatttttagtgtgtctgtaattttgccaccattaccacaatccagatttagaacacttttcattatcctcaaaacatctactgaactcatatgcaattaatctcagttctcaccatcagccccaggcaaccaccaatctactttatttctccacagatttgccttttctggacatttcatataaatgaaattatataatatgtggtcttcatgcctgatttttttattagcatgatgtttttgaggttcatccttgttgtaacatgtattattacttcattcttccttattccttcattgattgtgtggtataagtagattacattttgtctaaccattcaccagttggctgacatcagagttgtctccactttttggtaaataatgtttctttgactgttcacatacaaatctttacatgggaatgtatttttatctgtgttggttagagacttaagagtgggttttctgggtcatatggcaactccatgggtagctctttaagaaactgccaaactgtttttttaagtggcattattttacattcccatcagtgatgtatgaagggtttctccacatttccaccaaaa

SEQ ID NO: 1881210 - DNA, 4001 bp, Homo sapiens
tctgtttgagagtggagtttgtagttaccattggaagatgagaaatgtacaggaaacttcatttttatataaaactgtgtgacatctgaaactccaaaacacaaaataaaacccttcaaaaatggtgaattatcaagcagcgattggtgagtggagaggggcacggctgtggatctcagaaggaaccagaaatacacttttcgaagatgacgggcacagcctgagttgcagaaccaatccttcagatcaccagtgtggttttttgactggagcttctgtgcctattatggttctgggaagcaggggatgtcatgtttaagtaggaatttgccaggatctgtttttgtttaacatggggaataagagattttctgcttggaaaacctccagacacatttaaccattctcagggaggagtgaaaggttaacatataggcaaaatcctgtccacaagctgcttccatgcttaggagacagaaaaatggccatctcctatacctaccagttgctgacccaggaaaaactggctatcttcaaagaagaataaagaaaaaatagcagctattaaaacagccactattgttatatgaataaataaaaaaaaagagagaaaacatatgacaataatgagcacttattaaaacctatgagtaggaagtagatgcatattattaccaaataattctttgtgaaataaaaaagaacaggaaaacttcaaaatgcaaagaaaaactcaattgaacattagaaaatatactgatttattacattatgtcagtaggaacagaaaccatatgcatataaaaccaatacccatatttatttttgtcaaatcttactccactgagataggaagtaattttttttacctttacacaagcattctgtaagacatgctcatgtgtggttcatggataccttttttctcatttcagctgtccagatcattgatgaccttattgaaaggagccatgaaagtcatgatagatttttctggcaaattgtaatcaccaacagcaacacatcaactcaggagagagttgaattaggaaaaacatttaatttgaactcaaaccatgttttaaatctgattataaataatggaaacagttcaggaatgaagcctgggcagtttaatgattgccagaacatgcttttccctattaagcctggggagacacagtctggagagaaacctcatgtctgtgatataaccaggagatcccacagacatcatgaacatcttactcagcatcacaagattcaaactctgctgcagacttttcaatgtaatgaacaagggaaaaccttcaacacggaggcaatgttctttatacataagagggttcatatagtacagacctttggtaaatataatgaatatgagaaagcctgtaataactcagctgttattgtccaagtgataactcaggtaggacagccaacttgctgtagaaagtctgacttcactaaacatcagcagacacacacaggagagaaaccctatgaatgtgttgaatgtgagaaaccctccattagcaaatcagaccttatgctacagtgcaagatgcctactgaggaaaaaccttatgcctgtaactggtgtgaaaaattgttcagctataagtccagcctcattatccatcagagaattcacacaggggaaaagccctatggatgcaatgaatgtggtaaaacctttcgccgtaagtcattcctcactttacatgagagaactcacacaggggataaaccctacaaatgtattgaatgtggaaaaacttttcactgtaagtcacttctcactttacatcacagaactcactcaggggaaaagccctatcagtgtagtgaatgtggaaaaacctttagccagaagtcatacctcacaatacatcatagaactcacacaggggaaaagccctatgcatgtgaccattgtgaagaagcatttagccataagtcaaggcttactgtccatcagagaacacacacaggggaaaaaccgtatgaatgtaatgagtgtggaaaaccctttatcaataagtcaaacctcaggttacatcagagaactcacacaggggaaaaaccctatgaatgcaatgaatgtgggaaaacgtttcaccgtaagtcattcctcactatccatcaatggactcacacaggggaaaaaccctacgaatgcaatgaatgtgggaaaacctttcgctgtaagtcattcctcactgtccatcagagaactcatgctggggaaaaaccatacgcatgtaacgaatgtggaaaaacatatagccacaagtcataccttacagtacatcacagaactcacacaggggaaaaaccctatgaatgtaatgaatgtggaaaatcctttcactgtaagtcattcctaactatacatcagagaactcatgctggcaaaaaaccctatgaatgtaatgaatgtgagaaaacctttatcaataagttaaaccttgggatacacaagagaactcacacaggggaaagaccctatgaatgtaatgaatgtggaaaaacctttcgtcagaagtcaaatctcagcacccatcagggaactcacacaggagagaaaccttacgtatgtaatgaatgtggaaaaacctttcatcgcaagtcattcctcaccatacaccagagaactcacacggggaaaaaccgtatggatgtaatgaatgtggaaaaactttttgtcagaaatcataccttattatacatcagagaactcacaccggggaaaagccctatgaatgtaatgaatgtggaaaatcctttcatcagaaggcaaatcttcagaagcatcaaggtattcacacgggggagaaaccctatgaatgtagcaaatgtggaaaaaccttgtcagaagtcagtcctcactgtacatcatagaacccataccggagaaaaaccttatgaatgtaatgagtgtgggaaaaccttttgtcacaagtcaaacctcagtacgcatcaggggactcactcaggagagaaaccctatgaatgtgatgaatgtaggaaaactttttacgataagacagttctcaccatacatcagagaactcacacaggtgagaagccatttgaatgtaaagaatgtaggaaaaccttctcccagaagtcaaaactctttgtacatcacagaactcacacaggggaaaaaccctttagatgtaatgaatgtaggaaaactttctcccagaagtcaggcctcagtatacatcagagaacacacacaggagaaaaaccttatgaatgtaaggaatgtgggaaaaccttttgccagaagtcacacctcagcaggcatcaacaaacccatataggagagaaatctgacgtagctgaggcaggctatgtgttccctcaaaatcactcttttttcccttgaacacacaacctacacctctctggctactattacagatttctccatgctcagtctaggagaatatggacacaaatggtgaccattacctcctggcctaccaacaagaaggtcttaaccatgctgtaacagaagtcctatcatgcaggctttgttgttcccatttttacagcacactttgcactttaatgtcacagatatggctgttttcctagaagctcatataccaacctctgccagcttcaaacatttcttctgcaacttcctcacctctcttctcctccatagaattgaagagagttagggcctttctcaggattaggctttgtctcaagggaatgttggggctggtttgatcttctatgtggaccactcagactttctctgtgtcagtaaaaagcctgttttgttttttaaaaatcattcatgtgttctctggagtagcacctataacatccttcaagaactttttctttgcattcacaacttgagtagctgatgcaagaagcttagctttggcctgtcttagcttccaacatgctttcttcactaagctcgatgatttctaccttttgatttgaagtgacaggtgtgcacactt

SEQ ID NO: 1881211 - DNA, 4001 bp, Homo sapiens
tcctccttcttcctctcacataccctctactgcaagtccacatggaccactaacttagtatctgacattttctctcctggccctagtcccttcatactttcattctacataatcggagtaatatacaacattcaaagaatttcaacaataagagcatggcaagttattttgcaatgtaccctggcacgcaaacataagtgattaaaatgttttgctgctgtcagtagcaccctttttataagaagcagttgtcaatatagcacaaattgctattcaactcacccaaacctcacccaaacaaagagaaaacgaactaagtaacaaaaatgcctatatgaaagctcccttgaggtatttaaaacagggacgggggaacagaccgtcaaaagtccagaaaaatgtaacactttttacttttctccgaaatacctaggttttctgtataggaaatgaccctggtctgaactctacgctgagcaagtgaaatgccggcgaattatcgatctgtcgtgggaatccagtctcccttcctccttccgctgcagttacttctacttcccagcaagaactgagcgtcgaaatcctttaacttcaggactaagcacttcagtcacctctccaggacatccattcagccctcaccccgttacacctgcgatgctgacgtagacaagcacttcttttaataatctcaccctgacagagggacgacctacagtattaactgctgtgaaagtcatccccaatgcgctctcaattgagcgcattgaatgaggctttccaaattgaagtgcaagttgctgtagaaatcccaatgcattcttctttgagattaaagccccagaaagagctgcatttagaatacacacacacacacaccccttttcccagggttttcttgaactacatttggagaaaatgctgccccacacagacacacttgcattatcgccatccccaccatttcaggttcggctgccccggaagagtctggttaaaaagaaaagagaggaagcgggggctgtatgttacgttcgcggttttgtccccccaaagtttcaagtacacattacgctctggcagtcaggacttccagagacgtacagagaaagaaagaaagaaaaggcgcggggagcgggctggaggattctgcaagcacaggcccctatggagcgcccgttcgggggacgggatttccctccctttcccctcccccgcccgttcggaattccgcccccgccgcgggcccggaacaatgcagccgcccgtcccggggaccagccacttaccacccaggtcagtgccccgttgccgccgcccacgccggctcccgcgccgcagccacccgacttggccatggcgagtgcctccagctcacaggccctgaggccgcagccgccgctcccgcctccctgcgggccgctgggccccgccgctccgcacccaccgctccactcgccgcactcctagccgcgccgacccccgcgccccatcgcgaagatccggagcggacgtccagccgagcccgctgaggaggccgcgccgccggctgccctcaaactcgaggcgcggcgtccgcgtcgcccgggcctagcgcggcggctgaggagaaagcagggagcgaccggcggcggccgagcggcggcgttgccttctcgcccgcccgcgggcgccgctgcaggccgggctgaagcccgggcgtgcgagccgcgagggcggccggggagcccgaggcgctcggacgtggcgaggacgcagaggtgccttgtccttctcacactccgcgaaggccagccactcgagtcgccagagtagtcgtcccggtcgccgccgctgcttcaaaggcagccttagcctcgctgcagccccgatttcctcacacacacacaccgagagggacaataaacagagccgccgccgccgccgccacggtcacctccctcttgtccggcataacaccgcacacacacatttgcacaccggggagagagggagggcgcggcggccgcccccgctgtcagtcagcgccatgctgtccaatccgggccttgtcgccacagcctctcggccaatcccaaaattccaagccccctggaggggcgggacccgaggggggaaacgtcattgcgggtagcaaccgaaaggaagacttggggtttttgtttgtgtgtgtgtctgtgggttttccatttgaagggagagcaggggctgcttcaagggtcaattgagggcggcaaagggaaagggtcgaattggcctcgggtcgattgtaatcctccaagcgtgctgtttactctgagacctaaccgggaatccgaagcgtttgcctggggcctctaaggatgaggatgggggcggggtggggatgggggtggcaggaagaagccgggggccgtcccaaagggaaattattttaaaagagcggttgtaaaccgcaggcaagacgttgtagaccactggtgcaaggaggccccgtgacccggcctccccaagggcctaagtggacgctgctgtcgaaaaaaatcatctcagaccttctccatctccttcttccgtctcctcccctcaccccaaaagagcatatggtcagtttcaagaaaactacatatgaaaagcttaaatgataagggacacacagagaatgttctagggaaagaatgcagggtgggttgagtgttctatttctactctttgttgacctttcttctctgaacaatgcagagatgtcactgtcacttttctcatctgtccagaactgtgccccctgcctctaagagggcatgcttaatttttaaaactgttttcagtggaattttcaaatgcacagtaaggaataatttcattcacattaaagctttctaagaatgaaaattaccaatacagcaacatcacagtctttggcagatggaagatggctttacttcttcctgtttttcagtgtaattccactcaagtatttattgggcgcacactctgccacgctgtgccaggctctgcgatgggttcaaagtaaaaacaaggcccctgatttcaaaccatttataacctggcttgtgagacagactaaaagggagccaacgatcaccaaaatgagtacttgaaggcatgaagtgccaccaaagagttgtgatgaaagctttttataaagatgaaaacagtattactgttttttgaagaggtgtttttgtgaacttccaactgtgcatttcctctcaagggaaaacaaaaatgtctcaggtcacatctttaaactgcattctgagtctagaggtggagaactctgaaacatggaaataatttaaacatagtttttttaattagctctctgatggccatgtaactttgccatactagggacttcagaacagtgaagcctttctttaccttgaacttggggtgcaaacttttctgaacctgaccaagtatccatagccttgttatttaacttccctgagcctcagtttagtgcttgttaaaatgatcttgtgttcttactgtgagtttgcatctccaagtacacatgtattttgtttgaaaaggggtaattttaaaggcaatgagttttttttatgaagatgtactaggtagaagctaagctataaaatacatagctgtctccttttttaaacttaagttgtcaaagctctttatcttccgtttttgttgttgtttttagagacagagtcttgctctgtcacccaggctggagtacagtggcatgatctcggctcactgcaccctccacctcccaggttcaagcaattctcctgcctcagcctcccaggtagctgggattacaggcaccggccaccatgcctggctaattttttttacttttactagagacggggttttcaccatgttggccaccctggtctcgaactcctgacctcaagtgagccgcccatcttggcctcccaaaatgctgggattacaggcatgagccaccgcacccagcctaggttcagattttgaaatgaataaaacaatatattcaaaac

SEQ ID NO: 1881212 - DNA, 4001 bp, Homo sapiens
tggcctgggcgacaaagcgagactctgtcttaaaaaaaaaaaaaaattgtacatagcaactttttcttttctttttttttttttttgagacagagtcttgctgtgtcacccaagctggagtgcagtggcgcgatcttggctcactgcaagctccgcctcccaggttcacgccattctcctgcctcagcctcccgagtagctgggaccacaggcacccgccactacacccggctaatttttttgtattttttagtagagacaggggtctcaccatgttagccgggatgatcttgatctcctgaccttgtgatccacccgcctcggcctccgaaagtgctgggattacaggcgtgagccaccgcgcccagcccatagcaactttttcacaacagtcaaaaggcaagaacatccaaagtgttcatcaacatgtccatgaaactgtggtacatccattcaatggaatgctgcttgtcaataaagaggaatgaactaaccatacttgcagaaacacaaataagcctcataaacattgcactaagtgaaataagccagatgcaaaggtcacatatgggatgattctatttatacaaaatgtccagaaaggacaaaactatagagatagaaagtaggggctgggcgcagtggctcacacctataatcccagcactttgggaagcccaggtgggcagatcacctgaggtcgggagttcaagatcagcctgaccaacatggagaaaccctgtctccactaaaaatacaaaattagccggacgtggtggtgcatgcctgtaatcccagctactcgggaggctgaggcaggagaattgcttgaactcgggaggtggaggttgcagtgagccgagatcgcgccattggactccagcctgggcaataagagtgaaactctgtctcaaaaaaaaaaaaaaaaaaattagcctggtgttgtggcacaagcctgtagtcccagctactcaggaggctgaagcaggagaatcacttaaacccaggaggcagaggttgcgatgagtcaagatcgagccactgcactccagtctgggcgacagagcgagactctacctaaaaaaaaacaaaaaaacaaaaagtaggtcagtggttaccaggggcctgggttaggaagaggagactaactgcaaaggggagtgagggagcatatttgggacaatgaaaatgctctgtgtctggattgcagtggtggttacaccatttagaacatttgtcaatgatcatagaggtaggtaatttacatctcaatttaaaaagttgcgaggtagggaggtaagtgttggtaatgtgtggggatgtcttcccaggaaagagcattgcttcctgtactcactgtcttccacggccaagcctgagctcacatgagtggggtcttgatccccctgaagatgacagaaaggtatgaaggtgaggaagaggagtagccctgcagcacctacctcgctgctcactcccggaggctctgagtgtacacaagggagggaggcccaggctgcactcaggagaccaccaacccagcctgagacaaggggcaagatccttcccatctatgcattcctgtttcctcctctgtgaaatgaacacgggggctgcattggatgaaatggaaacttcttacagtgtgttctatggaacagtggtctgcaaaattctctgtgaaaagggttcctcatgcaaggaagtatgtgaaacctccctcctgctgtttcttgaagactcacaatacaccacttgctaaaggcactgagtaatgccacagaaaaggaacctgtttcactctgattaaccctgatttcttcaaatctgttcccattttcacagaacatacaaacatcccaggaggcctggggcatgccttggagtctggatcttaggctggaaggattggaatgggcctagccccaactccttctggggcaagcattgctcagggctagaaagggataggttctaaaacccacgcctccaacccccaccatgccatccctttatccttccccatactgcactttgcttaatatcaaccagccatcagcaggatggtgcaagaggctctaactcaaccaggacaggaaggaatccaggaacaattcacctaccagaggcccaaggattgagaaaggccgggactgagcaaagacagcacaggtccagcttgcgcaggtctccagccccctcccagcccccagcacagggtgtttcctctcctctgagtctgttctgtgcaggggcacagcacccaggtataagctgtaaggagggctcagatgctgcctaggaactctgccttccagaaggagggccccaggaaacctcacaagaaaacttagccctttgaaatgaaatcctcacccgattccagaacctattatggctccctaccaccccagtggcctccgttcactgcccactggctctgacctaactcatcatctccatctaccggggaatcaccttccacagaacgttaaggttggacaccactcaaagcagtgttcagggccgagcacggtggctcacgcctataatcccagcactttgggaggccgaggtgggcggatcacgaggtcaggagatcgagaccatcctggctaacacggcgaaaccctggctctactaaaattacaaaaaattagccgggtgtggtggcgggcgcctgtagtcccagctactcgggagactgaggcaggagaatggcgtgaacccgggaggcggagcttacggtgagccgagatcgcgccactgcactccagcctgggcgacagagcgagactccgtctcaaaaaaaaaaaaaaaaaagcagtgttcatgtgtgtagcgtcatacactcagtagtgtgtgtcagtaaagaggaatgaactaaccatagatgcagaaacacaattagcacaggggtggggtgagggggacagtgaggattagcaacacctcgaatttctttcttttttttttttaaatattgagacggagtctcgctgttacgaaggctggtccggaactcctaggctcaagtgatcctcctgcttcagcctcctaaagtgctgggattagaggcataagccaccacacctggccaaccccaggaatttctccggtacattttatttcaaccactatctctactacttactctgttttctcttgctgatgcctctgtgtgggagacctgccaggggccattactcccattttcttttcttttcttttttttctgagatggagtctcactctgtcgcccaggctggagtgcagtggcgcgatctccgctcactgcaagctccgcctcccgggttcacgccattctcctgcttcagcctcccgagtagctgggactacaggcacctgccaccacgcccagctcatttttttgtatttttagtagagacggggtttcaccgtgttagccaggacggtctcgatctcctgacctcgtgatccgcctgtctcggcctccctaagtgctgggattacaggcgtgagccaccgcgcccggccattactcccattttctagaggggtacaactgagaccaagagtcgtcaagaggctgccacaggccaggctggctcacacctgtaatcccagcactttgggaaggacaggggggtggatcacttaagctcaggaggttgaggcttcagtgagccaagagattgcaccactgcactccagcctcaggtgacagagtgagatcctgtctcaaaaaaaaaaaaaaaaagagtctgcaacataagataaagggccagctgagaccaacaacacaggtgtaaggctcctggccctgagcatgtcccaccttgcagaaggctctggaaacatcccagaaagaggggtgtatttggtttctcacacgtgtgctaagctttattcttttctaccagcaactctcaattcgttcccaaataatggtctcctgggaatatagtgccctccggtggccttcctgggtgctacatcaatgccctccgatgggaaga

SEQ ID NO: 1881213 - DNA, 4001 bp, Homo sapiens
ttcctttttatggctgcgtagtaatccgtggtgtatatgtaccatattttctttatccagtctctcattgatgaccatttaggttgatttcatgtctttactattgtgaatagtgctgtattgaacatacatgtgcatgtgtctttatattagaatgatttatattccttttgtggttaagctcctattatctggacatgttcacatatagtatttgatttagattatatctccacctttttattttctttttaggttcatagagaccaatgagaataaacagctgagttgtacgtttctgaaattttttaaaatcaaatttaattttttctcatgagaatcttatattcccaagaagagaaactcttcctattaatctttaagtatatgttccccaaatgtgcagacgtgagaaagaccttctcaaataaagtattcaaaggaaaatttttgtgtactttatggtaagctgctgctcattgttagatttatgcatcagatttttccaatttgaagtaaaataattctaaaaacatggtaaacctgaacatattacccaaaggaaaaaagatagatgcaaacgtggaaagaaactacttgatgtaagtggaaaattttactttcttattaatattttctgtttttaggcattctatagtttcaaaatcttttacatatccatgccgatttgtttctttttttttttttttttttttttggggtcatcaggttttactgtcaactacaaaccttacccagccaaaaaccttcgtattttagatggtaggaaagacattcctcatttaggcaagtagggttctcattcaacccttttctgctgtttttagaaccttctgctaccatatccaccacttccaccaccagatccataaccaccaccatagggaccgcccgagcttcttccaccaaaactgccccctttcatgggtccataatttgattgctgttgtccactataatttccaaaatcattatagttcccaccaccaccatagttaccaccgccaaaatttcctccttcattgtaaccatcatatcctccacctccaccatatccaccaccttggtttccatatcctggtccaccatcaccatagccccctctactactataaccaggaccaccgccatagttgccaccatcacctccaaatccattatatccaccatcacctcctccataactacctctgctgccaccacctccaccacctccaaagttccctccgcgacccataaaattgccagatccacctccacgacctctccgtgatccagcagactgcatctcttgtttagaaagggtctttttcacttcacaattatgcccattaatagtgtggtatttctgaacaacaattttatcaactgtatcatgatcatcaaaagttacaaaagcaaatcctctcttttttccactctgcctgtcttccataacttctatggtttcaatcttgccatacttttcaaagtagtctctcaaattatattcttctgtatcttctttaataccaccaacaaaaattttcttcactgttagatgggcaccaggctttacagaatcctctctagaaacagctctctttggttccactacacgcccatcaaccttgtgtggtcgagcacacattgctgcatccacctcttcaacacaagaataagtcacaaaaccaaagcccctggaacgttttgtttgggggtctctcattaccacacaatctgtgagtgtgccccatttctcaaaatgttctcgtaaactatcatctgtagtttcaaagctcagaccaccaataaacagttttctcaactgctctggttcctttggatcatggccctcctccccccggcggcgacggcgacggccggagtcgggctgggggcgactgggcggcggttttacctccattttgagaccggactcgcctcttccaactcgagttcaatatgggaccgagaggaagaggcggggccagtcgtcacgtgacgcgttttccccgatttgtttcttatatcagtctaaagtagataagaggggtaatgattttcattttagaaccaaggccctaagaaaataaatgacttggcaaggttgtacacattaaatgctgcatcaagggcttaaacacaggccttttatactagaagtgtaagatatcatccaaaatatctgaggagtcttgtcaaaatatgtaaccagtcacttccctgatattttgagtcagattcttcccttgattcccaaatgttcctgacgtgcttttcaacagccttatcacagccctctcaagtttaacaatctttatttcaatagaatgaggaagtctcttcttcatgacacttttgatgcaagacacttaaaacccacctcaaattggcttcagtagaaatgagaagggggcagggatctattttctcacataaatgaaaactctaggaatagaaaatcttcagggatagctggatctaggatatttaatgatgtcctcaagaccaggtccctccccacagtgtatgactcagttcttctctacagtaggactaggatctcttttcctggcagcctccaggtgctccaggcttcatcaaatcttcatgtcaaggagagacatctccttcctcaacagtgttccagtaaaggttctgggtttgccttggattaactctgagttagtggccttgggagaggttgcagtgctctgtcagctgaggctttcttcctaagcttgccatcagctagaagctccagcccacaacacacatcaggataaagtaaaggctgactactgcagaggaaaattcatctaatgttgactacattaagagctgcaaaggacatttagctcaattttcttttaactcagtatcccctgagagctaaataatcttagcttgttttatcagtaagagaagactttaggagttttatgatgtggcagtgtcagcgggcttttgactgccagtggtccatgtggaagtgggcaaacggaacatttatacattaactgacttttcaattcatttatctccatttaaacaggtgcaggtgacggaagagctggaacttggaaagtgtggaacattccaaaagctctaatgctttgaacttagactatgaggggctattaaagtcagtcattgtaataaatttattatattgtggtacttgtatctgtccaatgccagacagagttcagatttatggccaatcatacattatgtatcagctataaaaatagttttatgctattgcactaaatttcaagaaaataaaaattctgacaaagaggatactacactaaaaaaatctccagcttatgatcaacaccttggagttgcttcagcaatcaactatgtatttatgtttagtgtctctcaaaagcacattgagacattaatagtagttttcagaagcaaaagtggtgtctagaaggaagaaagcttttagctgagaagaaattgaatcaatttttcattttaaagtcataaaggttttagtgttattaagccctagaaccaccctaacaaaagaacattagtcctaagtaaatcgtgtcttgttttggatggtacaaagaagtgcaagagtcagaaatatatttttaaaagttaacaaaatctgttaaataataatgacttcagttttgaaatattagaaatttcctccatccacaaaaagacataaaaactgagaacaaaatgaaattaaaatagtgcttgtcacctcaaattcattgctgagggagtcatcacattgaaaagtaaaaatcaggatttagcattcagctaaaatgcttattcagttttctataatctgtaatagtttattgagctttctttatatttcattaccttgatatttttgaatagtgtaagacattcttttggtagactgtccctcaatttgggtttttcagacattctttatgatttgatttacatttttggtagcaatacctctatattagttcattctcatgcag

SEQ ID NO: 1881214 - DNA, 4001 bp, Homo sapiens; identical to SEQ ID NO: 1881213

SEQ ID NO: 1881215 - DNA, 4001 bp, Homo sapiens
cagccacaaaagctgaaaatgccaaacattcaccaccctgctttctttataattagggcctgggcataagacataggctctgctaatcagacttggtagtactaaatttttactagcaagaagatggcaaaaaaagtagagaccaaagaaatgttctctggtggctctaccagctcctgcaaactgaagccctgctcagctttgttaggggttcctgcagctgatattcccatttggggtaatagtggctgtgtttttccaccagaccactttttcctgtccgtgtgaatctgcccccaaattttctacccacttggagcatctgtgaacgtcccaatatgctttttttttttttttttttgagatggagttttgctcttgtcgcccaggctaaagtgccatggcatgatctcggctcactgcaatctctgcctcccgggttcaagtgattctcctgcctcagcgtctcaagtagctgagattacagacactccacaccatgcccagctaattattgtatttttagtagagactgggtttcaccatgttggccaggctggtcttgaactcctgtcctcagatgatccacccaccttggcatccgaaagtgctgggattacaggctccaatatgcttttaataaatcccttttctgtaacttgtgacattgaactctgattaataaacttgggtttggaagagtgatcttagtactttaaaaaatgttaaactattatttatcaaaatgggcatgctcttctatcctttattaaaatctctgccaaaagtcaccttatcagagaagccttttctgaccaacctttctaaaatgcactccctaccaattgcaccccctcgtccactgctggattttcgttaatattatttgtctctgacctgatattattttattatgatattttctcactgatacataagacccatgagagcacagacttggtatgagacagttttctatgagttcctccactgcagcttttttcctaaattcattataatttttatttcaataggtttttggggaacagtaggtgtttggttacatgaatatgttcttcagtggtgatttctgagattttggtgcatttattaccctagcagtgaacactgtacccaatgtgtagtcttttatccctcacccaccccacatccgttctcaaagtccccaaagtccatcgtatcattcttatgcctttgcatcttcatagtttagctcccacttataagtgagaacatacaatgtttggttttccattcctgagttacttcacttagaataatagtctccaattccatccaggttgctgctaatgccattatttcattccttttttatcgctgactagtattctacagtatatatcacaatttatttatccacatattgattgatggacatttgggccggttccatatttttgcaattgtgaattctgctgcataaacatgtgtgtgcaagtatctttttcatatgacttctttttctctgggtagagggtagttctacttttagatctttaaggaatctccacactgttttccatagtggttgtactagtttacattcccaccacgttaaaaatgttcccttttcaccacatccatgccaacacctattattctttgcatttttttattatggccattcttccaggagtaaggtggtatcacactgcagttttgatttgcattcccctgatcattagtggtgttgaacattttttcatctgtttgttggccatttgtatatcttcttttgagaaatgtctattcatgtccttagcccactttttgatgggattgtttgtttttttcttgctgatttgagttccttgtagattctggatgttagctctttgtcggatgtatagatcgcaaagattttctcccattttgtgggttgtctgtttaccctctggattgtttcttttgccgtgcaaaaacttaaacttgcacggcaaaagaaacaatctgcaggaaaaacagacaatcacaaaattttgctgtgcttaatttagtttaattaagtccccagctattcatctttgtttttgttgcatttgcttttggattcttggtcatgaaatccttgcctaagccaatgtctagaagggatttttctgatgttatcttctagaatttttatggtttcaggtcttcgatttaagtccttgattcattttgagtcaatttttgtataaggtgagggatgaggatccagtttcatttttccacatgtagcttgttaattattgtagcaccatttgttgttgaatagggtgtcccttccccagtttatgtttttctttgctttatcaaagatcagttggctataagtatttggcttcatttctgggttctccattctgttccattggtcttcatgcctatttttacaccaggatcagctgttttggtgactatggcctccagattggttctttttgcttaatctttctttggctatgcaggctcttttttggttccatgtgaattttaggggtttttttttctagttctgtgaagaatggtgatagtattttgatgggaattgctttgattttttagattgcttttagcagtatggccattttcacaatattgattctacccatccatgggcatgggatatatttctatttgtttgtgttgtctatgatttcttttagcagtgttttgtagttttccttctagaggtctttcatctccttggttaggtatattcctaagtattttattatatgcagctattataaaaggagttgagttcttgatttgatccttagcttggtcactgttggtatataacagagttactgatttgtatacattaatcttgtatcctgaaactttgctgaatgaaatcaacatggaaatttaaaacttcttcgaactgaatgataacagtgacacaacctatcaaaatctctgggatacagcaaaggagtgctaagaggaaagttcatagccctaaatgcctatatcagaaagtctgaaagagcacaaacagacaatctaaggtcacacctcaaggaactagagaaacaagaacataccaaacctaaatcagcagaagaaaagaaatgacaaagatcagagaagaattaaatgaaacaaaaaaatacaaaagataaatgaaacaaaaagctggttctttgaaaagataaataagattgattagcccattagtgatattaaccaagaaaagaaaagaaaagagaagatccaaataagttcaattagaaacgaaatgggagatattacaacccatactatggaaatacaaaagaccagtcaaggctactatgaatacctttacatgcataagctagaaagcctagaggagatggataaattcctggaaatatacaaccctcctagattaaactaggaagaaatagaaactctgaatcaaccaataacaagcagtgagattgaaatggtaatttaaaacttgccctcaaaaaaagtccaggaccagacagattcacagctgaattatattatatgagacattcaaagaagaattggtaccaatcctattgatactattccacaagatagagaaagggggaatcctccctaaatcattctatgaagccaatatcacactaataccaaatccaggaaaggacataacaaaaaaaaaaatgaaaactacagaccaatatccctgatgaatatagatgcaaaaatccataacaaaatactagctaaccaaatccaacagcatgtcaaaaaggtaatccaccatgatcaagtgggtttcatacaagggatacaaggatggttgaacataatacaagtcaataaatgtgatacaccacacaaacagaattaaaaacaaaaatcacatgatcatctcaatagatgcagaaaaatctagcatcactttatggttaaaacactcagcaaaattggcatagacaggacatatttcaatgtagtaaaagccctctatgacaaaaccacagccaaca

SEQ ID NO: 1881216 - DNA, 4001 bp, Homo sapiens
aaatctacaaccgattaggcctgccaagctcttgcatttgagaaagtaacctcctcttctgttgtaccccagttcctggtggcaactcaaggggtcccagaggcctgttggggaggcttcattatttttctcagctggtaactgaatttctgtagaggctctttaacaatgatgtgaaatgtggggtttctctctgataaagccagtggaggaaatggttttagagcacagagcctttcttagtacctctcagattctcacagatgccctgtctttggtattaaggataattagacaatacagggtccagtcattcatagtacagtaaaaaagtcccttcaagtcccctggagcagctctttgccaacagtatttccatctcacccaggctccagggtctaatcttcttcttcatcccatgaagtatgaaatacatttttttgctttttattatagttggagctaacatggagattttcacatacagcttaattaaatcacttcaggcatatcaaagaaaaacaaatgcagagtagcgcacagattttctgagtgcatccttcctaactccaacagagctgccaccaatttggcaacctgtagggacctgattccatttcttccacttcagtcacgtctaaggtgaaagccttaggctaagttccacagatatctagctccacaatgatgtgggcagagaccgtattaagtctagtgggatcctcttcccctttaagaagctgcttctagcattttctctggatataagcacccaaggcatttcctgtaactctgagctccatcgaacttcctgtgccccatggtcatgctgatcctggccttgggagagaaagacatttctgtatccttgtttcttccctgaatgtctgtcactagcttccagatatggtccttacttgcctctgtctcttgctcctggttgatttctctatgctctgtttgagatgcctaaaaaagtcactggttcttcccttgggcagtgcttgtcttctgctcttggtttaagcatctaggtcttgactcaccagtggtcatgacattgggggtgatgccatcattccctgtggcctctctaccttacaaaggttccttattttcttcctatttcaagacttttgtgtggtgaatattcctattccctacttcttacctaagctggtgtgttatttaggtgtcttcatgtgtttaggtccatggttctcaaacagggggatgtggggaaagagttttgcccccaaaaagacatttggcaatgtctggaggctttttttttttttgagacacggtcttgctctgtcacctaagttggagtgcagtggtgcgatctcagctcactgcagccccaacatcctgggctcaagcgatcctcccatagcagcctccgaagtagctggagcacaggtgcacaccaccacgcccacctaattttgtttattttttgtttttatgaagacgaagtcttactatgttgcctaggctggtctcgaactcctaggcccaaacaatcctccaacctcggcctccccaaatgctgggattacaggcatgagcaactgcaccaagcctggaggcatttttagttgtcccaaggaggggcaactcctagaatctagtgcacggaagtgaaggatgctattaaacatcctataagatacagaatagcccccaacaacaaagaattatctggcctatgatgtcaataatattgagtttgagaaactctggtcttagagaagaggacctaatcttaattctgaaagtaggtttatctgatgtgtaggtaaatctgttctttgcagtgactggtttaacaataagtgtatgattcactctaggccaatgaaacacaagaagttgctgagggcttcttaaaaggtccttccctctggtgctgccaggtgaaggtgtgagccttgacccatgtcactgccagccctgggagtaaattgaagccaagggaatggcagggaaatggaccagagccactggactcatcaatcctgaagtacatcttttggctctacttccagagctaggagtctctttcttgattaagcaggtttgagattttttttttcttgttgctgtggttacctacagccacatgaatctcaatgatgcatctttactctttttggtcactcatttgtttccgcttaccatcagaagggtacctccagctcttagctaattttcagagcctccctgaacctggacaatgatctggctcaagtcccagctttgtccacttatgcttcaatgttcaacagacccttctgaatgcagaattccttcaataaatattattataataaaaagacttcactcatactataaaaaataacagactaaccattcagaggctacccaatgggattcaatcgattggatgtaggcctaagttcaactaggcctaaactaatcacaaaacttggaggcacaaaacttttttcctgtaggaaaaaagatgacatccagagagcagacaaattcatttaaacatctgacgactaaaagggagaggagcatttagcactttaaagccacgagagcaggtgttcttttatagtcttttatattgacagctgaatgtttataaaacaaagtgcttgggtggctggaaaaacaggcatgctgacattaaggaagacaaacattaaaaagaaaaaagcaaactctccagcaaagggagcaatgatcctgctggaggggggtagggggtgagttaaagtctttctaagattctgtggcctcatttaagtgtggaaaacacacacctaaacatctgctatgtatgacttaaaaaccaagttccacttcatattcctctttaaccaaattcttgctctatgccaaataacctatgagcactgagtttaggtttttcaaaaatgaggacatttaaatttttaattttgttaaaaagatcaggtcattgaattcttttgttcaaactctcagagtggaggaaaaggcatagtacaattgctggatagtcaattactctggattcccccaagttattatactctttattatacttgctagggtcaagtatttcagttttctagacacttaagaaagcctccatcttagtttgggaaaaagtaaaccatgtatcagagttggcacaatacattcttactgttgttcacaaatcagctttgggataggacaggtatgaacaattatgtcctagaaaaggtgaaacttttaaaaaagatgaatggctgaccaatgatctgtgattacaagggacactcctagtaaaggtttttagtgtgagctccacgtctcaataattatcaactacagcagcagtctccaacatttttggcaccaatatttagggactggtttcatgaaagacaatttttccacagacgggggtggggatgggttatggcattagattctcataaggagcacgcaacccagatccctcgcatgcacagttcacaatagggtttgcggtcctatgagaatctaatgctgccactgatctgagcggaggtggagttcaggtggtaatacttgctcacctgccactcatctcctgctgtgcagcccagctcctaacaggccacggatcagtaccagtccacggcctagggcttgggacctcttgaactatagaattggttttcactagctttgctttccaactgcaggctagactactctgcgggataggaatcaagggagggtttgtaaattgcaaaaggcagagaggtaaaagaagcatgaaatgggatgttgccacactatgcgacaccattttgaattgaaaccaagcattgctcttaccatcattggacccaaagcttccatcaatggattttctctgaaacctgcaaacaagcacatacacatgctcctaagacagtgaaaacctcagcattttacatttgttccttatagattttgttgcggatttgtctactaggatctcttcaaaacatgtctttggggccaggtgc

SEQ ID NO: 1881217 - DNA, 4001 bp, Homo sapiens
gcttgtacacagttgatggctcatcattacccaagaatctacaggctactgctgcataagcctttggagtatcaggtgtacatgcccatgatagcactaccttctttgactttttaaaactaatggtctctttgtttcctatttgctgtaggagcttccctgtattgtgctaattctgcaaagaataggaaagttgaaaaagaaatgaactaggcttcaaatcttagatgtgctgaaaatgagctttgtaatgttaaacaagtcaacctcactgtgtctctttctatggattccaatgtttgtgtgttctgcttcacagagtaattgtaaggatcaaatgaatcagttaaccaatcaagccgaataaattgagcactaacgatggctttagcagtgtgctggttattctcaaaacttagatgtaagttgttgccagacccatcttcagaagctatacctttgcttgtgcacacactaatgaacttgtactagtcatgatgttcttgagctagtaataatgctctagcaaaaataaaacgtactttccacattctgaggacataatccaaagtagcctgcaataaacacaggctaaacacttttttaaagatttgcttttaatattcaaaattccctcagaagcatgataaacagaacacacatttataacttttccttctgaaaatttacaaaaattagagtaaagaagttaaaagaaaaaaaaaaatccttcaatgcctaaagacaaagagaactataaaccaaaaataaaattctaagtctcctcaatcatctaaatggacccctcctctcgtcaagggcattccagagttaacgtgaaaaactaatacaggccatgatggaagagggggtcagacatgcctcattatatcctcctcccttttggaattcaggaaaagccaatcagcattaacatcaacacagactttaaatgtgataagaaacatttacattcttttctctctgaagcctgctacttagaggcttcatctgcatgataaaaccttggtctccacaaccccttattctagcccagccattcctttctatttataatagctctttcagcaaattaccaatcagaatatctttgaatccagctatgatttggaatccccatctctacctcacccccacttccagctgtctccactcttccagattgaaccaatgtaaatctcacatagattgcttgatgtattatgtctccttaaaacgtataaaggcaaggtgtacgtcaaccaccttgggcacatgtcagcacctcctgaggctgtgtcatgggcgtgtccttaaccttggcaaagtaaactttctaaattgattgagacctgtctcagatactttttggttcacagaaaaaacaagagaccaaataactgcagttaagatgcatcaagaaaattttggaagctggaagcagacagacaattcctaactgagtttaaagagaaaagaagagtaaaattattcattatagaaacgaagaaaccagttgatttccaccacagaattcaggaaagcttctggacttatagacaacagatacatctaaagattcaatggtgataaagatgtaaagattggttgaaagctggtatgtggttagaatcctgcatcaactcctgcatagtatgataactgcactcctcttctggtctccctcatacacaaatagacacatgccagaagaggacaagcctcttattcaacattggagagattgaataacagggattactttagaacagtaggtctcaaccatgttcaattttgcttcccaagggatatttggcaatatgccatgaagacatttttggttgtcccaacttgtggtggggtgtttctggcatctagtgggtagaagtccaagaaggattcttctaacatcctacaatgcaaacaacagcccccaccacaaacaattatctgaccccaagtatcagtagtgcaaatgatgagaaaccatgctctagaacaccagaaaaagctgaggatgggaatgaaatattaaaatcagatgaataaaatgaatattacacaccgaactgtgagatctgcatcttgaattatgaggtcttccccttccctttattcacctagttgtatctctgagaaacccaatcatttgccttatatattccaggcaatagatctgaggcttcctttttgagggaaatcactgtttaaaagaaaagacctgtggatgcccatagcagggaggtctctctccagctgaccactctacagtgaagcctgccatgctaagccatctccagtcagaattgtagaattgtgataacttgttcctaaatataaatgcatagcaaaggattagcagatattaaggaaggcttataacatgaaagttatacccctgatatggtttgagtttgagtacctgcccaattctcatgtgaaattgtaatctccagtattggaggagggggtctagtaggaggtgattggatcatggggccgtttctaacggcttagcactatttccctagaggtgtcttctgatagagttctccccagacctgcttgttaaaacgtctgtagcacctccccactatcttcttcctcctgctggccacataagatgtgcttgcttcccctttgccttccaccatgattgtaagtttcctgaggcctccccagaagcagaagtctgtacagcctgtagagccatgagccaattaaacctcttttctttataaattacccagtttcaggtatgtctttatagaagtgtgagaagagactaacacaatacccaaacagagagaccaaaaaaaaaaaaaaaaaaagaaaaaaaagaggagagagaaactcaaaataaccatagataatataaatgaaatttcttaggaagattaactaaaaaatcatgaggtttttaataactgccgtaaatattcaccagggcctacttttgtagctactacttttttcttgttatttcctacataaatattgtttatattaatttatatctcattctacagagaatttcatccaagtattttgtacaagtaattagagaaatatgtatgcaatatagacaggcacaaaaggaaaatcagtacaaaaagaaaataaaaataccatgttaaccaagtcaacagagaagttataatttaacttcaaattgacttcagacattctataatttcttcaataatttgttagaaatgaatgaaaaagggaggttgtgaataactgtaacatggaatttctcctctatcctttctcattacattagctttttaaaaaaaccagaaatctgaatttttatagcttgttttggtgtaggactgagtaacaaactttcccaggttatttaaaatgtgattgactttacactattccactttcatgcaacttttcaatacaactctgacatacaagccacccctgtaccaagacattttctttaagctggtgatagatatgcttcttacaaagctctcatcaaggggttaggacacatacatatcttgatttgtctgattcttttattagatgaaggccatttactgctaaccttaggcattcttaaggagccaatcttttcgaagaagactgtgctatgaaggactagttttattaataatgaacttgagctttgtactgtacttcaataatactttcatgtaagggtactgaaatgctttgcaatttaaatgaattaagccccataacacactttgagctacagaatacttgattttgaaatagaaaatccaaggaagagagatacaaagtaagttttatgtttaaattaaaatcctccttttctccacttttcctccttttctatattgtatcccacttcactctcgacactacttatttcccttgctctcctttcttctattttctctaggatattcttcttttcctatccatcaatattctcttttttctagacctccacccacccatgacaggagtctttctgtacaaatcaggataaa

SEQ ID NO: 1881218 - DNA, 4001 bp, Homo sapiens
agattgttcgcttgtttactataaaaactcactattaaacagtagattccccaggctcagtattctttggttgagatgcaaatccactgcatgttcttcatccatttggctcatggcattgccaccatgggacttggagaacatgccgtggtaatataaagtgttttgtctctgacccaggagtctcctgtcttttgccaacatccaatcttttagcttgcaaatagggtaaaatcaaatcccagacttgacacctctgatataaccaaagtgaatttattttttagaaactgatgtgtattttccatcaacgttatttccatgttgcttaagagcctgtgcaagaacagcttaagaccattcagtggttgtttctacccattcagtggcctgagcagtgggagctgcagaccagtcttctgtggcaggctgagcactccagtcttcagtagggacctgatgaataggcacagagggcacctgtacaccatcagaccagtctccaacctcaggctgaatagcggtgaactcaggagctggagcagtccatttgccctgaaattcctccttggtcacagtcttttcagcagcaacctgctcctcttttccaatctcttcaggatctctgtagaagtagagatcaggcatgacctcccatgggtgttcgagggaaatggtgccacacacgcgcagaacttccagggccagcatccaccagctcggacccactgagggagctcccttgttgttgcatgtgatggcaatgtccacatagcgcagaggaaaatctgtgtgacatagagcaatggtaggtaggttaacataagatgtctctgtgagaggctggtggtcagccctgggatcagtaaccactagaagccgtggctccctgaaggctgcctgggtctggctagtgaaggttccaggagtgaagcggccaacaatttgagtggctccagtggcagcagcaaacttcagcacagccctctggccagtattgctagaggacatgacactgacatcaacagggtttttaaaggcagcgatggcacgagctgccagcagaaacttcttgcttctcccaggtcctcttcagatgtaggatgtagacgccatcacttttcttcttacagatgtgctactccatttggaagtcaaggttggtaccacctaagtgggttcctgctgcaaggaacttaaggacatcctcctccttcatttgcaggacatcaagggctctagacattgtgaaagtttccctttaagttacaatgagaattgtagggaccagccccacagggtcggtgggtctctccccacatgcagagacgagagagcgtagaaataaagacacaagacaaagagataaaagaaaagacagctgtgcccgggggaccactaccaccaagacacggagaccggtagtggccccaaatgccaggctgcactgatatttattggatacaagacaaaggggcaggataaggagagtgagccatctccaatgataggtaaggccacgtgggtcacgtgtccactggacgggggcccttccctgcctggcagccgaggcagagagagagaggagacaaagagagaaacaacttacaccattatgagagacttttagtactttcactaatttgctactgctatctagaaggcagagccaggtgtacaggatggaacacgaaggcagactaggagcgtgaccactgaagcacagcatcacagggagacggttaggcctccggataactgcgggaaagcctgactaatgtcaggccctccacaagaggtggaggagtagagtcttctctaaactcccccagggactactaagtagcaggtgtttttccttgacatgctaccgctagaccacagtctgcttggcaacgggcatcttcccagacgctggcattacccctagaccaaggagccctctggtggccctgtctgggcataatagaaggctcgcactcttgtcttttggtcactcctcactatgtcccctcagctcctgcctctgtatggcccggtttttcctaggttatgattatagagcgaggattattataatattggaataaagaataattgctacaaactgatgattaatgatattcatatataatcacgtctatgatctagatctagtataactcttgttgttttatatattttattatactggaacagctcgtgcccttggtctcttgcctcggcacctggatggcttgccgcccacagagaatctagaacaatgccgtatgggcccctctctgggttgtgtggaaaaggcgtgaatttattttagtttttcaaacaagtcgtgcgctgggagacatcacaaatgctattctttctgaggaacacttcaatcctcttctcttggtgacctctatcagtttctctgggaagccttctccctgagcctcccatgccccttccttcaattgggctatatcccccctctctagactcctacagagccttctcccccaatacaatagaatctttgtgaggtcagatatagtgtcttctcaattgtatccccaggtttaacatatcacctgacacactgtaggtgcttaataagagcttatggaatgaatgaagtgctattgcagagataagcataaagcggtatgtgagtacaaaggaagggaatctaaattggagtggaggtctgggaaaggcctcctggaagaggtgacacttgaggctgacctgaaggacaagtcggttagatgtttcaagtggtgagaacggtagcatgaatgctcagcagtgggaacgcggatggtgcctttgagtaatggccaatgactgtatggctgcagctagggtcggggggaatggaatggcagggaatcaagctaactgacaggtagttgagggatggattatgaaaaagtgaaagcccgcttttcatttcaggcttggattttgtgtttatttacttatttatttatgagaaagggtctcactctgttgcccaggctggcacgatatcggctcactgcaacctcccgagttcaagtgattctcccacctcagcctctcgagtagctgggattacaggtttgcgccaccacgcccagctaatttttgtatttgtatttgtaatttttttgagacggatctcgctctgtcacctaggctggagtgcagtggtccaatctcggctcactgcaacctccgcctcccaggttcaagcaatactcctgcctcagccaactgagtagctgggattacaggcccctgccaccatgcccggctaatttttgtatttttagtagagacggggtttcaccatgttggccgggctggtatcgaactcctgacctcaggtgatccgccggcctcggcctcccaaagtgctgggattaaaggggtgagccaccccgcccgataggcttggactttgttaaaggcatacagaataacacgaagtggtgagatgcagaaaaaagtagtaatttaagaaaacttggcttgccacgttggttcctctagggaccagccctgcaactccgggcaagtcctatcccctctgaccagaggcaaagtgaaacagtgatgacatctacctctagcagtgctgtgacgattaaatgcgatcttaggcaaagcgcctggtatgtgccgttactcgaaaaaatgacagttgtccctcttcgctctggccccatcctcctcatctgcaaatgccgggaggccgggccactctcgcaggtcgctcccggagccagctgagcagtgggaggggaagcggtgggacagaagggcgccagccagtcgtccgggcaccgtggctggttcggctgccgctcagccgcgcgggggcgctctagactgctcctcgtgctctatggtgttgccttcgccccggaagtagttgcgcagctggggttggtaaggtcgggccatggtggggcagaggttgggaagatggcgtggcgaggctgggcgcagagaggctggggctgcggccaggc

SEQ ID NO: 1881219 - DNA, 4001 bp, Homo sapiens
aaaacacaatcctaggaatgcaagaatttcgttgcatcttgctgggaaaatcacacaccaaatcctagtgctttgagattcacatgtacctatcttgattaccttgcactggctctgtctcagaacacacttagtgttattagtctaaatactaagggaaaagaagaaactattaagcattcagcacgttctcatttcactttcacaatcctgtaagataggtaaacattatccccaatttatacattaataaaatgacgttaaatgatgttaaattacttgcccacaccaccagtaaagagaagctaggactctgaattccactttgtccactattcaagggctcctccccccacgcccccacccccgccaaaatagggctcctcccccctccaaaaaaatcaatcatggggtgccactggagagttgaccactcacatcaattatttgttattctagttcagcagttctgggagcgagttatggagaagataaaccaccaactcctcacttcacagaatcaactcagtattcagggaatactctaagagaaggggtaaaatgtccctagaggtgaatcccagctcttcgcatcatttctcaattccttctcaatagagactctaggaccagagctccctttatcacctccatcctaacatacctaattgtttcagaaagttaccttttaaaacaagatcttctaccagaatagaagacctctctgctggtcctcgaatttaaataaattcaattttcacacgataacctgcctgatagcattccaaaacattcgttaccactgcagtttcaagttattttgtagtgaattgtgaactaaatcttgattaaattgcggtaaagatgggaaacaaaaatctatgtttagacaggtttcctatctaaaattttccattacgagcttaggaaaaacaaaacctgtacactcaacattttaaatctgtttctaactgaacaagatgataggtgatgcaatgaggcttaactctatcatgtaattgccacaaaacactaacattgtaaaacattcaatactttaaattactgaatattctttttaaagaagttgaatattgtaagaattatttagcttctggagtttaacacttacaacattaaaaaaaggtttctaagaggaataaggtctcatctgaaaacagggtttaaaaaaaaaaccgtataaacattgatacatgtccaaaaacatttcccatcgtaaggtattatttctaatactaaaggcaaaacaaattaaaacagatcaaacatttgcagtcaaatgtccaaatttttgaactgggaaaatgatgtcaacgtttttcatccgttttcttgtaaggttccagatcaaaaataaacagccatcgggctcatcaattcaggtgcggaaactcattaaaatcgagcttttggaggggagaaaacatattcccagaatttggtttatcgggtaaaattgccccgtggcccacaccagaaacctcgggcaactgcccgggccttgcccacccctcccgcgggccgcacctgccaaggccgcaccgccagcgccccctgccgccctctctgcacagagacccgcgcccacccccgcacccgcacccgcacccgcacctgcccccaccccgcgctcgccccgcgccgaggccgcgcagcctgcgggcagtggcgggggcacgaggatgcgaatccaggcggggccgggagctgggcgcgtcccccagaacccccgccacggccaggcctgagcctcacctacctacgccgtatttctcctcctccgtgggggtccacatggccgtgccgggcgcggccccgcgggcgcggcgaccgggcgacaacgcggcggggacggccgcgggcccggctgtggcgcaccgcgagtcgaggcggggacggtcaggcggcgcggggcagtgggcggcgcatccctcacaggccgtccgggatgccgccgccacccccgccacgtctggaccgcgaggctccgcgggtggcccagcagcccctggcggcgcgggcgaaggctcgccacctgtccgtcgccgctgctcccgtgccgccgcttgcttcttcacagctccgccgcccggctcccggcgccgccgcggctcggctcgccccagcgggctcgcaggacgcccgcgcatgcgccactccctgccgcgcaggggctcgcgctgcccgggctcgcgccgtcccgagcccgcgcgcgaatccacgcgccgctgctgcgcgccagcggagggaaatccgcgagaagctattggactgcccggccccggaccggcttctagaatcgctggtccggggccctcagctgcagcaaaccccggagggggcgaagccggtcaggtgggcgactccctctacccggactccccactcgcttccgcttccagtgcctcctgcctgcgccccgagatggccacaggcctcctggtcggagaggggagatccagaaaaggaggacacgacaccattttcagacccatcccagtgtcacccacagtgctgtcggaaaggtccccggagccaccctgtgcattcccagggcccgcaggatggagtcgccacgagggaaccaggtggggtgcactcgtgcccctctctcctggatcccctgtgggctgaggccgctgacacctcctgggttcttgcttctctgagatggcctgagtggtgaatgtttggggccagaacaatcaacagccgccttgctagtaaggaagagcttcattgggcccttcgtgttcctacccaggacacggcatctgctgctcctgggtgtctgcctcccttggagccctaagaactggctcctaccggaaactttcctcctctctctcctccctaagaatccattcattctgatgcctgtaaatgtcaccttgtgacccccaagtcaaccacttaccaaagaacaggaactgcaggacttctcctttccacctacatttggaccacatgctctaatcccagcagatttgcccatctctgtcactagcactactaagtcaaaaccctggtgtcatccttcactagcactctcagacaccaccactcttcaaagcccagctcagcccctcacctccaggaagcctgccctgacccatagtctcctttccttctttgtctggaattggagctatgttcggtttgtcttatttcccttataagactgtcagctcccagaaggcaagctccaggctaaaatcaactttctaaaccctcaccaccaacccagcacctgttgtatagttgttgcatgggaagccagactaatagaagaatatcttgcaatcaacagatcttgttgattcttcgttcaaagtgtcatgattggtaactcctcccaggcctgactgtgctcccctgggttatggccaccccttcccaccttcggacctttaggctcctcctctcactaatcatagctgcccactcccgcccagaaaaatgtctgttctgtgaatgatagaatttctcaatagccaggtacacttctttttaggggtagcaggggtgtccaagaacataacgaaagagctaactgttccaagaagatagacccctccccggtggccaccatggaagtattctatggaatgaagccacattcttacaaaactctccaggtagctattcaacaagtggggctgagctacgcaggccttcagggaacaaccttaaagctcttatttcatcctctaagttcactcccttgtctgctgtatgtgatgacagtcacagagcctaagggccagtttttccaaagtttatactcttgttcccagtctgaatccatcttagattatggctttcccagatgaagaaaattctccatgattgcacacctcagctccagggtggaagggcattaaacccaaccagggaagggaaaagaagggaccaaagtgagaaggaagggacttagtaagcctggactcctacactcttgctgtttgtataaatttaga

SEQ ID NO: 1881220 - DNA, 4001 bp, Homo sapiens
gaatgaaagacaggctgggcgcggtggctcacgcctgtaatcccagcactttgggaggcccaggcgggtggatcacgagttcaggagatcgagaccatcctggctaacacggtgaaaccctgtctctactaaaaatacaaaaaaaaattagccgggcgaggtggcgggtgcctgtagtcccagctactcgggaggctgaggcaggaaaatggcgtgaacccagggggcaaagcttgcagtgagccgagatcatgccactacactccagcctgggcgacagagcgagactctgtctcaaaaaaaaaaaaaaaagaaagaaagacagcataaataagacagaatattatgaagaactttatgccaataaatttgacaacttagataaaatagacaaattatttgaaaaatatgatttgccaaaactggaaaagaagttaaaaatctggagtgccatacacttattaaagaaattgaatttgtaaataaatcccttcctacaaagaaaactccaggtctagatggcatcactgatgaattccttacaacatttcagaaagaaataatacaaatttcaggtaaatattttcataaaatagaggaggtaacatttcccaatttgtttagcgaagataacattatcctgataccaaaaccagaccaagatattgtaagaaaagaaaactaaagactaatgtccctcatgaacataacataaaaatctctaacaaaatattagcagagtctaccaattttatttttatttttaaaattgtaatattgtttatttaacttcaaaagcatttcagcattctaaacatacaaaaaaaaaaaacaacattgcaaagcgtgtttaagtacagaaggcttttgaactttcattgatgcagtggctcttccctttgctgacactgaagagttctacagtttgtttaagaaacagtttaaaaactatcacacttaactaaaacaaacaaacaaaaaaacacttctcatgccagccgacccacctttgtctatagctaagaatggaggcagaatgctacgtcattatatacaaaaacatgacaacctgaagttaaatggatgcctgctgcagtcaccaggtccaacctcacagtgcatgagctacgacccctccaaaaggcatcttcccctgcagcctcaatgccaagcaaggagtgtcaagagtttgtctcaattgttttgttctttttacaaactagagatatatacagtgataactcaggatttctagccaataactatatgttaacaccactttacaagttaaaaaaaaaaaggggcgggggagaaacatctttaaatgccttgtcacaccaacagcaaagtgcgcagagtgaggagaacacaagattattttttcattttaaaaatgtttagaaataaatacaattttgatacagcttcagggtgctctggacaccgatggccatttcatgtaaaccactgacaatttctagagcactttgagagactacaatctgatcgtgatcaaattttgtaattaaacctaatgagggcaacagacacttgatgtgttaattaaggtgctcccctactctaacgtattcacatggagacagataaacagtttttaaaattcatccttctcatcctctttttcctactcgtcatctttgtcttcctcttccacgttttttccaggcaaccttagcaggaccctttgcaccatcaaactttcttttagtcagcaacatctttctcatacttcttcagctttgtcgccttggtgatgtaaggtggcttttcactgttacatgttaatctacatctcacccagcctttttgcgacatttccaatagagataccagggtttgtggatttgatattagggcagaatttggaacagagcaggaagaatccagacagtgggatccaaacgaaggattagggaccaactaagggaggcaagaataaggatcctaatgcctcccttagctggtccgtaatccttcatttcccaatcatagcatactttatccacctttgccatttcatcaaatttagacttctctttcccagacattatcttccgcttctcagggcacttcctggaaaattctgcaaaattgacagggacctctggggttttcttcttatgttcttctctgcacatctgcacaaagaaggcataagcagacatcttgccctttggtttcttggggtcacctttagccatcctgactgcattgttcactagtctgggcaagcacagggcatgacacgcagctcagcactccccagcctcaagctagctgcctccacgagagatgccttaagatttttaaaaggaataacatgttgtaaacaaatagagtttatcccaggaatgcaaaggttattcaacatttaaaacttcataaacacaactcaccatgttaacagaataaaagggaacaactacatgatcatctcaagataaaaaacaaatgaaaaatgcaaacaaaaccatttgacaaaattccacatctattcaccataaaaactctcaacaaactaggagcagagaattttctcagctgatgaatggcatctatgacaaacctaaactagctttatactcaatggtaaaagatggaatgagttctaatctaaaatcacggacaaagcaataatatctgttcttaccaattctaaccaacattatacaggagattctagccagtgaaagagaaaagtaagaaataagtgtcatgtagatttgaaaataagaagtaaaactatctttattctcatgtgacatgactgtgtacatagaaaatcctgagtctacaaaaatgctactagaaataagaagttttagatcatagaatactagctcaacatacaaaaatcaaatatatgtctacataatgtcaagaacaatggaaaagaaattttatgataccattctcaataccattaaaaaattctatatttagggataacttaacaacaaaaaggtatactacttgtgcacggaaaactacaaaacattgctgagagaaattaaagatctaaataaatagacatgaattggaagacaatattatcaaaaatcagttctccccaaattgatctgtagatgtaatgcaatcttgacaagttgattctaaaatttatataaagctgcaaaacacctagaatggttaaaacaatttttataaacaacaactttgggatacttgccctgtctgatttcaagacttactataattctttttttttttttttttttttttttttgagacggagtcttgctctatcgcccaggctggagtgcagtggcgcgatctcggctcactccaagctccgcctcccgggttcacgccattctcctgcctcagcctcctgagtagctgggactacaggcgcccgccaccgcgcccagctaattttttttgtatttttagtagagacggggtttcaccgtggtctcgatctcctgacctcgtgatccacccgcctcggcctcccaaagtgctgggattacaggcgtgagccacagcgcctggacgacttattataattctatagttattaagacaaggtggtattaacataaagacagacatataaatcaatgaaacagagtccagaaatggagccaaacatatgtgatcaattattttttaatgaaaaatagatcatagacctaaagataaaaaacaaactataaaacttctaagagaaaaacttaagagcacatttttgtgaccttagggtaggcaaaatttcttagataggacatcaaaaagcacaaaccataaaatacaaaacattaaattgaatttcataaaagttaaaaatacgtctatttttgaaagatattattaaaaaaatgacaggactgaccaggagctgtgactcacgcattcaatcccagcatgttagcaggctgggaagaggggaacacttaagcccaggcgtgcaagaccagcctgggaaacgtagtgacactccatctctacaaaaaaat

SEQ ID NO: 1881221 - DNA, 4001 bp, Homo sapiens
tatcattctcaaaggacttttgtagcacacagaatggtttctaaataatattatccatatcttgactaacacggtgaaaccccatctctactaaaaatccaaaaaattagccgggcgcggtggcgggcgcctgtaatcccagctactcaggaggctgaggcaggagaacggcgagaacccggggggcggagcttgcagtgagccgagatagcgccactgcagtccggcctgggcgaaagagcgagtactccgtctcaaaaaataataataataataatatcatccataatattagttgatagtctcttcataattctaaatccagcatttttcaaagcattaccaatgaaggagaacttttaagatgaagctaaatataaaaaaaaagtgaattactgcaaattactatacatagtataatttgaaattttggtaatattgtctaagacaaatcatccttttgggatagtttttttccatactgttcaaactacccttcatcctataacggcagacatggcctaatgattctcatttttaatcaacagtgttgtcagacatttcaatgattctgaacataatgttatgacattcagggccagagagcaagcattctctacttgctctcagctgaaagcaaagaggttctcaagagctgccagcctttctcctttatgctctgaaagcctcctaaacttgtcagtttacttccattacccttttattgaaaacaatgaaagaaaaaaagttactacggtgtttatacttttaaagtgaatgtcttttgtaataaggtagaaatatcacagaaccatcgaatgttggaatcagaagcatgtttggcatatcatcaagtacaatagccacatcctgcctatgtggaaagctggaggggctaaaggacctctcaaagctacacatgtagagtcagcagcagagcagagcttaaagcagcaagtgactcttacggccatcagtaatcacactcttgcttaacatgcaaatgaataaagctatttttataaaatccctcccccccccatatattggcagtaactctaaattctagtcattttttaaccattacagaataagattagaagcatcagtagttaatggtgataataatttccattttatatggggttttatggttcacaaatatattttataaaataagtttctaacatttcattttcttatattgagggcttttaaaagaaataaccaaaacctattttattaaaatttgatatttaaaattatagttgagaatagtggaagatttttcccattatctttgctctcctggatagcaaccagataaatgacttcccagagaaatgcatagagtcatataagataaaacgtctttttttctccattttactcagagtttgatgatgaactatgactggatattgaaataatcattcttttatcctttgtagtaaggcttactttgtccagtggcaacatgatcagacaagcagctctcagatgacatgtgacaatattaaattcaatcttagcaagcagcttctcaatttcacacttgtggtagctggattaacccaattattttttggaggttaagggaaactttcacatttgcagaataccatccttcagaaaccggaatgtaggattttgttatctcaaagaattttatggagatggaaagatcagttagtattaaattttagcacacaatcagatgaagggtttaggaagaagtagatatgattacctaataattcactttgagttcttcactttgagcctcaaaaatgtgtgaaacttgggacttttactaagcatatctttcaggcaaaatattttcattgtaccagttccaagctcttggttctaacacaaaacccctgctacacatacacacacatgcactcacacacacacaggctacctatatatacacctgctatgtgtgtggatatgtatttacacatacacatatcaggtgtatacatacgtagcatgtatatatacacatacacacacacgcacacaggcacacacatacttgttacctatatatgtatacatgcacatatcaggtgtatgtaaatgtaacatgtatatgtacacacacgcacacaggcacacacatacttgttacctatatatgtatacatgcacatatcaggtgtatgtaaatgtaacatgtatatgtacacacacgcacacaggcacacacatacttgttacatatataattacacatgcacatatcaggtgtatgtaaatgtaacatttatatatacacacgcgcacacaggcacacacatacttgctacatatatatacagtcaggtgctgcatgatgacattttgctcaagaacaaatcacatacatgagggtggttccatagattatagtggagctgaaaaactctagtggcattgttctcattgtgacattagtgcaattacttaatttttaaaacaaatttagtgtaacctaagtgtacagtgtttataaagcctacagtaatgcatagtaacgtcttaggccttcacatttgctcactgctcattcacagatccacccagagcaacttctactcccacaagttccatgaaaagtgccctatacaggggtggcaattttttttaatcttttatatcatatttcgctgtaccttttctgtgtttagatatgtttagatatacaaataccactgcattgtaattgcctacagtgttcagtacaataacatgctatgcaggtttgtagcttagaagtaataagctatacgacataacctagttgtttaggaggctacacaatgtgtttgtgttatgtgcactctatgatgttctctcaacaatgaagtcacctaatgatgcatttctcagaaagcatctccattattaaatggcacatgaacgtatttgctacatatatacatactggctataaacacacacacacacacacacacactcacacacacctgctacagtcctttcaaagtataaaaaaagataccaaaatgtgttagagattcgtttgtaaaatgtaactattttcggaccagatggattcacagccgaattctaccagaggtacaaggaggaactggtaccattccttctgaaactattccaatcaatagaaaaagagggaaacctccctaactcattttatgaggccagcatcatcctgataccaaagccaggcagagacacaaccaaaaaagagaattttagaccaatatccttgatgaacattgatgcaaaaatcctcaataaaatactggcaacccgaatccagcagcacatcaaaaagcttatccaccatgatcaagtgggcttcatccctgggatgcaaggctggttcaatatacgcaaatcaataaatgtaatccagcgtataaacagaaccaaagacaaaaaccacatgattatctcaatagatgcagaaaaggcctttgacaaaattcaacaacgcttcatgctaaaaactctcaataaattaggtattgatgggatgtatctcaaaataataagagctatctatgacaaacccacagccaatatcataatgaatgggcaaaaactggaagcattccctttgaaaactggcacaagacagggatgccctctctcacctctcctattcaacatagtgttggaagttctggccagggcaatcaggcaggagaaggaaataaagggtattcagttaggaaaagaggaagtcaaactgtccctgtttgcagacaacatgattgtacatctagaaaaccccattgtctcagcccaaaatctccttaagctgataagcaacttcagcaaagtttcaggatacaaaatccatgtacaaaaatcacaagcattcttatacaccaataacagacagagagccaaatcatgagtgaactcccattcacaattgcttcaaagagaataaaatacttaggaatccaacttacaagggacgtggaggacctcttcaaggagaactacaaaccact

SEQ ID NO: 1881222 - DNA, 4001 bp, Homo sapiens
tgatctgctctcctaaaggtaaaaaatttaacagagtccgacctataagccatgctatgaatgactgaacgtgtgtgtgtgtgtgtgtgcgtgtgttgtgcatgcatggcattgcatgtgtacatacacaaacacacacaggcagcatgaggtgtgaaaagtgaaccttcattcactgatattttataaagaattttcctctgaatttatgtcggtgctgctcctaataaatcacttgctttgagcaaatgtgaagtcataaagatcagtctgcaatgagctgtggccccaaaatgtctgtgaggaataaacaagggaaataaagcttttatattctagcagcaaagctccaactatgcttcctggagtgacagtgtagctttaacctaatgcaattacttacgtgctgacattaggcatagaaaacttcagttggtggaatggattcttccaaaagcaaagagaaaattttacaaagaaagaagccacggggtggaacaaaactagaattgatttcctgagttcagtgttcatgaagttaaaagttcttttttatttttctccaagactttcctccgaagaagaccaatttaaagtaacagaactggttacaaaagaatcaattctgaatacgctacaaaccattgaattatacagtttaaatgggtggattcatggaatactttgtagccataaaaagaaatcatgtcctttgcagcaacatggatgtacccggaggccattatgttaagcaaattaccacaagaacagaacaccaaatatcacatgttctcacttataagtggaagttaaacattgagtacacatagacataaacatgggagcaatagccactgggcagtgctggaggcaggagggagggaaggggctgagggattgcctattgggtgctgtgctcactgcctgggtgacagaatcatctgtaccctaaacctcagcatcatgcagtgttcccatgtgacagacctgcacatatacccactgaatctaaaataaaagttgaaattattaaataaataaaaaaaaaggccaggaacagtggctcactcctgtaatcccagcacttgttcaagaccagtctggtcaacatgatgaaaccccgtttctactaaaaatacaacaattagctaggtgtagtgatgcatgcctgtaattccagctactcaggaggctgtggcacgagaatcgcttaaacttgggaggcagaggttgtagtgagctgagatcatgccactgtactccagtgtggacaacagagcaagactgtgtctcaggaaaaaaaaaaaaaaaaaaaaaggcagaaaaataaataggtggattctatggaatgtgaattatatcccaataactgtattaagtacatttttaaaatgagaataccaaattccatatgtgctgagcattccgtaaaaatcaggttatttctggccgagcgcggaggctcacgcctgtaatcccagcactttgggaggccgaggcgggcggatcacgaggtcaggagatcgagaccatcctggctaacacggcgaaaccccgtctctactaaaaatacaaaaaattagccgggcgcggtggcgggcgcctgtagtcccagctactcgggaggctgaggcaggagaatggcgggaacccgggaggcggagcttgcagtgagccgaggtcgtgccactgcactccagcctgggcgacagcgagactccgaatcaacaaaaaaaaaaaaaaaaaaaaaaatcaggtgattttcactggaaatgaatagactgatgataaatcctgggcgatttgtcttcgcagtatgatcttgtttgcacatttttccaggaatatttcataatagaagcacataaaacattttaaaaatgcgacaagatggacagtactctttaaaaatgacaatgaacaatgtgacatcgctttaccattcatgtttttaaaatctacctttcagtgaacatgaatggtaaagcgatgtcacattgttcattatcatttttcttttgtaatctacatttaatgttttacctgctgcccatttgagcttgggagaagaggcaggggtgtctggggatgagaaatatcggccagttggctgcagttaatttttcataagtctcatttatcgaaatctgtaatttgaacacggctgttctttgaaatgttccagtctttctgagttcaatcaatttctttcttttttttctttaacccactccgccattcaatcaatttcttaatcatgtaacaacagcgtgagcctttgaaaaccagacacaggctacagaaaactacacatgttctctttcacagggtgcagaatatggaatttgatgcctcctccacaaaaactcatcaaatagcactgcacatctgagtggcttggggagggaaaaaaatgtatttttaaatgaaagaaaagaaaatcagaaatgatcattgttagatgaacaaaaaaaatcaggatctcaacagcacctgatgaaaggcaaattatactattcacattgatcgctttttctttcttttttcaaatgatttattatcctttgatatcacaatcagttagcttgcttgctgcggcataaatatttgatcttggagtaacgtttttgacgactgctttttgctacagccggactttgcctccaactttccttgattaaatagaggaggcaaatatgaggtgcgcaaagagaatagaaataagtgacctggaatttatccaagtaaagagaaagccccaggaaatgtatgaatattggcagggagaagctccacaactgtttcctggtgctggaggaggtgtgtcctctttcggtttgttttgtgcctgcctgcctgcctgcctgcctggggacaagcagaataccatggaattcattttttcttcaaactgtattctttggttctttggttattattgaagcgagctgtatatggaggggctggtattttcagacagtcattgtatgtgccaagattcaggctgaataaagtggctgggagacggcgaacatttcattgctttcccaatggtacatccctaattgtagatcctcgagaaaagggtgcagctgtgagaagtttgcagccagtccttacagcaacttgggattgaaaatacctggtaaggcaagatctgggtagggcactgactgccccgactccctctaacacccactgactccagttctgttttctgagttcacacaaaacaaagctagcccagtgtccaaatacttgaagacagcgtcttatcctcattcttggctgcactcatctcttctttaggttaaaaaaaaattattttttttgagacagaatctcgctctgttgctcaggctggagtgcagtggtgcgatctcagctcactgcaacctccgcctcctgagttcaagcaattctcgtgcctcagcctccccagtagctgggactacaggtgcctaccaccgtgcccggctaatttttgtatttttagtagagacggggtttttctatgttggccaggctggtctccacctcccagcctcaagcaatctgcccacctcggcctcccaaagtgctgggattatgggcttgagccactgcactcagtctcaaatttggtttaaccaaagctcccttgtcatggtttaaagtcttgcaatcaccctcataactttcctttggaatccatgctccagattgaaattttgacttctgcttgagtctgtgtgtgacatggaggagaggatacggcggtgtgcggaaggatggctctacagccctttcttcatctacaaagcagggaatgtagtatctaccttctggggtatcatgaggaggacatgaacaatgcttgggaaggccttggcccagtgcctggcacgagaccatcattcagaacatggtggctaatattagaattccctttaagagcgtcatttgaagtcagtccttgaggctgcctgcctattccctggcctggagggcttgtctttttg

SEQ ID NO: 1881223 - DNA, 4001 bp, Homo sapiens
tgttctggatacctatgatttcagaattggataagttctagtgtccaggattttctgaagatactagttttctccataactgctattggctgctttggctttcacgggatgtcttggcctgtgagttgctctagaattccaaaaatatgagtggttgcattgaatggggaacacaaaggtaattcaggcttccaactgtgggttgtgctaaggagtttggtctttattctttattatgtggtgtgtgagtcctgacaaggcaggcactcaaaagggggcttaggattatttatggttgtctgaggacagcatttctctatttcatcattttatttgggacaagtcagcttgctagctctgcagtatagtaaaaaaaaatcccaggagttacagtttcaagtcctgtctctcccactagttagcactgtgatcttaggccaggcatttttgcctccctaactgcaatttttccagctacagtataaaataattggaatataacatttctaaggcttattttactgtaaggatctaaaattctataatcacactatatgacacaaaagcatgaccacacagaaccatacttacagattgggaactatgaccctgttttccaaatctcccatctgaactcaccagagccagtgaacattcagtgtgtttgtcacatgcagtattaccagccagaaaacactcttgttctagcctaagttcttgaaattgaagtatacattcttttttctgatactccctcagattcatttggaaaaaaaaaaaaaacaactcaataactgtaaatgaagaaacactttctaagaagtgtcatgcataagattatagatgatcatacaaagtaccatgggtccctggttaccttaaggtcctattcaggagaaagataaaagtagatgttagtattcttggtgaattaagtgggaatttgcatttcaatgccagtccttaaatggtttgattttcataaaccctatatattatagagtgtttgatgttacataatggtgaaatgaatagaaatgagaaatatttgaacttcgaatgtacttgcaaacgttctccccccacccctttaaactacctacatataaaaacctagaatcaattatgtgaagtttaatttctgaaagtttcaataaagctgggtcatcatactttctcctccaaaaatttggttctcaaataggaatatatttagaaaaattgtttatttatattttcttttttgtttgttctataatttaagtttagaaaatagcaaactttttatgtaaaagatatgatagtaaatattgtgggctttatggaccatataaagtctattgatactacagtacttggccaggcacaaagaagcccagcactgtaatctcagcactttgggaggccaagtagggatgatagcttgggcccaggagattgaaagcatggacagcatagacagacactgattctacaaaaaattaaacaattagactggcatggtggtgagcacctatagtcttagctcctcaggaggctaaggcagtaggatcacttgagcccagaacgttgatgctacaatgagccatggtcatgacattgcagtctggcctgtgctacagaacaaaaccctgtctctaaacaaacaaacaaacaaacaaacaacaaacaaaaaaccccacagtacttaactcacccgctgcagcaggacagctgccatagacaatctataaacaaatgcatgtggctatgttctgtacaactttatttgctgaaacaggtggcccattggtgagcaaaagctgacagatacttgatctaggcaattaataagtgatttctccttcaatcctctcccaatcccagatcattccatattgaaaatagcattggactgaatagctggatagcttttctaattactggacattgactgcacataatcccattgaaattctcattgatatggagcttatttcagtcatcatatccagttcttaaattgtattagctatgagttaataagactgttgttgtggtattgctttatatctggtgtaatactttaatatcaggtcacaggaacttctgtaccattaaatgaagatcaggttaggattctgatcaattggaccatatttctggtctggaggggaaagaggtaagaaaagagctcctccattctcatcacaaaagtgatcatgttctagaatcataacaaacatggcccaggattgtgcagacttgaaactggggagtgaagtgtcagtgccagaactggtaaagaaaatgaaggttctatttctgatccaagaggtaggatcacagggcatccaagtctatgcaggtggtccaaggataccctacagtcaaaaagacaaagtattaggagcccaagaagctgggggacacaactaaggtaatgagaaaggaaaagttgcctgcactctctgtgatagctctacaaatgctgatcagcttttgccttatccaagaatttatttcaatgaactgagggactttttttgctggctgttgtttcataaaacttaaaggcacctaggtacttcctgctacccaacacatagtagatagaggtagagccataaatattgaccttcagacatcatttgtagatcagatatcctttgtagatctatttagatgaccttaaaaatgtgttaatagtctattagtagttggctactatgttggcccatctggaatgcttaagtattcctcaaaatagttcttttgtgcacttaaaatacatcacctgacctaaatgaactatcaaagttagttcaaccagggcatttttatcttagatattactgagattattatcgattcataatttggatgcaagtggttgaggcactataatttttcttttaaggaaaaaaatcaggagaatattttatagttggccacacgtatataagaattgcttcaaaaaattctctaaagatgttagaaacttagatcactatttggtgacttgacaaacatgactggagaaagatgaatcaattgaaagttaactgtccttaaattgaattatgtctgattgttactccatttattgtgtgtgacctaaagatttaaaagaaattaagtcatgtattaatttcaagtcatttcattattttggaaaaaaataaaattattgattgcataattttttggttgaattttatggaaaggtttttaagttcgtgtaaaattggtattcagtaggttttcttaacattggcactattgacattttgagttggatagttatttgttgtgggggactgtcttgtgcattgtaggatttttagcagcatccctgttctccacccactaaatgccagtaatacccacacacaagtttaaacaaccaaaactatctccagacattgtcagatatccccttagtggtaaaatctcccctggttgagatacactggtatacaacaaccaggccataactctataacatacaagattaaggaatagaagcaggatcttattaataatacaagtctttaaaaattgaattttggtgttgaaatgaatttatttgtgttatttagtatttttgagtggtgcattattactcaagactttctaaggaaacctaacatttagaaataaagcaatcctccaaaaagggctatctctctgctcctccagctcttacatatcatgttgtcaatatcatgctaaggttgtaataggaagattgtattattgattctgctcttcaaccagagattgcatgcagagcagcaatggtggagttacttctgagaatagaaaatgaattggaccttatcttgggaaccctatgaattagctgagttacctccaagtctctcaacacactttttgtctggataaatcagattgcctacttttccttaaggtcaagaaatatgatgtatttatctctgtctttccagctccatttctggcacaggataaatagatgctttgaaattggatgaataggc

SEQ ID NO: 1881224 - DNA, 4001 bp, Homo sapiens
gaactgccagggctgcatgacaatagctacaaaagcctccccctttgcttcaaagtgaaactaactctgtgatgtagttcatgttcctagtgggacagactaaagccagtctccagtagggatgacagtcttgctcaccttctcgcctgcccaattctgctccccttactcttctcctaaaagcactcctgacgaaaatcgcctcagcatgaatcttggtcacaggttctgcttctaggaaacctgacctgagaccgggtttcaaagtgagacaattctgggtttgcgtctggacttccccgactgttaactatgtgacttcaggtttgttgggtaatctcccttgtcttagtttccttaggtgttaaatggagataatgatgcccactttgcgggtttgctgtggcaatgaaagggacactgtataaaagtcctcagcacagtgcctagagggtggtatggactgtccggagcctcctttgatcttttgctgactcgccttttggccttgggcatgttaatgttttcatgttgtctgtttccttcgtagggactcaccgtgtatctaacaccaggctacctcaccaataactagaagtgagaagtattggttcaagtggtaaagtacttggcaaaatgtggagtgcgggcataaagcataacgggcactaaccatacaacagaaggtggagatattgggaaagaagtgtctgggagttcagaggctgggagaggtgggtgctctggccagaggcttcctgggattttcctccccctaccccctcccaagtagcagcagcacagtgaacttgaagaccttggaaaccgcaacttggttttgcccaagtctgaggagtctgataaacccggaggcaaaaaaaggcaggagagattggggtgacttcctgcctatgccctgtctttatccagagttccttcttgtctttgaggtctagactcagttgtcccttcacagaagccttttccaaccagcccattttaagtgcccttctccatctcatggcccaattctactattttcccagcatttacctccactaggcagtagtttgtctgggtgtttgctgaggtgtgtatagtctgtctcctgttggaactcctgagggtaggggctcagtgtgtcctgctccctgctctttcccagctacacagtaggtcctcaatcaatacttggtcttggagtcactggattcgaatacattgttgataagtggtaagcaggtgcagtcgtttggaaacctgttggccatgtctaccaaagctgagcaaatgccttcttaagattcagcaattccattcctagtcatttatccacagaaatgcaaaaatgcccaccaaaaggcatgtaccagaatgttcacagtagcattttttgtaacaaccacaaaactggaagctacctatatcttcattaaaatagaatgaataagctaattgtagtatattcatacaaagaaatactgtgtacagcaatgagaaacaaccatcttcaaccataggcaaaagcatggatgaatctcactaacatgctattgagtgaaaacaaaccagacacaaaagagcacattctctatgattctatttacataaagtacaaaaacaggcaaaactagtcctggtgttggaaggcagggtagggattgccccgattggtggaaagagctgagggggcattgagagtgcaggtcatgttctgttgcttggtgtgactgctagttaaacaggtgtgtgaagttcgtgaacaagcatctagctgtgcaccaggcacctttgatactgcaatgaaatatacattacaacaattgcatggggttttccccaggacagtgtagccagtctcagtaacatttccattaaataagacttgctgggagcttggagccccagagttaggagctcactcttgcagagatgtgcgcggccccacccgccctgttcttccgacgcactgccaggccagcgagcgctcaccgggctgcctaacgcgcagcggaggggactcgagtcccgagacccggaaggggccgcccagcgctctcagccggctcgtagagccagggccgggctcagggagcttcagagcaagaaacaccgaaggtgtaaagcccgagcgagcagctcgagtctcagtcctgcagcctaaggcagcccctccaagccgtgggcgccggccgtccgtctcctcaccgtggcgccctttactcggccacccggggcacagccaggggcttcaccgagccccgggtccaccgtggtcgcggccgccggtcgccgggagcccggagccgggacgcgagggttgggggttggggatgggtcccagtgtcgcgcgggagttcaaagcccggcactggcacggggctccgccgccgcagccgctggagccttgggctcccgccgcggggagagcgggggtagggcgcctgtcccggagtgacccggcggcggaggaagggcgggccgcaggcggcgggcccgggggaccttgagcgggcgggcgaggagcgggtgagaccgaggtcgacagagtgggggccccacgaggcccgcgcctggtcgggaagagagtaggagattcccccgcgagctcagacccggcactgagggaagagacactccgagtcctgcgtctccaagttttgctccaatgcccttgacattgaatgcatgtgtggcgtctatcctggcgcaggcgatttgatattttcaataggcctaacctcaccagtggcgtgcccggcccggctggctagcggctcctgtccccaagacccccgcagtcaccagacctttgcactgcccagcgctggagggggcgaccagagccttacaggctccacggtgggcgggctcttacctcctgacttattcctcctggcgctgcaggggggactgaggttaggtgtccggtgggaggctggactgtgtgtgcgtgtgtgttgggcggaggcgtggggggaagggaagtggagggtaggttgctgagcccagggtccgtaacagcagcacatcccaggttccacccccacccacagggctggtaaatcctcccctttcctggggtctgagtgagaggatagtacaaaggtcagattgtccaaaaggatagtgggttctgctgtgagatttaattgtgacggcatcaccaaatggccgttgaatttctcgatcatttcacagaggaagacatcctattttgagtgtcctgaagtgattttaattttcatctgggcaggtggtgataacttctggaaacaccaaggactaaaaaggaaggaaactgcagaaagtggggggccacagaagcagcagctcgcagtcatgttccaagactagcaatccataaacattgcttgccctgggggggggaaaataaagatttcgccaatactgcatctcttcgatttttacccatttcctttacttggtcctatttttacttggtcaaagaaacacgtgtatcatatactcagaatttccccttaattataagttttttacaaaaagtcaataaaagacaaaatgggaagtgttgaagcactgtccagaaactatagtaatagcaatataaaaagaagggtagtgaactgaccttagcaaatttgctctgccactaatttgctagtcaagtgaccctattttcctgactctgtttctttagtaaaatgtggatgttatcataggtgaccgcagatcctgaagttcctttgtgtgtgggggggggagggtgggtgagatttaaaaatttgattcaaataaatttccattcgctctatggttcaatatttaatgccctgcctgttttaagctgaggaatagatgtctgaacatacatttcctcatcctaaatccctttgatcctctcataatgctcaaagtgcagtgttgatgtctggcaggctttgtgttcagtttgtaccatttgcaaatgtagtgaggattacagtggaatggaggaaagaatggctgcaggatttctt

SEQ ID NO: 1881225 - DNA, 4001 bp, Homo sapiens
ccagtatggggtagaagaaaaggggatggggagagatcctctgcctccctcctccctgccccaggccccaactccaccagcatctcgatggaacatggccacgtccaggtcagtggggccagcatgagcctggaggctgtggtcagtgtggtcagcggctgagccatgtcgaaccaggacattgtccctggaaaagcaggagcccccccaccatgaaagagggatgtgatggggtgccttggaggctggagtgtctttgagtgcacagccagctgcgggtggaatggcatccctgggtgtgtgtggtgggaagcatttagggcagaggcagaagcagggccccagatggccaagatgggtggagccacccgccctaggacctggtcagccaagccctggtaaggtggggctggactaagctgagtgttccctcacaaggaggctcttcctctcacctgaggtagctgcggccccgctggctgtcctggtcctgggtccggccggagcgggcactgctcacagaggagacggtggaggcgcccagagtgatgcggatgaggccactctcctcaaagagagccgtgttgttgtaggccccaggtccctgggggtggtagggacagagtgtgagctaaccctgaagcagcctaaaactctggcttctcagggcccccatcccgactcaccagcccaggtgctggccttgcctcctcaggcgctgccttcctgcccagacaggctggcatccaggcagcccgagcatctgcatttaggacacagaagagcagcagcaccgccaggccctgtgggtcagcgagggtcaaagcagagtcggcagggatcaatcagggaccagtataagtcactgtgggtcagcaatggggtcagtcactgtaggctagtgtgggtcagtgaggagcccatgcgggactcagtaagggagttggggaaggtcagcaggggagaggatggagcagcaggagtggctggagtctgtaaggtcggtgtggatcagcaaggggtcgggagccttggtgttggtgaaggtcgatccaagatcagcactcagtctgggatcagtgcctaagttagagtcagctccaggcctgggggcagcagctagggccagtgtctggtctggggtagtacccagcctggcaaagttatccagtaagagtcagctccaggcctagggtcaacgtctgcctagggatggccccagcctactgaaggcccacctggttctggggcaagggaggggcaccagagtcacctggaggccgcagagtccagcatggaggtagtggaaggctaggatgctgtggttgactgccaggagcccaaagagccaggaggcactgaccagcagaagcagcaggaaggagctgcgaagggtcctgctgtggggacatgggaagacacaggaggacatgcaaggctcatgtaggactcatgcagggaacacgggaggacacacaggggccacacacgaaacgtgaaaaaaaggaactcacacgggaacatggaggtctctggaggacactgggggagatgggaggtcccacaaagaaacaggagagcagtcaaagagccatgaggacacgtggggaaaacacaggggtatgggagccacaagggagggcacggaagacaggtgggaacacacagggcagggggcaaagtgagccacccaggccatgggagactctggggggacccagaggacaaggagagacagcagggcagaagcacatgtggggctacagtatagcgagggcgccagagagggaccacaggtcagggcaggtgtgacttcattccttcatctagaacttggagcccaacctgcaccagggaagatctgggggccccagaccccacccaggagggacctgccatcctgagaagcccccttcctccagccagccaactcacagtgcagaggtcttcttggcctccctctgccctgtggagcaggatgtgcgggcagcgaggagaaacatggtcccgttcatctggacccacggccagacatgtggggccgggcagggcagagagagagagagagagagaggcaatgagagacagagagagactaagattcacggagagaggcagaaccagtgagaaattcacacatatacacacacaccaaaggagcttagcatcacagaaaaagaaattgggaaccagagagggactgagagagagaagcagagacagaggcagggacaggcaactgaatctctgaccccgcgcccccatctccatgccagttgaatgggggtggctactgaccagaggacagaaaaaatgaaggccgagcccaggaagcctgcagaatgccacctgaccgccctcagctgagtccactgcacctcctcccccaatgagggagggaagtacagagggggcaccaagtccagggcactcaccactatgaccaggacaacagggccagcaaagctccagatgaggggctcgtggactgagatccagcagaagtcagggttcccatagccctcagggtccaggcccacagcaaggccttgggaagagaaagggtaggactgagggtgtgtgttccagagctgctgaccagcccatgtatgggagaaagcatgggtgagggcagagcagcaaccccatgaatagatggcttggggtttgaggttgggggtcatgagcaggagtggggacagggtcaggggtcaggccatgtgatggttggaggttgggggtcacagccctcacccagcagcacagcagggacgccccagcccagggcatggtagaagcgcatggcgccgcggtccacgttgcgtggctcaacctgcatgcggtagaggtgcagcccctgcacgaagagccacgcgaaggtgctgaggaagaagtagtgcaggaggatggcgactgcagtgcacaccagctgagggcaggggggcgtgtcaggacctctcctgcctcacccacctctgacccctaccccaggcatctgcttcccacctctcacccctaaaccacaatatcttaccccagcatcctgctgaaaaccctggccccaacctgagcatccctgacctctgaccctgagttttggccccaggcctcctgggccagtagggtcatcaggacacaagttccctggccctgatcctgcacctgattgtgggtcctgtgaatccccagcaggaagaggagctctgccacccccagggcggctgccacattggcatggatcccacgcacattggacttgaggctgcgcaggctcagcaggatggctgcagtcagcaccagcgcagccacagacacagccacgaccacgtgggtgaacacagccagcagctccaggtcgccctccagcctctacagagacagggatggttgatgggttgttgggcagaatccccgtgtccctttgaccccccacttccttgggacactgaacacagccccacctcacggggagaggcatccatgaggaccccaaaggtccctgtccggctgcagcgacaccgtgcgtgggacccattcctgtgcaccagctcgcagtcccgtgctgtccacacaccatgctgctccgccctgcagccacagggcagttagacacaactgtgacccagtgtcaggcaggggtttgtgagagatcatgggaagggctgagggtgcctggagttggggtacagcattcctcatggtccgggttgcacaacagcactagtgggggccccaggggaaggctgggactattagttggcctcccaagggctaacgggaccaagggtttccagaatgggggtcctcacaggccaggtgggtcccactgcacacagatcgccttgctccgattcgctgtctgtagcaggcgaaactctaggctgatgggggactccaggattccccttaggaagttgcgtccgtggaacacagccacgctgaccaccggggagttcatgacggggttctgaggaagcctggggagacacccatctgggctt

SEQ ID NO: 1881226 - DNA, 4001 bp, Homo sapiens
ggcatgtgatgttcccctccctgtgtccatgtgttctcactgctcaacccccacttatgagtgagaatatgcagtgtttggttttctgttcctgtgttagtttgctgagaataaaaccatttttttattaaggagaaagaaatgggctaatttggggaggtggtggctgttaaggtgaaggtaaccaagatcagcatcagaaagcctaaatcttcaatttgtgttttctgtactacagagaagagaatttcagcatgaagattacttgagaaagcataaaaaggtaaaacagctggaaacaacaatacagataatacaaaaatgattattatgtgatatggtgtgaatgtaccccccaaaaattcatatgttgaaacttaatcactaatgtgatagtttttagaggtgggaactttaggatgtgattaagtcatgagggtggagccctcatgaatgagattagttcctttataaaacaggtgtgagggagctgcctaccgcccttttacccttctgtccttcttgccatgtgaggatacagcatctctttcttcttgaggatgcaacagcaaggtaccatcatggaagcagaaagcagctctcaccagaaacaaaacctctgggttccttgatcttggactccccagcctccacaaatgtgagaaataaatttctactgtttataaattacccagtctgtggtattttgttgtagctgcacagaggggctaagacattacgtgccaagcactactttgaatgtttaacatattaactcatttaatccttgcaacagctattaggttggtgcaaaagtaactgtggttttcgccaattacttttgtaccaacctaatatatgaaaggtgggctaatgttatctctatcacatatgtgatgaaagaaacacggagagcttcagtgaactggcctaggtcttaaaacttaaaagtcacagaattggtcacagaactgggcagtctgtgtccagaatcagcactctccaatgttatgctatctttcttcaaaagctgaacaaggagaagaatgcacccattcaaattataacccgaggtacccaaagatgaaaaaatggcaaatatttcagtttcagaggaggaaactatgttatgaaatactccagaaaacaacatatatttaagtgtatcatgccctttaaataaggagcgatataataatacaaaatgtgtacaggagaaatgtggccaccaactaatcagaatggactctagctagactggtgcaatcagctgaatatcagccttcttcaaactatgggagaacaagctattagagtactgagtttaaatagtaaatatttctattttgtctttattgtaatgaacaagccctgtctttagctcctgctgtgcacttttggagggtcttccatatggttgctcctaagtattttggcattttcccaactgttacaattgggtcagtgggggggattgtataggagtaataaaacaagggtgactgcagcagggaggagtacgattactacacacataacagcttattgcctctcatgcgttcaagcacagctctatgccattcattacaacagacagccagggcaaactgccatagagctcactccagaaaaggcccggtcttgagtgcagagactaaatcttctcacttacatgtcttcctaatgtttccttacttcatcttcccatatcgagaataacttgaggagaagcaaaacaattatatcttgcatattactacgtcattcttaagaaagttttcttgaacagactctcagctaacttttagcagcagcagcagcattatcagtggctatgagggcttggatatctcaggaggggaaaaatgggaaaggctggcctgattatcataaataataatccttgagacatgattcataaatccagaagtggctaataatattgacattattgttatagtgtcaatattattagccacttctggatttcttccatatcagagataatatttatgaaaaaaaaaatgctaccattatttttatcctgtggaaggcagtgttgctttaaacagtagagactatatacaggtacgcacgcataggttgtattttccattttatacatgcaaggattctttaaataattcattacattttttctttaacatgatatgcagtttttcacaaaaagcccaaataaacggctgtgaggaattctaataggatcaccgtatagccatgacactttatgattcatgatttacaagaaattaagaaatagagctggagacatttagaccagcctacaaatttgtgtgtgtgtgtgtgtgtgtgtgtgtgtgtgtgtgttttaatgtttccaggcaagaaccttaaacaaaaagtgtagcattaaaaaacttcccttcgtcctcgagacccccccaactctagacactggatccccggagacccacgctgggtcgtcggagtctggagccgggggcggcaggtgagcggctagggtcctgcaggggtctgcgcggtgcgggggaggtcgccgagtcagtcagtgccgaaaggaccgcgaactccaggggccaacaatcaccgggtacggaactcaacgtttccgccagttcctggattactcgagtaaaaacaaacaaacaacaacaacaacaacaacaaaaatactaacagcaatgggaccgtaataaatcaactcggagtgggtacaggcggttccgggacaacccacacttagtctaggagcccggagatccctcatccagctttccccggggcaaggggtgaagcgctaagcaaggctgatcactgtcctcaatcatcacccaacccgcgcacagaagccgtggccccacgctctcctatccccgccagctccagactcgccccgctgccaactcccggtgcaggaggaactggcagccgcagacgtgaggaaagcggccgcggcttcaaactccgtagtgcgcaggcgccacacaacgcgcaggcgccgcctagaagtgacttctccaaaaagtgtgttagttcccggtcacctgagctccgggtgacgcggctgcggtagctgcggatacaagccttccgcgggtcctgcctggcgaccccgacctcctcctgctgtctctccgctccgccaccccgaacccgccaaggtcctgtccttttcctcctgtcctttgccagcgttgggccggaccgggccgagccgggccgcccgggcgcagtctttaaccatggcgtccctcttcaagaagaaaaccgtggatggtgagttccaggccgggctgaaggggcccagctctgcgttttctcggcgtctttcgaggcctgctggccgcgattctgcctactgtccctggaggcggggctggatcaagtggtcccacaggtgaccgccctcgcggcaccacttctctgcctccctcttgcttctgactcacctcaccttaggctcacctaggcagtctggttgcttccctatcctcacgattcccccaccctcgggttttcctcagcaggatcctgagcgtttcgaggaggctagctggcccttgagtgtcaataaacttggaaatctgatggatttcttgttggtttcctctgcttcgattgttgctcttcagttgggcgatatactacttgtaggcatccatacaggaaactggcagtctcggaatggggagggaggggataacaggctccagttaggaaatgaagttgggtctgggtcagttgcttctttaagaacaccccatcagtaaagagatgtgaaacaaatgcttttttgattaaccccagtagaaaaataaacccaagggaagtgcccagatttagttttcataatggatttttctcccttatgattattttttgccaactaaagaaagagatggggtatatattgtcttcatagaagtttaacatgtaaagataattgtgttgtttcccgcatttagcttaatatcatcttaagcggggaaaaaagtgaa

SEQ ID NO: 1881227 - DNA, 4001 bp, Homo sapiens
tcattattgctttaaaaatttgttacctactcattgtgtactaaggcttctctacgacatacagaagaggccggtgcggtggctcacgcctgtaatcccagcatttcgagaggctgaggcaggtggatcatgaggtcaggagttcaagaccagcctggccaagatggggaaaccccgtctctactgaaaatacaaaaaaaaaaaaaattagctgggcatggtggtgggcacctgtaatcccagctactctggaggctgaggcagagaactgcttgaaccttggaggcggaggttgcagcaagccaagattgccccactgcactccagcctgggtgacagagcaagactgtaaaaaaaaaaaaaaagaaaagaaaaaaagacatacagaaggaaatcagggaaaatgggaaaatgaagggaattaacaaattgcaataatctttaagaagtagagtatgaacaattttccttttctaggatgaaagctaccaacaactgaactcttagagtgagtgatggcagaaaaaaatagcaatcaagaataggggcatgttagtttttagacatgtttacaaaactctgccttttatttcttaaacccataggtcaaccacccatcatacctacattaccccatatgacaagtggatttgttgtatgtttcaagtttttaatcttggtgggaagggggagggcagagaagtatttattggtaaaatatcataataaaggttgagcctgtcaatgattgtacctaacaataataaatatgtgtaggaagtaagaacggcaaaaatgaagccgggtaggatactgtggatatggtgacagacaagtatctatacgaaatcctgagatatttgtcctccatttcataaattaaagtgccccctcttttgctttacagataaggaaactgaggtgcattataatagcaacagcagctgatgtgtagtagatccataccacaagccaggtacgatgtcaaacatttaaatgtatcatttaatttaattttcatagatctcctacaagacaagtgctattattttcattttacatacgagaaaactaaagctgacagagattaaataacttgtccaaggttgcatagtaactaagtgaaagagccaagatatgaactcagatctgtctgatttcaaaacccaggcccttaaacactaggccagtggttttttaaccctgattgcacattagaagcacctggcaagcttttaaaacctactgatactcagaccctaccccagaacaattaaatcagaatttcttgtacctgggccctgatgtgggtgtttgtttcaaagcctttctgggtgactgtaacatatagcttgggtaaagaagaattgttgggtgtctcccatggaggtcagtatatctgtgccaatatgtgaggtagtacaagactcaagtgtcctcagtctgtctgcagtggtttttcccttgccccatcatgttcactttgacatcttttttttattatgatttttggagaagtaatatacaagtgacaatttttttacaaagcattgtcacagcagaacatggtcataagtccatcaaagagaaacctgttcatatctatgtacaggctatgatgaatgaatacaaagaagactatgtttattactctcatccccaaagggaagtataaagctggccttaaaagctgttcataccaaagctaatcactaaaatttggaatggcttcctcctctcctttcacaaatgcaatagggtagccactggatctaaggggaaaagatccaattaccactctttacaatgctttttcacttaggatctcaagacgactgacagtcattcaaaacataaaagtaaagtgaaaatatctctagtagaagtgaaaagaaaatgtctgtagtaggaagaaggcctaaatttgtgtctatactctgccactttactgcaatgacttgaggccaaaagtaaagtgacagagtatagacacaaatttactgccatgacttgagccttgatttccttttctatatgtacttaagccatatcatccttagggcagtgatccaaaaaatgtggtccccatcagcatcatgtggaaacatatcagaagtgaaattatcagtccctaccctagactctgaatcagaaacttggtgaaggggcagtaatctgtgtcttaccaaacattgcaaataattctgaccacctccagctgactctgatgtatccacctccatggggttgttgtctaagaataaaaggagatggtccataaaattgttattttttttactatctactgaaatcagaaatttcaaaattctctcacagagatattttagagaaataatgttacagcctacattagttagataataacctcatttctgaatttcactttgaatgtgtagacgaggcacaagtcaaccagaggttatgcaattagcttggagtcaaagagaaagcaaggagtagagctgagaaggaaaccccagtgtgaacttgatttttattcaatcaaactgttaaggtaccaaccacgcactttcatctataatcacaatgaaccttttaataaacatgtttctatcctcttagcttaaaaaatataacagtagctttttggattttaaaacagattgacttctatacttctgggctaaaggcagctcaagagtcaataagaatcacaagctttccacagtgagaagaaagtgcaattgcccagtcctctctatctatgaagtgcagacagtattcctcttcctcacctcacactttcgattattgcaatggtggaaaccatgataaataaaagcgcttatctagtggtttggttttcactaaaattacagacttctgtaacattatttggataccataaaacacaaaccaaattttaggagatgctttagggtgttttttcccctgccctcctgtcggaagccctctatctttttactgtaatttatctgatatagctaccaagatgcttgatacttttacatgcaagggtgctgaaaaacaaagagcgagggaatgggttgttaatgaaattctctgattgtaaaaagcactctggaatgatcaggtggtaaataataataagaggaaataacataaagtgcttaggtgctacagcgatagtcaccatataaatgcagaagagatcagacatgaatagaatttgcattttatgcagctgctgtgtgtgtatatagaatatacagtagctaatttttcaataatgctggtaaaatattgttcaaaatctattcttgctgtcttctcactttaaaaggcattatatagaaaaacacccatctgtcctagtgcaatggtgaatgtgtgcaaagagcctagaaaaagagcctctttgcatacgtgaaaaaaaagaactcaaataaaaggagataatgaagaagagacaatagtaacactattagaacagctatgcagacaagcacaaaggtgatctttgaaaaacatcagggataaataactctgttaatgtgtggcagagaaactacagttaagacatacagtaatataccaaaaatatagacatgcttttattttgtctactgggctattgtgatagtgatggttgtttttgaatagaaaggaagaagagagtgggaagtaggatttcgttgtttgttgttactgttgctgctcagtttagaacaacaacatcaactacacaccagacccgtccaacagttccacaaacaatgcttaccatgaatctgccctcaattttcttgttgttattttcccttaatacttattgataacccaatgcccattcattagatatgctaaatcctcgtccatggttactctcctttggaagagactgagaagatgctaagagggagttcctcttacacataagggaagagtctgtttaggaatctgagaaagcagaggccaggataaagagaccactagtcaatcaatactaagcaccgaagactgaatcacccaaagat

SEQ ID NO: 1881228 - DNA, 4001 bp, Homo sapiens
aaaaagaaaggaaaaaaattaagtatcggcaaggatgtggagaaactggaaatcctgtgtgctgctggtgagactgtaaaatgctgcaatcactatggaaaacattatggtgggccctcaaaaaattaaaaatgtaactgccgtatgatcccacaatcctatttctgggtaaatatccaaaagaactgaaagcagggtcttgaagaaatatttgcacactcacattcctaacagcattattcacaacagccaggaggaggaagcaacccaactgtccatcaatggatggctagataaaatgcggtatatacatacaacggaatattattcagcctgaaaaaggaagaaaatcctgtcaacaactacaacatgaatgaaccttgcggactctacactgagtgaaataagccagtcgcaaaaagacaaatacttctatgaggtttctaacatgatcaaattcactgaaacagaaagcagcacgttggtcacaaggggctgggaagtgagaggaaaggggagcagttgtttattcggtataggatttcagttttgcaagacgaaagtgttctgaagatttgtttcacaacaatatgaatacatttcacactcctgaactgtacatttaaagatggtgaagatggcaaaggggtcatacttttgaaactagtatctacaaataaagatagggtaatgtccttttataagggctagtgaaactattagattttaatagagtggcaacaaatgaactggtaactaaactcataaatggacagtattattacataatccactttcattctgaaatctctgcagaaataaaacactgcattagaataagcttatttattgcagacaaaatatacaaatcacatgactcaacttactcaagtctctaaagccagcctaatcttgggccccagtttttctcatgcacaaggaaagcagatgagttctctgatcccgtaagaaataactgcaggggtttagactggtatgaagtctctatggactagcagtgtcatctcagatcccacacaccttagaatcatgaatgaactgaaaccactatggacctgaatacctgggctctgattataatcaaaccatatcccgtctactcaaaaaattttcaaacttaagcacaaaaaactggaatacaaaagcaagttttcaaattgctctcacctaaatcacagagtgaaattaagcagactttatcttcctttatacaaaaataatcaccaggtatgttttgggagtaaattttaaacaaatgtgcagttcatggacttttgttaagatacaactttaaatatttagctctaaagaaacaatacatcagctgaaattcaaaattagtaaaaacttttctgctttcaataatttttaaatctttaagccatccttcaaagatactaccaagtatctatcagcactagaccaatgatttctatattacattgcgagtatcaattataaaatgcactatttcatgtgtcagaacacagaaacactgtcaattaaaaatgacatataccagatattgaaatatttaacagttggtattttagaacaaatataatacagtacgtacatgcttgtccctctgaataatccaaaagtacaggaacctaatctatgtatcaactacagggggggacaccaaacccctagagactcaaacttttttaaatgcatgaaaagtcaatataaactaccagttcaaagaatcaatcaataaatgatcaatgcagactgaaaatccaaagacacttggcaccccaaacagataactagataactcactgcggcctaaacaagtgatttccaaattaaggaagtgaaaaatctaagcactcaatgactccaaacagctcaggtggccaagacccctgttctcctttaatccagtggtccacaggtaccaactcagaagacagagtgccacttactgagagaaaaaacctttcagtaagtggcactctgtcttctgagtcggatttttctgcaaacactatggacacaatgaactggtttagcttagggcagtttacaagcttaaagtacatttatgacactgtttcaaaacaatggtagagttgcaaaatacaaagaaaatcttatcagactaaacattttcagactaagtattaaaagttattcaggaaacacaagagaatgtatttattccgtagtatcaacaattatagcatggaaacacacagaacctctattaaacgttatctatttcaaaactcctaaaatctattacttgtcttacaccaaaatgtgatatagtaccacatcctatagaacattaaatataagtaaatttaaatgtcaaagtaaattcacaaccaatgaaattagaagattcacaaatataaacttagtaattaggaagctaactctaggccagacgcggtggctcacgcctgtaatcccaacattttgggaggccgaggtgggtggatcacgaggtcaggagatcgagaccatcctggcttacacagtgaaaccccgtctttactaaaaatacaatacaaaaaataaaaaattagccggacgtggtggtgggcacctttggtcccagctactcaggaggctgaggcaggagaatggcgtgaacctggcaggcggagcttgcagtgagcggagatctcgccactgcactccagcctgggtgacagagtgagactctgcctcaaaaaaaaaaaaaaaaaaaaagagaagaaagctaactctatcaaagttcaattgtacgtaagaatagacacattcaaaacaggcaaggcagaataggtcaaaaatgtctctgaacacagcaaacccatccccaatctagacagaaatataaatgtagattctgttatttcactaacgatttaattttcttaagttacagccatcacacaaagaaaagtctgcagtctatctatctgcctatctatacatatatgtatatatatatctctatactgttgcgaaaaaacatactttttttgcaacagtaactgcaccaaattactaggctcaatgttgatttagaaaacaaataactaaaaaatgctttttgctgtttttccagaggaatccaatttgatcatccattcggaccttaaacctcagaaattcaaatgtgtaaaaaatgtccatcaatgtaaacaaaaatggcaaaatgtgaatttctggagctgggtaacagttaaaaggcagttcattacactgtgctatgtatccttatgtttttaaaagtctattaaaatgttacatttttcaaaattgttcaggtgcatcaagtggtctttacaaaaatctttcattctaaaaccgtagagagcatccatttatcaataatgtacctgacaggacacactgacttgaaagtagtcttcaaatcacaccaacaattattctatcaacagatagatgtaaggccatatctgactggaagttactgaagaaataaatgtaatataattaagtatatgtcttcttatgttaaaatgttatatagttgataactaaaacaaaaaaaaaaaacttcattcttagaattggaagagacaaactttctagttcggtggtttgcaaactttttgaggtacctggacaaaagagccagacaagtcaccttgttttatacataggagattatacacaaaatatgagatgatgcttttaaaaatgatttatctacttaaaaaaggctttaaacccattctgtcatttcaacagctacattctacagctaatatggtggcatagaaaagattaaatgacttgggatatatcattcaattagtggcaaaagaactcaggactcttatttttccagttctttcaaacaatgcaccacttcaaattaagttacaattaagaataaaactttccattttcttgcctgtaaaatacggttactagacaagatcatctctaagattattttccaggtctaaaattctgactccatgaatgccaagctcaaacagaaatct

SEQ ID NO: 1881229 - DNA, 4001 bp, Homo sapiens
cacaccagcagtgtagaagtgttccctgatcaccgcatccacgccaatgtctactgtttttttgttttcttattatggccattcttgcaggagtaaggtggtattgcactatggttttgatttgcatttccctgatcattagtgatgttgagcattttttcatatgtttgtcggccatttgtgtatcttcttttgagaatcgtctattcatgtccttaacccactttttgatgtaattgtttgtttttttcttactgatttgtctgagtccgttgtagattctggatattagtcctttgtcaaatgtataaattgtgaagattttctcccactcagtgggttgtctgtttactctgctgactgttccttttgccatgcaaaagctctttagtttaattaggtcccagatatttatctttgtttttattgcatttgcttttgggttttcggctatgaaatccttgcctaagccaatgtctagaagggtttttcaaatgctgtcttctagaatttttatagtttcaggtcttaagtctttaatccaccttgagttgatttttgtataaggtgagagatgaggatccagtttcattcttctacatgtgggtagtcaattataccagcaccatttgttgaaaagggtgtcctttccctactttatgtttttgtttgctttgtcaaagatcagttggttgtaagtatttgggtttatttctgggttctctattctgttccattggtctatgtgcctatttttatgccagtatcacgctgttttggtgactatagccttatagtatagtttgaaatcaggtagtgtgatacctccagatttaatctttttgcttagtcttgctttggctccatgggctctctttttggttccaaatgaattttagaattgatttttctaactgtgtgaggaacgatggtggtattttgatggggattgcattgaatttgtagcttgcttttggcagtatggtcattttcacaatattgattctacccatccatgagcatgggatgtgtttccatttgtttgtgtcatctatgatttctttcagcagtcaaagaacacctctttaaagcaacttgataaaggccattttagttatactaggaacatgttgtcctattccggctgccctgaaactctttttgcctgtggttccaggcaagcagacaggctcaggatgagatctctggactcaggtagccctccctgatgcaggatttgtcagtatccaaactccttctccaggaacatgtgaacgataggggacttggcaatagccccagattcctctagcgcctccctccccataaggcacaggagtgggtctgcaatcacaggcagtgccctgggtgggccctccacaatgccacagatcctgacctgtggcctcctgaattgaagacagaaatgagggctgtccttgttagctacctccggggctctgtgcttattctagcagacactaaacatttttgaacttctgaaaacagcctcgactgtcgttctaaatttaaaaacaagcaaactgtttcattacttaatagacaaaccttgtgttgtgtttttttgaggtgggggagagaggaaggttgttgttttgttttttaaactaaaatactgtcacccagcttgcccagatttgattccctcttccccagattttcccgaatggagttgggctgtttccaaaaaccaaattagtattcaaaaacagttctgaagttttaatcaccactaaggatatattttttttaatttttaaatttaaaaaataaaaagtaaccccgcaccatcagatcaattggctgttcccagaatgcagatccacagttggaacacaggcagcatccctggcatgagctgcctcaaggccgtgctgtgaggagagtaaccctcatctggaagtggtcagtgaggcagtcagtcatgctatcacctactaagtgcctcagaaaccaaattccagaggacagagaggaagatggatttgacttcagagaaaacagtgtaaatgccccagcaggaggaaccagaacaactcccaaagagacaggggctgccaggggagaatttgtgtcttcagaggttaaggtctggtctagttccctgcctctgacccacaaagctctcatgaaagaacttggaatgtgagacggggcaaaaatccctgccaaaacagccatgaaggagccagaaaaatgaaggtgccacaaagcttttccccaattctctgagttacaaggccctggttccttcccagacacaacaaagtcaccttctcctggcctcatcatcctcctcttccttccccaagtcctgccgtgtgtaaaagaagatctctgcccaggctgaccagaggagagtaaggtattttcttcctggctttgcacattcattcagccttgaaaagctcaggccaggaaagaagtccaggagtatgtgttgtgcggtgctgcagtgctcacttcccagtgatggaggctccctctcactaagtttcttctcctcccatcagtgttctcaccggctcgggttctaggctctgggcacttgaagtgatgattgagcttccctcacaaaccttaggaaaatgtggccccaaactaagcattactaatgcacagctttgctcatcaagacatgtccacctggggctccaacagggtagaggaggctggagggataggaaagtggttgtgtaattcaggcagcacccagtcatcagcactaatgatggaaagagatactgggttgttgaaatgatggataatcaatattccagaataatggatattgtttgttaggagacaacatgattcttggcagctgagttgtcttcttaaagatctacttgtaaaaaacagccacatgaaaagaagactgttccagatttaaaactgaccatataatacacatacggaaaaaaagtgagaactggctatgtggggaagacatggaggaagttagagctcagagggacttatgacatcatttcccccattttacagaggaggaactaaggtccagggaagcgaacagattgccttgtgtcacataattatttggtggaaaagccagaaatgggcctgggttgtctaaacagggcactgttcacttggccacagtagtccaagggcttcacctggaaaagaaccatcattctaagcatgtgatgctgacctcccggcagtggctgcttctgtaatcaccacaatttcccaacacacaagtcacctcatgtgttcctacaccctgatgtcacagctgccactgagagccctgagccaagtaccatgatgattcataaatcactgcccaattctttaaagtcacagcattgtctttgtcaacagcaccttatgtgattctaatcagtagctgccatcaatttcatcaagttcaagtacaatcttacttcttagtatttgggtggcccttttaatgtttttcaaaaactccttgatagcttatacctcactttatgttcaccagaccccatgggtcaaaggtagaggagtgactggaaggtctatttcatatactccttgaagaactgacctgtaagtaaacacagttggtaactggggctgagagactatagcagaggactcctgagtcacagactccagttctttccagagcaagttggaagcaggaaaaatatgctaaaattcacaagaagtttcaggggcaagaaccttaagaatattatctgttaaccttcagacatatagaagacactggggtctgtggcaaattactcagcatcacacttcagcaatctctcttccttttctttgctttttcattaaagcataacttgcacaaagtatacaaatcataagggtacagctgggtgaatttctgcatatgttatacactaatataatcaccagaccaagatttagaacatttacagctacccagaaggctccctcatgcccccttccagtcaagaatagctattattctgacctctgtc

SEQ ID NO: 1881230 - DNA, 4001 bp, Homo sapiens
agccagagaaatattaaatgtgcaactcacataattttacaaacaagaaccaccaacataaaataagtggaatattgaaaatattcaacaggtagaacaagtcaaagaacatgctttgcttcctattcaggccaggaagggagagaaagagaagaaatggaaggtgaggagggatggggagatggcaaagtgggggcagaggggaaaaagagagacaaaaggattggggagaaaaaacagagagagaaaagcataaaggaagaaaggatgaggcacaaagaaaagaggagggagagcaggtggattttggggaatgctggacaattggtcaggcttggtctgcagaggctcagaaatccttacctggacatgagcctttgtttataattcttcactgttctaaccctgaaaagtacctctgttctaatccttaatctttcccccttcaggtcaagaatgcctttgagaatctggcagtagttctgaaccctgtcctagaaaaatacacttatttacatacaattttgcatgcaacttcaggggctcaaggactctatgttaaaaatacttattctagaagctccactctgattgggagacccataatggccaaagcaaaaacacctcaattgccagatgaaactaaaatgagggtgggatgtgttgtattcaagtcttcacattgagctttaatcataccattggcttcagtgacagaatttagggcctaagcaccttctcctggttactaccccaacagtcatattggaagcaaggctggttactccaaggggtccattgtgtacatggatggttatttcgcagtaaggggcctgtcaaagacaggtaacaatgtgtgagtcaaattaaccctttacagatcaataggattagtaaatcccatatacgtagtagtttccaaatctgaatgtacataagaatttccagtatgcttacctaaaatgtagattactagtccaaaatttgagagtatggatcagactgtttttctaatgagtttctagataattccgatacaggaaatctccaaaccaaacgctgagacacactgttctcagagaacattgcaagcctgagaggctgagcttctggtcccacaggtcagctgattatctactccttgcagtgcgattcttgtacactagggggtaggactgagcacatatacaagggcaccgcaagacgaggtttggactactgcatcaaaaaggctacctttacaggggaaaatagaatgagcaatgcagaacatgaaaggtagagtgccaggagaaaccttccaagggcctcgaagacagtagttcccagagctgacttaaaaatcatgataaaaaactacctggagcacttcttacaatccagattcccgggcctcaggctattaggaaacgcgctcacacacacacaccaagtttcctcagggattctgatacacacgcaagtatcacaacttgtttgtttatggcacttcaagcccaagggtattttgatcactataccagaccattatcataaagacgcttcgaaaaactaaagtgcccttataattctaaagcaaaaaacagtgaacattaccagggttttcttcttcttttctcttcctcttcctccccctctttctttttcattgaggaggctaattggagaaggtgggccacgctggaatgccctgaatgggttccagatggtgaagtcattggcctcttggcccaactgttcctcccttttccctggagtgctgtacaaatattatcattttctggctgtgcagtgacataaaaatggttgagaggctctaggtcaggtgtaaaagaaactcatggaaagggaagaacagctcggtccaaaagaaattgtggagatactttccgattctctgcaaggtggagaatcccaaatcagatgccaagctcagcgtggattggtttgggctcatcatgttgtccagtccccactggctttggcatctgatctgggattgtgagggggtgcggtaggtctcaagagaaatgctgaaggggcagccctgcttccggctgcttagcagagtggtggcgacagggaaacccaggcacagattgcagatcctccgcccagggaggatgaccacgataacaagactgtcttacgtttatttagaatcttcctttgccaaggcaatcgtatttatagtagttgctcattttgagtataactttttaaaaacattttgattttctgaaatttggatgtcttacaagcaacatgaggacttaatgtaaggcttttttccacctgaaaatttggtgtgaattaaaattgatggtgacttggaattgaggaaatacgttttattacatcatttaatctctaaataatctgtgaggcagatattattattctctattttctagaggaggaaactgacgcttaggtgatttccccaaggtcaaggattgagaaagtggcagagccaggactaaaatccaggttccagtatttcttccctgataatgtctgagcagatttgttcatacactaggaatttgggattgcagagtaattgctccagaactgctccaaaaactggctgccacccacagttactggggcagagaaagcaagaagtgactttccttttgcttcaagtagaaatttgagggaaaagaaatagaaatgtatataggtttgtatggtggctgtttgtttgctttaggccataacagaagtcccttgattacttcaggagcttcagaatgtaccatgctcattcctcataccacgatcacctctggtacgtgtgagtttaaaatggtgctcattcggtcattacagatttactgtttgaatttgttattttatttactttagaatgcttttcatttttagcaatcaggattctagagtgtcatatctttaaaagtctagcatttttatttctgccagttcaagaggatgcaggaagaagtttaacagaagaaaccgtcttcaaaataataaaaccccaaaattattctctacaatatccagtaagtgctgattttctagaaaacagttggcagggggagagagagaaggaaccacccctccccccaaactcaaagaaaaaataactactttggacatattatttctaatcctttaaaaaacactcttccaggagggtatttctttccattagacagatggacaaactcaaagggtttcggtgacttgcccacagccacacggctaacaagaagcatgtgttctgatagcattaatcagaaaagcatatattgctgacatggattccctgtttcatgagggcagggaccatcgctatcctattctccgctgtatcccaaagcctacctcctggcaccccgtaggctttgatgactacctatagggtgggaggatgggaggaagaaagaaagggaggcggaacaggtgtgtgtgcagccaggcgctccgtccaccctgccactcctcttctttggagacagtgctctgacaatctgttccatcaactccattctcctgcaactctcatcacactttcacaagctgcgcagattacgtttcctaggactgtgtccatccatctgcctcactggatgctgatccactctggtgtgtttcccagtcagtcactcagcaaagtgcaaccgagagccaaccatgtgcccggtactttccaagatgccaggataaaacggcaataatatgggattcctgtgcttgaggtttttacagcctgaaaaacaatgacctctgcatttcctactcagcaccgcgtgccatcaacatccaaggtatggggattttctgtagctgcctatcaaactctctcagctaccaccagtgcttctttctgctatatctgatgccttgttttgttactttcagaaacaccaaaggatggccgcaattgagggactcttctcaatagcatgttcttgtgcttcttcatttaggacacatctcccatgctgggaagtacaagacaaatacgagga

SEQ ID NO: 1881231 - DNA, 4001 bp, Homo sapiens
taagatctaaattcaggcagtctggatccagcatttatgttcctaaacacatctttgctcgcttcctgttatgagtgtgaaaagaatattctgtttcatagaagatgatcatcatcaggttttaccacaaaccttgcattggctttaggagtaaaacataaatagctatattttttctaatttctttatgttagttctaataaacaatgtattaaatacatatttttagggcattacatgcatatttaatttgaccaagctgatattatcgggtttcatactccttttttgcatcagtacacacattcaattttatatttgactttttttttaattgcacagggagccaattggcagctttggatcaaattggcttacatatatgttttggccagcatgacgtttaagaatttatttccttccttccttccttccttcctctctttgtttcctcctttctttctttttttctttgacaacatttacaaattgggaaattgaccatgaaagtctaaatttctggcttctttttgaaaagacagaaggaagcattgggtttgcattcaggcatggaaatattaggctggactgagaagtggctgaccttttagatgaagtttgtgttccccagttggccatagtttttaccagtttgctttgcttgatatctgcatgcatttgggttacggcagttgaatgaggtatgcatgtccttagaggccaagaaacaatttacttactgactgagctttagcatgagagagcataatgacatgtgagttaccggtgaatcaattacaagaggtacccaaaggtaagcgtgcagttgaaagtttcatatacaagtggttgtaaataaatagcctataactaaaaagtaagaatcatggtaatggttaaatgttcattgaatacatactaagcacaagatttcttataggtatcagtccctttaactcttgtaacaagcctaggaagtagaaaactgagacagaggcaagctaagtaacttgtgcaagatcaccagctaataaacagcgcagttaggacttcagtcaggcaatctggttctggaatctgtggcttatattatgctatactttctctctaaaaactctgaaagaactctctagtactggcagagaatgggatttactggttaattcatatgatggtttgacaattgctgtgtgaattatcaattgttaggaggtaagaccagttgagaactttaagcagtacttcactggggtttggcaaattggtagagagaccttgaatctagaatctagtgcttgactttataggcccagaaaccatatttcacccatttgtaaaaatcataatataaaatcaccagtatgtttgtaacccagaagtacaaaaagtgaataaggaatttgagatgccattatatacagaggtgagtggtaaggtctggtttactggcatcctgggagctcctggccagagcagaaggtgaacattgtcaaaattgaaacaagggatcaagaaagccaggcctgcctccaggttgaggtaaatagttcaaattatgaagttcaagcagctacagaatgatctgttccaggggttcaaaacttttttgtgcatcagactcacctgggggaagttataaaaacaaacaaacatagaaatgttctgctttatatttttagacctactaaagcacctaccctggagttctagtgagttactgagctaattctgttgcttctggcccactgattggtatttgagaaacactgttctagttggaatttgccttttgagaacgttaatgcatagtatcagatagatacgagagtgatagattaagatgatagctatgattcctgtattaattaatgcatgaaagtgttagccagcttatggcatgaccctctcacctgatttctaccaatctctccccagaaagaaatcagctgaggaaaggttggtagaaatcaggtgagagggtcaagtcataagctggctgagttggggagtaggcaggggtccagtcctgggagaatcagtgcagaaagcaactgaggcagtgccaatgtttaatgagaggcttataaaattgccacaaagtgaggccctagctacatgtcatgagaactccctggcagaggggagaaagcaaatttggattagaatgggaggtatcagctagaaaatcagaaatctgaccaaataatgataaacatgatagtttatgaattaggaagcagggaagtgaaaccctaccccacaaatgatagattaggaaagatttgagatgaatagtagaaaagatagtgcataaggtctcctctgctctccccagaactgagggatgattaaagttaatagcatttgttgggttctacttaataagtacaactttttggatttattaaaccagttggcattggttgtgttatgctataacaaactccaaatctcagtggctaacaaggaagttgacttcttgttcttctgacaacccatgtgttgtccctgctttgggtcccaggctgatagaatagtcgctatcaggaggatgctaccatggcagggacaaagagagctcagaggaaatcatgccaagagataaacattcaacaggaaagtggcatacattgtttgtgctttcagttcattggccagaatagttacatggcctccaccaaccactgggagccatagagtgctatgtgccggagggcagagagctgggaatatttagtgagcagcattcggtactaccatctttccctctgaataggttaacagccacaagtcctgtcacaatttttagcaatttcttcaatgtcaagaagaattatatttcttagctaacagaggtggtgtagtttcagggtgcctgcctggcctatctacagcactgtcagctccatgctcacccttgctgaagagatgagtctctctgttcaagttcgtctaatgtcatagccttttccctgattggaccagggaccaacacctatccaggtggctgtcaatctgttggctagcctgtaggcaaatgtattttctgagacacagagtctctagtcaaatggatgtgggcctatgaagtaaatgggtctgtagacttgggccctgggcattttgatcctgtctgtggacagtagccaatgatcatagatgaggaagattatatgcagttgagacaaagagagagaaacttctatcttcagtggttccctggatctcagctcctattcctgggagattcacctctgcttcattttttgtgaaatggctttatggccttataataaatattcattttatttgagccactttattatccatatgaataaattgagaagcctagtcactctgcctctgctgagagtatcatctgtaaaccaggactgtagaaattctgggactcgtgctagggtgtatagttgggaactaacaagaaaaactttcactgtaaacctacttgaactttattttcttattttctgtattcctgatgctctggcatcttgggcctcacagatctggagggatggcctctcccagcattagttaattcctgcagatatcaaacagtgttacctgggagggtctcttttatatgcaaactaagcaattcaaagcctactgtaactagccccctacctctgtgggacccttccactccaggccaatagtttcttgccctaatcagcccagggcgaggtgctagacaattccaaacagctcctacaccccagagcctgctgaaatgattcaacaagacaattctaaacctgcttagcctattttcctgccttgcccattcctttccacaaaactgcagtaaaggcgctgacccctgcttttcccctgtgccccctgcctggcttccacaagcgacttccctgcattgctgtgcctcctatttctagggaactgtgagtgcaaacaccttcttccttcatgacagtcattgtcaggctcacgtcttactataagtgatcaaaacaaacccc

SEQ ID NO: 1881232 - DNA, 4001 bp, Homo sapiens
cccagatgtgcagcccagccaccagcttagggcctcgggtgccttggaagaggactcagtctgctgtgtggaggaggaggaagaggaggaggaggaagcagtggtgacagaagacagggatgcagccttgggaggccccagggagcatgccctggactgggactctggcttctcggaggtgtcaggcagcacatggcgagaggaagaactgcctgtatcccagcgcccagcaccctcagcacagccccttcgtaggcagtgcctctcagtcagtggcctccccatgcccagcagggcccctgtagccagtgtaccacctgtccaccatccacggcccaagtccaccccagacgcctgcctggagcactggcagggactggaagcagaggactggacagcagccctactgaacaggggtcgcagtcgccagcccctggtactaggggacaattgctttgctgacttggtgcacaactggatggagctgcctgagacagggagtgaagggggtgacggaggtgggcaccgtgcccgtgctcggccccctcagttcctgcttggcctctctgagcagcttcggcgccggctggccagggctcggcggacagctatggcaggaaagcggctgtcatgcccacctcgcccagaacctgaactgcctgcggatgtctcacgctttgcagctctcatgagctgtcgtagccgccagcccatcatctgcaatgatgtcagctacctctgaccctgccctccagcctgggacaataaaagccttttttctagactgtcctggctccatacccctgaggcactaagaggcagccccagccctgtgaggcactgcccagggagacaaatcttctgaagagctttttttctctgtgtgaaggtccctgtcatgcccatgtcacacccgtgtgcattagtgcactgttttctatcgtccatcctctctgcaatgccttcctttaacaagcatttattgagtgcctactgtgggcttacaatgcagggcttgggatccggggctccattgagctaggtgacagggtggctgccttgtcacagctcatagtgcagaggtgggaaggcagtgtcctcgtcgtcaccctcacagctcagctctagcaccaacacccgctgcccaggagcaggtgcctggcctgtcagctgctgaaccagttctgtcaccctggtaggggtgggtttaggggagattggagaggtgagccatggcaagcagaaggcagcctggcatggactagagagggtgctggcaggccgtcaggagcccaagccaggagcaggagctgctcaagacaggaaacatctgaaactattttaggagcagctgatgaggcaagcaggaggcaggaagctatgggtcccttgggagtgggctgtgaaaggggggctgtgcagcatgtggggagcccatggggctggccaaataggcagctcctgaagactcctcctcaggctctcggccctcaccccacctccagcctgtttgctggctccatttggggaaagaatgcttgggaaggtgtgaggggcccagaatggggctgggaagacaaaaggcagtgtggtccctagccccagcctccagggactggtggggcctgtctaaagccccaagtgggctcacctgaggggcaggtgctgggcctgcttttcaggtgaccatccggccgcatagagcagggctgagccgtgcagcaggatcctcaccctcaacccgtgctgctcctagaggagaaaggtcagacaccagctgggccgggctgggctgagcctgggggttggggtagcaacagggcacacctgaagatgagccagcagcgactccagggtcctctcaggctgcccagctggtaccttcagacggtcccaagaggtccacttcaggtgatggaactgggatgaggtagaggaggagtcagagacttcttacctccccccaacccccatcccagttaccagcagcctttcctaggggaagagctggactagcaggaaacaggagccagggggtggggggtgggggggaggtgggatctgggcccagagtctcagccccctccccgtccaggccggggccagcacaggaaatggggctatggggcccgcacagggaaacagacgatccatcacatgggccagttgtgagagtgggggatgagggggtggtgcttcctgaggaaacccagagcagggcccctgcagcctctgataaagctgcttgttcctcaaagacaaggctgggagctggggggcacatcctgtcccccaatcttgtatgtactgccagtgccttgggctactcattgggacacaggggcaaagggcacagtgaccaccagggccccactgtcccagagaccccagcagggatacaatgcatagaggcttcctcctcctgtcccttccttccttccaagagtcttggggttctgggacctagagctaaggacagaaggatggctggcaggtatctagagaccaggacagggggtgcttatcagcccctgagaaaacacactggggtcaagctgagactaggctagaggtgagatgggggcttctccttcacctgcttcactctgtggacaaaggcagcctgtatgctggttagaggcagggtgcctcacaaaggggctctgtgtgctagtccagagggaccccaggctgctcagcagaaacccagtgctggcccatgacctctgccctctcccctcatgagggcattccttctaccctcatccttgccccaaggaaatgccaactgcagagcctgggcacaaggctggaggcattcacagcgctgcagtcacaggaacacaaatgcccacaagcccaggaacacacacatgtgtgcccacatgcatctccatgcatgcccacattgaggacacaggaagatgggagccctgcactcccatctgatgcacagatgtgcaaacttgctccttccatacccacactccggggatgcccagaccccagttgcactcacaactgtgacacaaatacactcagggctgcagaccccacacctctagtggcaagcctattaccttttaactcagcttgtaggaggtaggccagggcccccgtaccatgcagggggaagctagactctttctggggctgatgccctggtcccctccccactacctacccctcaggggtactccaaggaaggaggggactgtgggggatgtctggctccactaatgagttaaagctgcagctcccccagatcctgggctttggaggattgggggtggggatggctgacggctgcttcctgtgtctgacaggtcccagcctggcttcatagcaggaagagggctggagggagtcttcaggacttctgcacagtctgagtttcagtgagagccggcagctagattggggcctgtatgggcaggtgcaggggaaacccaggcctagtagggctaagggtggggtatcatgggctcaccgtctggatggctggggcaaaaggcatatagcggatgaggtagttttcagccagatgtaggtagctgtggcgaaaggcactacgaggccgtggcccactcaccaccttatacagctccaggcccaacaggcctgccacagctgctgtagtggtggcaatggctgggataatctggcccacaattcgcttgctctgccaaggacaagagatttggtctgggcccaaggcgtagggccagggtttgccctccacctccaggcccaagcctcaaggggtggggttacctgggcacggttgaccggtggaatcccgtagttctgacatctcaggctagctgccgctaccacaaagtccacatggaagttgctgtcatcatcctgtaaggcccaagtcaaagtagtgttaacactgcagctgtgcccctcaccgtggcccactgcgtgtcactgcacaagtctccacacagttctgtcggggggttgccccacatctcctcttgatcagacaggct

SEQ ID NO: 1881233 - DNA, 4001 bp, Homo sapiens
gagtatctaaacctatcatcttttagttatatatcctgaaagaagccttcaattaggaagtttcataaatacagactattgtgtgaattgctattttataatctccttttccacataaatcatcatattttaatgttaggatacatattcccacccaagaccacctcattttttttttaaaaaagcaaacagtcactgagttgctttgtgaactagatcataggtttacaccagtacttctaaagagtaaaaaaacaaacaaaaaaaaactatgactattttaagttgcagagaatgtaatttctagtactaaaaatattaacatattatcttagaactgttttatcactctttttaaggaataaacttggaatacaaatgctagtgactggatatccaccatctccatttaaaaaaacaaaacgtgaaattgctggactatgaaaagtttaaaattttttacatctttttccaactcatattttcactccactgtgtccacagaattttattctaaagtaatatatgattatacttgaaaagcttttactgatccctctgtcatacttgtctatatgtatgtaaactgaaatttaaaatggtaattaaaaaaaaatttcccatgaccataagtctctagatgtcaagaattcttctgtagctctctcaggtccttacttccaagatgacaaagaaaagaaaggaacaatgatcgtgccaaaaagggctgtggccagtagtggcacatactatgtccgatgcatgcccaaggaaaagaccattaagaagctcgtcgtgcaaaacatagtagaggccgcagcagtcagggacattactgcagtgagcaactttgcctcctatgttcttcccaagctgtatgcgaagctacattaaggtgtgagttgtgccattcacagcaaggcagtcagtaatccatcttgtgaatcccacaaggaccaaataccccaatctgatttaaacctgtgggtgctgcctcatgaccctcaccaaagcccatgtaaggagctgaatccttaaggactgaagagaaactattctcttgaggaaaagaaaatggaaattgtactttttaaagaagagaattcttctgtatatcattaaattataacaagcatatgattaattcaaacatgatttgcaaattttgacagagagataaaaacagatttggaaaatgcatttttagtgagttaatgctacctttcctctccaattactttatgtacactaatgtgtatatagtactatagtcaaatatcacttattatcacttattaagggaagttagagtttagcataaattatattgctttttggggtgtaaatactgagaaattctattcgcataagatgtgaaaagaagttttgttatacccaagtctctccatgttttgaactcctccccagttaatcaccaaaatacacacacacacacacacacacacacacaccatgatctagttatcaaaaaactttttctgtcatttatcagctggcttattaaaataaatcaatttttccctagaaaatccttagtaattctccacattgctaagatacaccatagcaagattctggatggtgagaagttaatggtccaaagtaccgcaaccttaatagtccaacctatcttcaatactttttacaataaccacacaaagtggtccctagtgaacataaacccttaagtgggctgaggaaacttatatgtcttcttgatagaactttctgcaatgatggaaatgttctctatctttgcagtccaatatgatagccactggccatatatgactatttaaacttaaaaattcataatgctcaatagtaacacgtggctagtagcaaactgtattggaaagcatatttacggccctctactcagtgtggtctgcagtttcagctggcactttgttagaaatgcacaacctcaggtctagtctcagagctacagaaatggattctgcattttaacaaaattcccaggtaattcatatatactcaaagttgagaagcactgtattagaaacctctaatttgtacaaaaattttccttatattgactaaaaacctgctttcccaatatgtccaccttctagtcttaattattgcttctggccgcacagtgcaaaattcaactcccctttccaaacagcccttccaagtgtggacctaacaggaagaggctgaggcaaaattaatatgagtagttgccctgactataggcttcgattacagtagttacaagtggatttttaaagcaaaagaaggggcagttcctatattcaccaagaatttgcattgaaataacaggaggtagcccgggggtggcaccaggcatttgtagtcccagctacttgggaagccgccaaggcaagaggatcttttgaggccaggagtttgagacgagcctgggcagtatggtgagacctcctctctacaaaaaaaaaaaatttttaatttggtgggcatgatggcacatgcctgtagttccagctactcagaggttgaggtaagaggatctcttttttttttttttttctgagacagtctccctctgttgcccaggctggagtgcagtggctcaatttcggctaactgcaacctcctgattcttctgcctcagcctcctgagtagctgggattacaggtgtgcaccaccatgcccagctaatttttgcattttcagtagagacagggtttcaccatgttggccaggctggtctcgaactccagaccttaagtgatccacccgcctcagcctcccaaagaaagcctcccaaagttgggactacaggcatgagcccctgtgctcacccgaggcaagaagatctcttaagcccaggagttccaggctgcagtgagctatgatcacagagctgcactccagcctgggtgacgtaagagagatcccatctaaaaaataaataaataaaataataacacaagcgattgattagctatacattgttctttgtatcacacattccaggtacattaagataatgggagaggcagctagtcagggacaaaattcctttaaataattgtcccggggctgcataggggagtatggttgaagtctctctgggctctgataaattttgtatacatcacagagttctggttgttctattttccttttctcaccagtaatttcccagctactgaattctctgcctacccacgttttcccggtctatttgtttgttttttgagggcagggtctcacttgtcgcccaggctggagtgcagtggcgcaatgacagctcattgcagccttgacctcccaggctcaggtgatcctcccacctcagcgtcccaggcgtgcgccaccacacccagctaattttttgtagagacggggtctcgtcatgttgcccaggctggtctcgaactcctggggctcaggtgatctgcccacttaggcatcccaaagtgctggtattactctcatgaggcaccacgcccggccgcaagtctaattttcttaaagagttaaatatacagaattcattcaagtgtgcttcagtgccagaaagcgttccaaactgggtttcccgacttttgcaaaacacgtgtctaagcgtgtgggtgaaagaacagacgactctcgaggagcccaacccctggcctctgtgcttctcatgcttactccccaaaccaagagtagggtcggtctgcctgcttggctcttttgctctcactcacggcccaactcctgtcaccctcttccatttccttgtcctccttcccgccaccaagccctgtcctttcccttcctaggccagcacctgactcagaagacgcggtcgagacacgatgccccgcagatcgatgtagatgggggaggaaagcccgctcttcagcacgaagtccccaaacttgaaagcctgcacgtcgtacagacccgtcaccaatggccccaaagctgcacgagcgaccgccattgtcgcgcgctgcctgtttgcttcaaattccca

SEQ ID NO: 1881234 - DNA, 4001 bp, Homo sapiens
aaacactcagtacacatggacataaagatggaagcaatggacaatggggactagtggaataaggaaagaaaaatggggtgaggcctgaaaggactgcctattgggtgtgctcactgggtgtcagtgtcatttgtacatcaaacctaagcatcacacagtgtcctaatgtgacaggccttcacatataccccctgaatctaaaataaaagttgaaattatttttttaaaaaagaaaatgtggtatgtatacacacaagggactactattcagccatgaaaaggatgaaatgtcatttgacacaacttggatgaacctgcaggatattatgttaagtgaaataagctaggcacagaaagacaaacacctcattatctcacccgtatttggaataaaaaatcttcatctcattgaagttgagagtagaacagtggtttctagagctgaggagagtggggtaaggggagattagaggaggttggtcaataggtacaatgttacagtgagatagaaggaataatttctggtactcttgcatagtatggtgacaataacaataatgcatagtgtatttcaaataagtagaagagagaattctgaatattcttacaataaaaagataaatatctatggtgatgtgtgtgctaattatcatgatttaatgattatgtgtatatacatattgaaacattacatgtataccatataaatatgtataattattatgtgacaataaaatatattttcagatagtatcatttcatatattcagggttaaaatatattactaaaattaattttatttgttttctcttacttttttaagtaactttttaaaattacatgtgtggctctattttgggactcacattgtatttctgttggatggtagttctctacaaaacaaaaacaaataaaaattgtcatgaacttcattaccccttgacaggatagcaatgtcaggtagaaagcatgggatgaggatagtgccgtcaggtagaaagcataggatgaggatagcgccgtcagatagaaagcatgggatgaggatagcaccgtcaggtagaaagcatgggatgaggatagcgccctcagatagaaagcatgggatgaggatagcaccgtcaggtagaaagcattgcttccaagatgtcttagtgatgcagagagctaatgagcacagggtcctggcaaagcaaccctggcttatctaaccgtttccattcttcatatgggggttaaatactcaggacaggaaacaacagaattttacacattttatcttaatttctaatgctgtgtgagtgtagaattccttgtataagtatgagaaaacagaatgtaattatcagatatatgaaaacatacagcaattcataagaagacaccatgggaagaaccaaatcaaatgtccaaatgtctttttattaaataaaatctcttcattcacaaacaagaagatccaatagaacattgtatctatatagctagaaaatgcagacaaagagaaaaaaatggaccaggacagaatgtgtgaagacaaaaatatttaaaactaatatatcaaatatagtgaaagcagaggtgaattttccaaagaaataataaagcttaagctttgggggcacctccctagccaaggcttcttctgagactctggaagatgtcttgcaagtttgtattaatgtcttaatatttgtttaaaaaaaaaagagagtcctcagttgtgtaaacatgaggctctgcaatgcctgtatcagaccctggcacagtgaaaggctaattgtaatctgcaatcatatatctacctctacccacagatagtcactgaacacctgatttatatcaggtaatctgaggaagaggtggtgagccaatacactgctgacctagccccaatggaacatgctttctattaggttggtgcaaaactaattgcgggttttgcattacaaataaatacaagtaatagcaaaatccacaattacttttgcaccaacataatggatggaaaaaacagattatagacatgttattgtaaataaataaataaataaatagagatctacagcaaacaaaactagtataaagaattcacccacccaatatatcggctcattccatttctaattgcccagtatttagaatatccaattgggcttccaagatataatacacaaataagttaattgattcaatttctcacagtagactatgtgttaatttgagaaatgaacaccatgagtgattctcatagtttatgtatgtaaatacaagtaaacatgagtgcacaaatacacacaagtatacacatatatgcacacataaagcttcaattttattatggggttttggatatttcatttatcttctttgaacttaaccatgttttcaataatttgggtactaaattggtattatactttaatcaaaagaaatattattaaaaccctaaattttcttcataaaaagtatttttcctctcaaaatgtcctactagaggagtagtgtgaatttgtaaacattgcttggagttgtataggtatgcaggcagaatttcatagaccatatcacagttacaagcttgccatgattccacagccatcttcacatgcactatcaatttgcctggccagttggaaataatagatatggaagagaaagaagggtggtgctcctccttttctgcttctctaattgactgtgaaaaatggattcctgcaacaatgttgatcaaatttactctatttgatattatttacctgaagaaggggacttctttcaaaaacaaaggggaaaatctaatgcaaaggtaaatatatcagcacatatattaaatatttttattttatttaccaaatggaataaaaggaaaaaagaggtaggctaatggcacaccgaagaataattgaaaacatgtttaatcatttgtttgtccacaaagcaaaggacaaatgcaaatttgattacaaagagtggtggaaaaggtaaacaacagtttggaaattatttctagttattcttcagaatcaatgaataaagaaaagaagtatgaaagtaataatgaattaaaatgtgtgtttccttgttaaagtgaaatgattttggggtgctgaaagtgaaccccatatttctccccactttcagataattgcctgatttatggctactgatacaatcattgccatatccaggttttagagtcaaatagtttatgactcggtactgtgtgctgccaggctaatctttcctgttggcaaatctccacatggtttgactgagggtcaccaggtagctttccatgctcaaaatttgcctgctttgtaggtgtcaaataaccagacattctattagggggaattctttcctatggaataaagtattaaatgctaatatgaggaagtagaaaaatataaaagcaccatccacatttaatacatgattaaaacatactgaatactttccaagtggttgataaccaagagcaagaactcacttggaatcggggttacagcagataagttttgataggcaacatgtggagagaccaagaagtgcctcaatgtgatggcaaagttgagatggaagaaacatgtcagggataggatggggacctaactgtataaatgaggataatgaaaagggaaagaggttttatatatggaaaataaactatctatagctagcagtagtaactgagattgcttagtctaataaaaggtgactggaagtaggtgattggtagaggttaaaaaataaaaggcagtctggtagaaaatggagtcaactatttgagagtcctacaagaaaaattcaaaatgaatatgaacagactatattgaggcaagtaaatatcagactaaaacattcagttagcttaccagtggcttctttttctatcacatatatttccccttttcctctagacttctatatacacatagctgatctctctgtgggtagagggagacttattctgaccctctttaatttctctctgatt

SEQ ID NO: 1881235 - DNA, 4001 bp, Homo sapiens
gaacatgccaaagaagggaatgaggcaggtttacggaggagagtttgtgggcatgggtatgggaatgtctccaaatgcaacttttcccataaaagaagtatctgactgccccatcccttttccaaaaccaaaggcacacatgaagatgggagaaaatgtggaggttctaagaacccgatggctgggtagcaaactcatccttctcgggatgctttcacctaaataaagcccaaggtgctatacacggccactaagcatatttaattctactatcaaagaggaagctactaccaggtccagtgaatagcaataaaactatttagacaatatcatcaaagccccaaatttatttgccactacattaaggcaaaacaatttaaaatattttaaatttaaatttaaatacattttaaaatattttaagtataatgatctagaacgtggaccaacaaactacggttgataggtcaaatccagccagccacctgtttttgtatagtctacaagctaagaatgtttttccctttttttaaatggttggaaaaaaaataaaaagaatattccgtgacatgtgaaaattatacaaaattcaaatctcagtgtccataaataaagttttattggaacacagccatgctcatccatttacatattgtctatggctgctcttgcagagttgaataggtactaaagggatagtatcatctaacaagccaaaaatatttactagctagtgctttacagaaaaagtttgccaacccctggtctagagacaaacctgggttgtgaaaaatactttttactgatttcatttaatactttatagttttccctggtatattcacacctattactttcattttatcttcactccaagtcagtgagttatatcctgtttagagatgagatcgcaagtttgaaagtggacttgcccaaggtcatgcagcagttaagaggcaaggccagggctacaccccagttttctgacctatatcccaaggtgttcacaacacacagctgtcttcttggatgcctgctaattgtagctgccgtcttttagacattctctccacatttgatagttcaccttagtgtaaagtccctccttcctaaaataggactgaaaacaaactgcccagccccacttcctgctaggatagagacacacaactgtggacccagtggcttcccaatctggcagaggcagttgtgggagaagcttctcgatggtggcataggcaacagctctcttggcagaccagttctgcagactatcaagaagctccacctgcagcctgtttcttcagcctgtccgacaattctgtgatctatctatatacctcaatgcattcttttgtgcttaatctagctactctgtggattctgttctccacaacgatgaccagagaccaacacaagttcagaagaaatccttataatactacagtgtttcctaaaaccttccagaacaacttcccaccatcattactatcttctaaaatccaatcccatttccataagatgttaaaggattctgtagttatgtaaataaattataaaacatcaagttaaacagatttctttactacaggacttctcagagccttaaaatgcatgtgtgcttcacaaatctccaagaaagggacaagtatacaacatttgaaaaatgtatttgaccactgaaccattttttaatatgtcttaccagtacagtaatatatttggggaaatattgatcaacataccttctacttggaaaaaaaagtttataattataaaatattttaaaataaggctgctgaaatgaggaatacaattctggaatatgttgggtgaaattatggaatgtattagggttgaaaatgatttcatgtactgttcaggggatatattttagtgcagccattttggaaagcattggcaatgattattttaggttaatgcaaaagtaattgcagtttttgccactgaaagtaatggcaaaaacagcaattactttcacaccaacctaaatagcaagtgtcttaatccttatattactctttaatccaattatacttctaggaatatttccttaaaaaaatctgaaatgtggacaattaccagatcctcagcccttatatacacttttgtgactttatgcaaaagaaaaaaatgttctcacttgagaaaaacacagaagggtactgctttgtctttctattcaggtcataacttccttatgattgagggaaaagagacaaaggggctgttattttcttagtggcatcatgacactatataaacatttatttagctctttacctcctacagaaaaaggaaaaaggaaagttgagaactttcccaagagtatctctattgttaattaaaacatcctcagccagatgcatggcatccctgtaagtgaaacagtgaagaacctgggcgacatgagtatgtagttagaggtgtcacgatgctgagctaacccgagggctgatgatgaactacaaaccttcaggatagatttttttctgtgggattcagtttaacttggtaaagaatatgataatgataaagaactgcatgttaacccttttaagtcaatctaagtatttttaaaaggtcctttaatactacttaaatatttaaattatattttgaatatgtatatacttaatacatataaaaatgatataaattttctgtctaattctgtggaggactgaaggaagcttcaaattcagcaatttgtagattcagatcatgtgactaggacagcactgccctctagtggtggagtatcatgctttcactttgaagcttctgatagatcaataagcacctttaaaaggttgaatctaagccaggcgtggtggcttttacgcctgtcatcccagcactttgggaggctgaggcgggtggatcacctgaggtcagggagactagcctgaccaatatggtgaaactccatctcttctaaaaatacagaaattagccagatgtggtggcatgcgcctgtagtcccagctactcaggaggctgagacaggagaattgcttgaacctgggaggtggagattgcagtgagctgagattacgccactgcactccagcctgggcgacagagtgagactccgtctcaaaacaaatcaaaacaaaaaaaaggttgaacctgggcggggcgcggtggtccacgcctgtaatcccaacattttgagagaccaaggtgggagaatcacttgaggccaggcatttgagatcagcctgggcaacacagcaaaacccccacctctataaaaatttttaaaaattagctgagcatggggaggctgaggaggatgggaggatggattaggccaaggagttgaggtggaaggaggacttggcccctcgagtttgaggttgcaatgagacatccatgatcatgccactgcactccagcctaagagacagaatgacaccctgtctccaaattttttttaaaaaaaaggtgaatctattgtttaaaacggaagttataaagagacagcaaacactcagaagaacctgtaactcttaaatagtgaatgccataaccaagtaaaggtattcagctcaaaggccactcttcaatttgctctcaagtgcattttacagacagagaaatcatggtctccaaagattagaaatggcctggcacggtggctcacgcttgtaatcccaacacttttggaggtttgaggcagaaggatagcttgagcccaggagttcaagaccatcctgggcaacataccaagatcctatttctacaaaaaattttaattaatggtgatgcacacctgtggtcccagctactcaggaggctgaggtggaaggatcgattgagcccaggaggtcaatgctgcagtgaactgtggtcactgccactgcactcccgcctggatgatagaatgagaccctgtctccaaaaaaaaaaaaaaaaaaaaaaagaaacaatttcatctcagtcacaaaaccacatgaaccaagaggtctgtgttt

SEQ ID NO: 1881236 - DNA, 4001 bp, Homo sapiens
aattaagatgagttgatgactagagagatggataaaagatttgtgataggccaggcgcagtggctcacgcctgtaattccagcacttcgggaggccgaggcaggtggatcacctgaagtcaggggttcgaaaccagactgaccaacatggtgaaaccccgtctctactaaaaatacaaaaattagccgggcgtggtggcgtgtgcctgtaatcccagctactcgggaggctgaggcaggagaatcgctcaaacccgggaggtggaggtggcagtgagctgagatcgcgctacggcactccggtctgggcaacagagtgagactccgtctcaaaaaaaaaaaaaagcaggccggtcgcggtagctcacgcctgtaatcccaacactctgggaggccgagggggacggatcacgaggtcaggaaatcaagaccatcctggctaacacggtgaaactccatctctactaaaaatacaaaaaattagccgggcgtggtggcgggcgcctgtagtcccagctactcgggaggctgaggcaggagaatggcgtgaacctgggaggcggagcttgcagtgagccgagatcacaccattgcactccagcctgggcgacagaccgagactccgtctcaaaaaaaaaaatcattgttaaaaaaacaacaacaacaaggatctctaataaagcaactgcagtaacatattaatggtaatatttaggtgaagtatacgggtgtccactgtacaattatttcagcatttctgtatgtttgaacattttcaaaataaagtattgggaggaagttacaaagaaacaaggatactttgagacaagagagaagatgaacagacttcgtcaaccctcttggtttgtttagggcacacttatgcaattctctaggggtctctgcttctctttgcatttttagaagaagacacaaatttagcctgtgattcataaactccaacatggcgaagaatcatctgtgagattaattaaaaaggaagattcttggagatctagccccaaagattctgaatgtagatggggcttgggaatatactttcgtaacaagctcttcatgtgaatctgggaagaaatccatccacatagagaaacactgttttataatgtgataaaagtgaaagccattgtgtagtagacagtagacgtgccatattttctttgctctgattgatttgggggtgcctgggatttagagactaatatttcacccaggtaaagaaatgggcatcccttacattttcttcataaattgaaagaccaaataaaaatgttagtgcttcatgagcaaatacttgtataggaaactcttttgatgggcatattcacacagaaaactgtcaccctcattaatgaataaaacaacttgcaatagtcaaatggtgggactcactatgttgaaatgagaaatcttacgtatggtgaaaaaaatacgacaaaaagaagaaaggaagatacactaaatttaggttttaaagaatattcactgttctcctttaaaattagatatttaattttttaaaaaaagaaagaaaaacattcacaagaagagagagcgattggggaacataatttgatgggacttcagccattcaaaaaataatgtggtagtgttggaggctgttgcaagaccttggttcttgtcttcttagtttaaaagaatttaaacaagagacatacagcaaaagagatgcagcataatttattgcaaaagaaaaaaaaattttgaaagctaagtacaaaatagacatcacaccctgagagagagagagaattcagggcaggctgctcgtaaggatgagacaacattgattattgctggaggttattgctaatcatgtattatttgcatgattattcataaggaggtgggaagaagtgttaccgttaggttcgtgcaagagtaatcgcggttttggccattactttaaatgcaaaaaccacaattacttttgcaccaacctagtagtaagcatcttctggttggtcctctggctgcacatgtgcagtagctgtgcacccatgttcctccctcaggtgtcccattagcattgtaaatctccacccaagggcatgttttttgctattataatgagcaaaaggtcagtttgaggacaggtaaaatcaaagtgctcatgctctctatagaagaaatttcctactgaagatagctttgctcgactgagttcaatcacaattcaaatgctgaggcttattgtgttgactgttggggtcaccatggttgctgcgtcctgaggatatgggcacttccttgactgcctatcctgcctcagtactactttttcagttcagagtttaatttttttcagcagttcctgctaaacaatttttcactggccctcttatcggtattagcacagttaggcaatactgtggatacaaagttagattatagacgctatcctacaatgataccacagtaatgtccacaaagaactatgttacaaaatagaaagagatatgtgttatagaagagatacaaattaaatatgttgctaattcggagcagagagaaataactttcagtttaaaggatcactacagtggagcttcaagatggggttaaactatacttcggtttggacatgcagatacagggcagaaagtattcaggcagtagggtggtatgaaggaaggcaaagaaagtgtgcataggcacagtgaatgaagggagcaggaaaggacagagtagttaaggaatataagctcgagatcaaattttggaaggctttgaaaatcaagctaaggaactgggcctttccattattgttgggtaatgaagaacccccaacgagttttaggaaggggagtgaaatgatcggagcttttccttggggatatttttctagtagccttgagcgcagtggttacagagatccaagtaagggctattgtaaaagttcaggagagagggaatagaagcttaaactctgacgttaatcatggggatggcaccaagagaaccttggaggtaaaaccagtgagatttgaggactgatttgtttagagagtaagaaaggaactggagcaggtgccaatatttcaagtctgggtaacaaggagattgagggagaataataacagagaggtaatataggaggcagtaactcttattgatgtcaaagtacaaatttcaaaaaattaaaaagataactttcatacaagcatatagtaagcctgcttcaaagatttatctaatttattaataggctgggctcatgcctgtaatccaggcaggaggattccttgtgtccaggagttcgagaccagactagaccccatctctaaaaaaaaaaaaagaaagaaagaaaaaaaaattagctgagtgtggaggcatatgcctgtagtcccagctacttgggaggttgaggtagaaggatcgcttgagcccgggaagttgaggctacagtgagccttgattgtgccattgtgccactgcacttcagcccaggtgacagagtgagaccttgtcttaaaaaaataaaataaaataaaatattgcctttccaacttggacccaacagaatggcttccgcaaagaagggtggccaaaagaaaaagggccgttctgctatcaacgaggtggtgacccaagaatacaccatcaacattcacaagcgcacccatggagtgcgcttcaagaagtgtgccccttgggcactcaaagagattcggaaatttgccatgaaggagatggtagctccagacatgtgcgttgctaccaggctcaacaaagctgtctgggccaaaggaataaggaatgtctcataccgaatccgtgtgcgattatccagaataaggatgaagattcaccaaataagctctatactttggttacctatgtaccggttaccactttcaaaaatctacagacagtcaatgtggatgagaactaattgctgatggtcaaatacatcaaagttataaaattgcaaaaaaaaaacaacctaatttattagtt

SEQ ID NO: 1881237 - DNA, 4001 bp, Homo sapiens
ttcgagtgaagtttaccaataagaatagagtgagatgtggaagaaaaagagataaagaaactgttctttggaagtcagacaaatgtgcacaaatgaagtcttcctcattgctgtacattgagagatgtccctgctttccttatcgaaactctgatctgtctatgagttattaacacccttgtcagtaatatcacttgtcattaggtcacaattcttgggactaccattgtctaggttcttctattccacatgctttgtttctgtgcatgttgagtccaacatgtgtgtatattttaggtagtgtcacctgtttggatatccacaagacctatttacacaacacctgttacaaaaactcaccccagatgttttcttgtttgttcagtttaatttattatacaaatcttcacatttgaaaatataagcaaaagtgattctaagccactacaggaaattcacaaaagcaacacctggtgtcaacatatttcatcacattttaatgattatgatgtgcacaggtgtgctgaaagtttctcctccatactctttgattcttttttaaaatttttttaattatacaagtaatacacttctagaactaataagcaatcatagcaagcttgtgggacaaaagttaatatacaaagtcaattgtcttcttattgctagcaatgaacaattgggacttgaaattaaaaacacaataccatttacattaatgccaaaaatttaaatacttaggtataaatcaaacgtgaaagatctatataaggaaaactataaaactttgctgaaagaaatacaaaagatctaagaaaaaggaaagctatccacatacgcagacaggaaatctcaatattgtcaagatatcagttcttctcaacttgacctatacattcaatgcaacctcagttttaaaaatcccaagccaaagtaaaagccatctacggcacacagcattccgaaaggtttgggctacctgactattatggcaccaagaaatctctggtatatgagaactttcactttaattcaaaatgttggatgacctgattttcagcagaaatgctcttcaaatcagtttcacttaggctttttggtgtgaagtgaaacgatgcagacaatgagctttggagaatgaggaaccactgaataacttactatggaagtggatactgacatggcaaagaaacgacagcctggagtttttaacagaatgttcccaatgagcaggacctgaagatgtttcttcgttccaaaggagctagcaaagaagtgattgttagcatcatatcaaaataactaaaagctataacacacactcttgaacgtctttcaaaacaatgggatctatgaaggattatgatatcagatcttgatactgtaaatattttgggccattctcctgaatgctttcttttgtcccatgaaaacctaaacttagggattctatgagttcctctactcagctggatttacctgtaaatgcctttgttgattgttgaccaatgtcccttgtaccttttccaatagtctcgatctgaataaacagatggttaaagttttgcaggaagtatatttttcattgggtcacaatgatcccacagattttgtaagaaagatgattttttaaaaccctttcatcttaattcagggtaccaagcaggtaaaaactaacattgaatttttacaggcaagtttcaatttgaacagtagggaattgctattttaatatgtggtccaggaaccaaaatcctagacctttccaatgactatgccaaaacaaactacacaaatatcaaacagaagctgttttctctctgaggtactgaagaagaggtacaaaagcttgccttaagttatccagatgtggggaaaaaaagttatccagatgtgatcttttggcagagaaaaagtttagtgagaagaatattttagcttggtgcaaaagtaactatggtttttgggcaaaaaccatagttacttttgcaccaatctaatggattgtctcatagaataataaattagccttctgtgaaagtaatttgtgataactgaaaaatccttgggttctggattcaagcataagtactttataaagtcaaatcaaagaattagtaaatgctggctgtaacttgaggacatcaagcatcactcttctactctggagttaaaaaaaaaagatacaaagtaaatttaaaaagttaagcagaacactggggaatttttgaaagccagtcatataatgtagtggtatcttttcattttgaatttgggcctttcaaaaaggaggggtatgatttcttaaccacagatatatatatgtaataattctttggctattttgttttacaggtttatggaaactcatggttgatatgctcaggtgcagtcctcctagctacctattttccagtttgaattactccaacataccattatttgatacaggctgtgctgctgtagagatggtagtgccatggtgatttgctacacagatcatcccatcacctaggtattaagcccagcatccattagttactcttccttatgctctccctcccagcagcacccctccaacaggccccagtgtgtgttgttccctccatgtgttgacgtgtgctcattattcagctccctgttgtaagtgagaacatgtggtgcttggttttccgttcctgcgttaatttgctgagggcaaaacctgattactttgaaaacaagttctactgtggcaggcagaatcatggccacacctaaagatgtcaacgttttaatttgaagaagctgcgaatatgttatgcaaaaagattttgcaaatgtgattaagttgaaatttgattaagttaagggccttgagatgaccttgaatcatctgagtggacctaatataatgctaagggtccttaaaagtggaagaaggaggcaaaagaggtcagaatgatgctgtataagacagacttgaccactttgaaggaggtgaaaaggaggctttgaagaaggaagggaccataagccaaagaatgcagggggccacaaagaaaactgaaaagccaatgaaacagaatctcccctaaaggccccaaaaaggaatgcagtacggctggtaccttttcagcccagtgggcccagtatcatacttctgtcctacagaaccacaggatgataaatttgtgttgtttgaagccactgagtctgataatttgttacagcagcaaagattaacatagcaactaagtagatgatttgttgcattataggtggtcacaaaatacaatcctttagtatcatgtattttttcctcttacaagagtaattacatttaaaaaagctatctactgttctagaatcactgtcgttgtttacaataaagtcctttaaatgtgcgcataaaaaactaaatgtgaataaaatgtaaataaaggaatatttttgcctaataaatacaaagaaaatgaaaatcccagcaacctattttttgtggatattaacaaactgattctaaagtgtacatggaaaagcaaaagattcagaatatgcaagacaatattaaatgagaagaacaaagtaggagcactgacactatccgacttcaagagttagaacaaagctatagtaattgaaacagtgtggtattggcaaaagccaccaaatacatcagtgaaacagaagagaaagcccacatagtcttttccacaaatggatctagaacaaatggatacccacatgcaaaaaaaaaaaaaaaaaaaaaaaaaaagaatctagacaaagacctcacactattcacaaaaattgactcaaaatgaatcacagacctaaatgtaaaatgtaaaaccatagaactcctagaaaataatgtacaagaaagttcagctgatcttgagcatgaaagtgactttttatatataataccaaaggtgcaatccatgaaagaaatcattgataagctagacttcattaaaattgaaaacgtctccttgatataagacactgtcaactga

SEQ ID NO: 1881238 - DNA, 4001 bp, Homo sapiens
tggctgactaaattttattatgaagactttttttttttaaagagctcagaaatactgtattctttaagttcttgaacatgtgatagtgtcttttgcctattttgattgggcaataatttacctggctataaaattcttggattatactctatttcccttagaaattataggcacccatccactgacatttcattgtgtttcttttttttttgagatggagtcttgctctatcacccaggcttgagtgcagtggtgcaatctcggctcactgcaaactctgcctcccgggttcacagcattttcctgcctcagcctcccgagtacatgggactacaggtgcctgcctccatgcctggctaacttttttgtatttttagtacagacggggtttcactatgttagccaggatggtctcgatctcctgacctcgtgatctgccggccttggcctcccaaagtgctgggattacaggtgagccactgtatgagcccagcctcattgtgttttgtactaaccccctttccctggcctcttccagcttgtcttcttctcttctagtagtttcttcgtgaagaggccatgtgctatattccatgagatatttcacactcaaagaagacttcttttatactcttctgataatttgtctgggaatcattgtcttgatttataagggagtttgtaataaatacagtaaaagagaaacacacaacgtattttgagatatcagagaagggagaaaccaattctattaatatttggggtttgcagggaaggcttagttaagaggtaacatttgaactaagccttgaaataagggaaggatttggacatgcagtaatggggagagagtagaagcaagacatgatggttagtgttatgtatcaatttgactgggttgtggggtgcctagatatttggctacacactattctgggtgtgtctctgaggtattctggatgaggataatgtttaattggtagactgaataaagcagattgtcctccccaatatgggtgagcctcatccaatccactgaagacctgaacaaaacaaaaaggtagagtcacagagaatttgctctttttacctgattatatttgagctgggacatcaatcttctcctgactttagatgtggactcgagttggaactatatcattggctgtcctgggtctccagcttgctggctgcagactccaggactccttagcctccataaccatgtgagccatcccttacaacaaaacaatctgtctctctctatgtgtatagctctacctctatctctctgctctttctctggagaacctagagtaatacacaaggttatattagagaagaggatgatccaaggaaaagcatggaggtggaaaagtgcaaagagcatttgggaagactggggtcctgatggggagtttggatttcactgtgtgtagcatagagaatccttgaaaatattcaagaggtgaaaattgtatttgtggaagaacaccaggagtatgtgaaaagaaaaacactcactccgttttaactccaccgaagtgggcatcaaagggatgcactggggacatgggttggagggtagttgaggccatatctggaggatctttacttctaggctgagtctgaagttatctttctggggagtgggggattacaaatctttgagctccactcaagagatggttttgctaacaatggcagggcgacggtggtggtggtgggaaactggtatcatgaattctaactgggcttctgttattctagccaagaaagttggggaatggattttcagtagaataatacagatctgggaatcaactgcatggaggaggtagttataggtgatgagatggctcagggacaaagtttggtagaaggagaaaagatactaggctggtacaaaaataattgctatttttgccattacttttaatggcaaaatccgcaattacttttgcaccaacctaatagggtgcaaacttcagagccatctgcatcagagggattgatgaagatcaacaaagtttgggaacacaggaaaggagcggggagggtaatgacttgagggcatagcagggataatcaaggtttttcttgttagcatgtggagactttagcatgattatatgttaaacgcctggcacatacatggtgcaaaatatttatgagtgaaatgacaagtgaaggtggtgagtcatgggagttccaaggaaacgggtgataaagggaggtctcaaatgaggcacaagtggagaaggtagcttgggaaaggagaaggatgcttctccttataagatgggaaaggcagaggaagagggtcaagatacagtgatctaggggtgagatggaagtgagttgagagaactcaactctgggccctgaaacccctagggatgggtttgggggactttgagatatggaagaggtttaaagtcaattgttatagcaaatatggttcggaatttatttgtaatgcttaaaaatattgctgaacagaagtgaagtctaccctagagttggatggtgagattatttagtggaactaccagatccatgttgtgattctttccagtatcattcagcagcccttgggcagttgcaaggcaagtcatcagtggggtatggaaattttccaggtgggtgtggttgaaagcagggaagaaagagtttaggagcacattacaggaaggtgactgtaaggtccaggctgagcaggaaagtaaagcaagaaggaaacatgaggttgtgaagagaagtctagagggatgaggaggcaggagtggtgaacagttgcaggatgtagctagagtggcgatgttagatcttggggccagagagctttacaatgattatgaagatcaaaggacatcagaatcaagctataaagagccactgtttgatgggatgtgaggatgctgcaggtggatatctgcacattgatggtgagagtatggtcaccctggccctgctgggtctttgctaaagagactgtgctctgttcttggggccgttttcatcacctgattagagcagtggtccccaaatggtgttctttggaccatctgtacaaaatgttcataggtcaagtataaaatggaaaaacagagaaaatgtcacagaaatgtgtccattggtgaaagaccaccagctgtcctttttggaggattgttctgtattctaaaaatgtatatattctattctattaaaacatttttgtatttgcattttttctcttttatgaaatgccatggggtagaaatttgtaatgtatccaattctcctgtcttcatgcattgccctgtggtgggggaggggatgtggctagcactggccaagaggctgggggcagaggtgcagtgtgagacttctagcctgggtcatttaattcttagtacaagactctctagcattcttctccctctgttccctgcttggtgatactcgaggtaatgcaacccccattagccttagtcttagggcaggtttgatggaaaacagagcatcccatacctccctgcagatgtagcatgagtgagaaaaacaacttctgatgtttgaagttaccaagatttaggagttgtttgttattgcagcaaaacctcacctattctgaccaatcatgttggaatttctgtgtgtgtgtgtgtgtgaaactggtagtttaaaaaatttccttcttaccaaaaagaaaaaaaaattgcaaccttatgttggttctcaaattaaaaaaatatttttactggtttataaaatagaaaaatctgagaatctgtagcttagagaactacagtgtgggatgtctataaagaccaggttattttatcagctcctaacaccccttaagaaaagcttagccaagacttggaatatttcagtctttcccattccacattccatggacccttgaagagacattgatgaaatggtgcagccatgaaccaccctaactcaatcctagtggcagaatcccccttttactgcagaatgagcttctt

SEQ ID NO: 1881239 - DNA, 4001 bp, Homo sapiens
tgtgagtagtttattgtataagaatgctatggtttgaatgtttgtgttgcccccaaaatttgtatattgaaatcctaacctccaagttgatggcattaggaggggaggcctttgggaggtgattaagtcacgggcacagacacctcaagaatggaattagtgccactataaaagaggcctgaaggagttgcttgccctctctatcacgtaaggacaaagtgagaagatattatctaggaaccatgaaacaggccctcattgaacaatgaatctgctggtgccttgttcttagaaatcccagcctccagagttgtgagaaaaaaattatataagctatccaatttatggtattgtgtttggtttagtagcagcctaaaagtactaagtcaaaacacatggtgatgtattaaaactgctctaaaatacataaacttaagctactaaccaaaacctagcaaattcataagagaattgataaagatgaatttggtaaacttgtaatctataaaaaattatctaaataactaaagtactctagaactatgctctacaatatagtagccactgatcacacgctgctatataaatttaaaaatttagttcattggccatttttcaagtgccttgtggctaatgtctgtcaaattagtgcagattgtaggtcatttctgtcaacacagaaaaatctaccagacagcacttctttagaatgtccagggagaagctctttcattgagataattcaaagaaaaccatgtttatccaatgcattttccaaaaaaggaaaagccttggcgaagaatttggtttattcttctcagaacctaacaaaatggggaaatgtccttgattaattttgtgtgtttataaattaaggtaccttaagtggaacaaagaaataccatttataaatagaaaatgtattacaaatatgaaagtcaattaaggaaatacaaaataaatctttggaaatgactttcatatttttctcacagcctaccaaaatccatggccaggagatatgtaatatatacttggcagaacttgcctttatagcttaattttctgtgccaaagatacaggccttcagaattcttgttgagaaaataaaaagtaattgtgaaatggttcctctggcctaagggatgacaacatacatcaacaccattataccctccctacccacccacaaaagtttttaaagagtatagaacaaacaaacaagcaaatacaaccttaaccaacaccagctcaacagatatagtctataaattaattatcagcaaaggtacaaagtatgcaataaagtacttaacaatatacattttatttacctcagtttctctacttctctacatcttaccagatgggttatttgaaagaactccaatctcctacacaaaaaagcaggactctggcagattgctaactagagatttttggccctataggcaagcatctgtgagtggggctgtgtgggaaacaaaaatatgttggaaaaagagttgatagatgccccagcataaatgaggacccagcaaaatccatactcctgtcatggcatctctgtccatccatttctgttagttaccaaggaactagcccagagcaagggcaaatggaccacaatagctggagaagtgggagaaaaggaggtataccttgaaggagtaaacagttttggatttgtacaatgttttaaaatcattaacagagacatcaaatcattagctgtcaacctggttcaacttacttagaatacgtgtttttttttttttaatcccattggaacagaaatgcaatataatcatgaatttcatctcttattctttatgtctataataaattttgttttttctctggaagtcctgcataaacataaatggtattccctctaaattgcagttattctcacagcctctgaaaccaagtatgggtcgccttcccgttctgcaccaggtctcacccacgcttgatttcatgggccaggagagcacatctggcagatctaacagaggtctgaagtcaggacagttagctagaaggtgataaaggagtaaagcaagagaagatacaataaaatctgttgtataaataacattttatgtaagaaccagcaaatataactcaggggaagacattttcagtgcaattttccattcggattatctgtactgtatccaagataatatgtagcgacaggtaaacattcaacaattctttcaaaatctattttgtatatatttctttactgtcaattttcgatcatctggaaaattcaactatacagtctcacccagtgtactttacaccaatcgttctggacttaaatgtctttctccatcatcaaattgtattgacaaagtatgcagttcaagaaagcccttctagtttttatgaggtaccaaaaggaaaatacataaaattacaatctaagataccctgacaacacaaaaatccacagaattctttcttgatacctaaaacttcgtatgacaaatttggttttataaaatgtagagctttcaaaaaaaaagcataccataacattttaagaaattctaaagtcttgagtaatttgttaatttaggatctataaatttgtatcacaattttccaacattaaaagaaaaatgaaagctaagtaacagacaaaccatgttggcatgatacttttaaatttgcaaaatgcaattattgtccatataagattaccaaataaaaacaaaatcagagtcatagcatagcagaactgaaaaatacctcgaaataagctcatagcctaatcccaataatttagaaatggcaaaacaggagttcttgaccttcattttaacctgagtttggaaatgcatcactagaggttgcaggaatcagtgacttgcgtcagctcaatgtgaccaagctctatgcctccacatatcctccaacaaaaatgagaagctaaggacatttcatgactgatcctgagagtggcccagaaacctctttgctccattgcctccctgcacctgttcagttccatttctacctggttccctgctcagcttcatctcattgccatcaacccttgcatcaacacttaaacttggtgttgccattctgtaccctagctttactcttcagtgatctttttttccttcctgagacagaaagactcatcttgtctgggcccccctatttaccataatcaccatgcctccccctcccacctacctcacgagctcagatcttggtgtccacacggagcctctctagtatgccagccttgacagacagcaccattgttaacaatttccagttctttacaaggtcattggatttaactcttcaaagcactgtgctttaatttccgagtggcactttaccaacattaacttctttgtggaaagttttacatcaaggtagcatttgctcaaagggcatgggccacataatagggaccttccaagggaccttcattaatgcatagtgtggggtagaggagtggaactagtgatacaacagatgaaaaggaactttccaagtgggcaattaaaacagggcattccaaagagaaagagagaaagagaaagaagggtgagcaagtaagaagtatggaagatccaggaactcctggaagttcattatcaccagagaacaggtaaaaggggggacctggtgagagatccagaaaactgaggaaagatcggacttgcagggaccatgttgtcaaaggccatgcgtgagtgccagggaatttggatgttttctcggtaagtggtgagacagcagaggctagttagaaagctgttgccattttcatgtgaaaaatgagagtataaaatcagacttgtggcagtgaagataaaaacaaacaaacaaacaaaaaacaacaacaacaaaaaacaatgaacaccaatagaatttgaggattggatgttgaggaagaatgcacgaggactcatgggtttccagccccctgaacgtggtggttatgacaccatttactcagaggtaag

SEQ ID NO: 1881240 - DNA, 4001 bp, Homo sapiens
gaccaggattttttcaaagaaaaagaagagatgagaaaatagactatatcaaacaatataccaagtaaggataggttttgttttaggaaactgctttcggttacgtgtttgtatgtaagtgtgtcttgaattgctacgtaaaaacgtgagctttcttactctgtggattacagtaaagcaatcgtgtgaaagccattgttctgggagacaggcctattaatcaggcatgtcctatacttataaagagggctggtgtttatctgaatggaagcaaacatggctggctaaactagcaatgaaggatttaaactatttgttttggggaaaaaatttatatgtgtgtgtgtgtgtgtgtgtgtgtgtgtgtattacactcaagtaagaatctctcaatcagctaggaggagacgacttcccatataaaattagaaataggaaggggaaaaggaagaaagggaggaaagaaaaagtgtaagaaaaaaattgaggaatctgttaaacttgaggaactcctaggatgtccatttctacctaaaaaagttcagaagacagacaaaaaagggcagagaagtacttattcccaagtggagaatatcttcttgatgaaactgaagtgggtcctgagtagcagggcctgtttttggggcttgaacaggtcttctgactaataggaataactaacatctattaaatgccacttcataatttccagctgatttaaacttcacaactttatgaggtaggccctaacatttctcctgcaaagaggatgggggtggcacaggtggttgcatgggtgggcaaggagagcaggttaaattccagaaatattaaaagcaattgtcagaggctgggcacgtggctcatgcctgtaatcccagcactttgggaggccgaggcaggtggatcacgaggtcaggagattgagaccatcctggccaacatggtgaaaccccgtctctactaaaatacaaaaaattagctgggcgtggtggcacgcacctgtagtcccagctactcgggaggctgaggcaggggaatcacttgaacccgggaggcagaggttgcagtgagctgagatcacgccactgcactccagcctggcgacagagcaagactccgtctcaaaacaagcaaatgagcttaaaaaaaaaagaaaaaaaaaaaacagttgtcagaaaatattcctagtcatgggtattagagtatggaacttttccccctaaggtcctaatatctagcaattctaatcagtatatagaccagtccaaaattgacatgtaatcatattacttacatttttctttgtcaaaaccaatataacagatattttgctttttattctgggaatggcaagttagtagacatgtcatccttatgtgattttagtcctgcattttttgacattattaaatgcaataattcataatgaattaatattaatactaatgataaatcaaatccaatgacagtaggatttttaaattctattaaaattagcaggtcttctcatttcagtctctttgcttcagcagcatgttataagaattttgaccaaagacctttctctctatgctttatatattcttgataaattataatttccactaatcttattccctgtggataggtaattctttttcaaggctgacatataattatttttttaagagatgtagaaggaccaaaccaaataatcattacttttcaaaaaggcaacattgatctcactttttaatgtttaaagtgcaccacacaaggcaaatactccccagtgagaaaaagaagataaggtgcaatttttcagaaaatgctattgcataggcttagtctgatgtgagtcttccttggaagcaccaaagtcctgaggtttaaacaaatcaggagaaataattttgcgtttccgggccagggcaaaattctgctttaatcactgagctggcattagtgggacttttaacattaaaaaaaaaaaaaaaaaaagtcccactaatgccagtgattgccctattcctaaagcctttagccaaacattgtaaggacagcctggactcaaagaaggggagtgaggctggatcaaagtccaacatcaaactaagttaagacctttggattagaaagtcggcctgcacactgggacctgttgtggggtggggggaggggggagggatagcattaggagatatacctaatattaaatgacgagttaatgggtgcagcacaccaacatggcacatgtatacatatgtaactaacctgcacgttgtgcacatgtaccctaaaacttaaagtataattaaaaaaaaaaaagaaaaataaaaagtcggcctgcaaagccaaagttgcaagtaagcaggagggctccgcatgaaggacaggtcgaggccaactccctaagtgttgatctgtctcagcctcagcctcagtttccttatcagtaaaacggggacgagagttccctgcgaagattaaccaagctaatctaggttaaaaaaaaaaaaaaagaaaagaaaaagaaagaaagaaaagaaaaaaaaagttcctggcatgtaccagttgctcaactcttgagtgtccttctcggtttaaaccgacgggggagagtcaaagcctccggagccagagggcggctaaggcccgcacggtccccgggctggaggcgaccgagcccgttacctgatcgcgttgaccggcgggtttcggaggcggattagcgccaaggcgttgtgcagccgcgtatactcggccatgtttcctctatcaccgagggcacctctgcctctcgccgtcaggcaaaccacttttccgggcgcgcccggcctcctccagaggagggacgccggctgggccaatgcgagccggggcgccgcctcccgccgcgcctcttcccacccagccctcctctcccgagaccccacccggcgctctacagacgcttgtcgctttccctttattaactcccatgctgctcccaccagaaggtacagcaaggagaatgatggaaaacagctgtaattgccggcaagtcgaagtttgtaaccccttggcccataggggctggctactgaggacaagttctgagttcgctgagacgggcaagctgtcctcatcgcggtattcatcttcatgatctttctgaacagggacagatacctggggccctccctgacagttatgtgatattgatacacatctggaacacataaaatacacattgttcatttcacctaaatgagtagggtactaatgaaacagcctttgcaaaaattctaacagtgagaaaattatggcagtcaaagagatctgatttaaccaaccccatcttgcctttagctgcccttaattattcctgagcttaggccaagttaactttgggagacatttggtttatagtttaaatgataatagcccttccccaaaactcaactgcctttgtaaagctaaccgagagaccaccaggctaggaggacagaggagtgtgaattctctctgctaaggtgtaaacatagaccattgccagccattattccggaagccaccagatagacaacttccccatttactcctgcaggtaacattactattgtagaacctaagtttggccttttgagatattttttcacgtttgcctgacactgatggctccacctggaccagtcaacagctcctgtggccccacccacaagcaactcagtacaagaggatagcttcaacccctatgatttcatctccaacccaaccagtcagcattttccataccctagcccctgcccaccaaaccacctttgaaaaacccctaacctactagccttcgatgagattgatttgagtaataactccatgtcccatgtggcgtggccagcctcacatcaattaaactctttccttactgcaatgctgtggtcttcctgaattgattttgtttgtgcagcaggcaggaagaacccatccagtgattactctaacatcaaccaaatacttatataacattgttactagag

SEQ ID NO: 1881241 - DNA, 4001 bp, Homo sapiens
ggcaatcattgcctagttagagataacaagaagacaaatacaaactttgtataaatagagataaacagacacatattagagcatctgctctgcataagtagctacaccaccaggaagaaagtctgcaaaggtccagaaagtaacgaggaagaagagttaggagaaggagggatcactgtggcctgggagagtcagggaagacttaggatgagagagaggcatagtggaaccagaatctttctttgtgtatctgatgacatactggcaagtcccaggggctgctgtgtgattagagcttctcaccaggatagcttccttctaagatggcctcccactacttgctgagagaggaagacaaagtgggtttttaaaactggctgatttgcctggtaaataatgtacttctagtctatagaatactgtatttttcaaaggcaaaaatattcaaggcttagtccttgctgctcatatcaacatgctctcccttgatgagctcactcagtcttgtagctttacatagcatctaaatgccaatgactcacaggaggataatatcttcagttctgacatcttgccatactcatatatcaaccattttatctacatatccatttggagatctaacaggcactgtaagcttcacatggacaaaaccaactgcttgattttccctagaaaaactctgctcctctcccagtttccctgttagtggcactactaccaccaaattactcagaccaaagcaatggagtctttcttgttttttctctcactccgtatccaatcaatcagctgtcgaacaacagttgaagaacaacagctgaacgatcctgtttgttctatcttttgaatgtatctctcaaactcctagcctcaagttatcctcccacctgggcctcccaaagcaccaccacacacagcctactagaatatatctcaaactcaattactgctcaatacttcttcccctgcaccagcccattatcaacactcatctcctaactgatctcttgcttcttctcatgctattctcactctattccctacaaaactgtctgggtaaacttttaaagataaaaataaggtcatttaaaatccctgactaaaattctttagagaaaaaaggaaataaaattagaggaagaaaacatgaccagaaaagaaagaaaggaaaaaaaaacctatagtggcttatcacagtaattaaattaaaattcaaacttctacccttacaactttccagccacactgaccttccttatgtttcttaaacatgctgaatttgttgcttccttgggaattttacattgctcttccccagatctttggctgaaaattccttattttctacttctcagctctcagggcatcttacagataccttttctgactgtcctacctaaagaagtccacagccaaaactcactaaccaaggcacagtggataattgataaatataacagacaaggtcctaactcttgtggtacttattttctaaatgcggggaatgcaaaacatggtaagagacatcttgttactctgttttatattcttcataatgttgatcatgctctgaaaaaatatcttatttattcattttcttgtttatgtctatctttgccattcagtatatattaacaaaaggagataggacgcataccttagctctcttgctctccacaaagccactagtccttacagtagtagtacccagcatacagttggatctcaaagcatcactgaatatgcttgtacatattcaaaaatgtaggagtaacatcacagctataaaggaaaaattcattatagtggaaaaactgttaatgaacccctttacccaaataatatccttcccaaccttgacatctaatccaaccccagaattttctgatatcaagggttagtggacccattccttatattggctaccagggaaacgtatgtcaacctaattacatcagagcaacacacatttcctagagggcaacacacttctttgcttcctgtaaaaatgtattcaaagttgtgttaaacaacattgttacagttacagattcttgtcgtattttctttgtttctttgacataagcaatcatgacctagctagaaccaaatagagataacggaaagacaaacaaaaatttaggaaagtggacaaacaccaacacagattaggccatctgctctgcattatatgatctaacacaaacaacaatgaacctgactttacattctgatgctggacaaattatgtagtcctttgtggttcatgttcttctgtctgtaaaatctggacagtcgtgcttatttattctccccaatttccgtgtgaaatagctattattttatttcatagaattatgaaatgttatgccctgcagaagcttgagaatcatctcatctgtatccaaatgtggaaactgaggcctaatgaggttaactgatttacccaggctcacagctaattactgacaaagctggaacttataatagaaatcggattttctgacccttaggcaagtggtatttctgcctcaccatactgcaatgtttgccttactgtttcgtttttgatggaggagtatattatcttccaattagcatgtaatccttgaggatgtggtaagttgttctccccacagtaattagttggccatatgtaaataaatatttattaaataaaggaatagtttgccatcagtcaatggcacctgccacccctctatgttgcaatcatctactgacctttcagtcatttcctctcattcattcaaaattttagcatacaggtccctgtctctccactgtgacttgttattcttggtgacttcaacaagcactaaatgatacatctgacactctggtcattcagtttcttgactcctcatctctaatgatctttttctccaccccaccttagctacccactcccatgctcatatactattactctaaaaccttgattttaggcattccattatttgactacctccttctatcttcctagttcacttattctaatacactctaactcttctttaatcctagcaggaactctgatcctttggcctcatcaatttttcatggggcttcctttcctcactgtcctttttatccagcctagattccatggtccatgactgtattcatactaattaagggtttgtcagtgtacagcccctaaggcccttaccacattctttctccatcatactgtcctaaaaaaaaactccaatcttggttaaagccaactctctgcgtgacctttccctgcacttaagcatgaaatgaacctggataaaacaatcgcaattgtgttgactggttaaatttatgatcacacactataggagtgtcttcagcagtacccaataattctacatttccttggccaaccctctccttctcttctaggcagctctatctctctttaaaccatatactcttgatgcccactcctaaattttacctgataccttcatctattgatttgctagggaaaaaaataaaagtaagcaaaaaagaggtactagaatcttttccaataatctatcttccccacccctcaccctctaccatttaaaatggatgaggtgtccaagctcttactaaaggctaaactctgttgagagacaattctctaagagtctcttaaatttccttgttccagactatgtaatcaaggattgaatgtttcatagccttggaagatagagatagtgtctccctctggaacaaacagcaagaatgtttactgctcaaaataataaaaacaatgtctctagagcaaagggcacacacctttattgcccaatataaaagattcgggttccctaagttcagagttcctcacttgtaatgcaactcaatgcatatgcgggtgtcatctggccctcttcacattgatctggggaactggggtgtagggaactggtggtgtgagaaatcaaagcctttgtctttgacccaggagtttcccatttgctgagcctccatgaaat

SEQ ID NO: 1881242 - DNA, 4001 bp, Homo sapiens
ggtcccacaatgaccagtgcttgaagatcagtcccagagggccaagtagttcttactccgtaggtagtaagcctagggtagagttcttatttcttgagatcaggcaaagcatgaattagcaatgtctgctctgtattcccacccccaaatcctatacaagttacagcccactaaggctgaccccctctgggtattcttgagcttttactctgtgttaggtcctgggctgtgtttaagcattctcatttattccttaacttcattttacagataaagagccaggggcattaagtaaccttcctaaagtgctacagcggtgagagccaccaggcttcacaagcaggcagtgtacctccatgctcttaactagggcacagccttgcctgagggaaacaccacctcagactatttagtgatcccagacatcccttggagaacttgcaggtattttctttctttttttttaaaggagaaagtctcaagagaagagaagatctttagaagcctcctacacaaaggatatgcagtcccccttgcttggtggtgagttagaaacctgcctggagacaaggcggcggggggggggggtgcggaatctaaatatacttattacttgtaatggtttctcagcagctgaacacatagtgtcttgagaaaaaggtgcttgcttataacttacaccagggtgttcaattttttggcttccctgggccacactggaagaactgtcttgggtcacacatataatacactaacactaatgatatatgatgagctaaaaaaaaaataataaatcgcaaaaaaattcatgttttaaatttgcaaatttgcgttgggccgcgagttggacaaccttgtcttacacaaagcagcatatgggccagtggcaacctgcttaaagggttatgaaggtctagttcctgacaacaaacttcacggcccatacaaagttattcattttactttcgaccacttaccccatgaactacacccaatgggatactaacctgaagcatggcagctactactggattagccctaaataggcttaaccctaaataatcagtgaccactgtccaggtcagaggctaaccttgggctgcagacgcaatgaaacccctatagcaagcagaggctggtctacgacgtgggagggagaggcagagatacaccttagcagacgccaggatgcaagtttaggagttctcagcgtcaggaaaacatccagaacgtctctgtcagtatcctcttatgcctacagtatcccaaactcccaattttcctggtagtggggcagactggtcatctggtcacaacacccgttaattacggagtaaagggatgggcaagaggcttctcaccttaagagtcacgtggagagaaatgctcaggcacaagggacttaaaatgagaggtagagggtggatgtaggaggtgtagttcttccccgagagcgaactagcccaaccggagaaaaggttttaggtccctggtaagggaagaggcctcagtccccgacgtctcttaccacctacactggacgagggtttggcgtgattagaggcgaaacactctctgccaccccagctgaccgcagcgccgcccgcggcccggggccccggcgggacagaccggcgagggtgcggcggcgccctgcgcccacccccgccccaccccaagagccccgcgggccccgcagcgcccctcctccgcccagcggcgccccgcccgcccgcccgcagcagcagcaccaacagcgccccgggctcgacctcgctgccgaaggccagcttggcggaggcggcggccagggccccgaacgcgccggcgcacagacagttgaatacgccccaaaagcggcgccgcatcgcacccgcctggaggtgcggagggaattccgcgggggtgtcagggtacgcggtcgcggacacggcgccgcccggaggccccggcctctcggccatgttgcctgctgacaccgtgcctggcacccgctgcccgcagggcagagcgcgcgccgcgattggatggcagcctcacgtgacgcgacgctcctgtgacgccacgctccggcaggccccttgggaatcgctctccggcgcctcggagggggcgggccaggtggcagagaccctgggctgtggcggcctccggcctaacctgtagtaggtttgtgctctggggaggacgtcgggacccgaggcctgaggccaagccgggtactgtggacgctgtggtagaaggtaaacttctcgcggcttagccgtctccatcccggccacccggctcccggtgaaacttattaaagatgcctaacgggccccgcgccggcccaccgagtccatccacgtcgaccaggcttctccgctccaccctccagcctgaggaccgccggaccaagagatgcctcggcagagggcgctggggacctccagacccagaaagacgccagagccccatatggggacaagcgcatcacagaaaaccgaaaaaatgaggatctgcgatgagaggaagacaatgatccataatcaagccacgcagaatcaacatgacttctaatctcctgttatacttacgtatgtttagaatgtttccggctgggcgtggtggctcatgcctgtaatcccagcactttgggaggccgaggcgggtggatcacctgaggtcgggagttcgagaccagcctgaccaacatagagaaaccccgtctctactaaaaatacaaaattagccgggcgtggtggtgcatgcctgtaatcccagctactcgggaggccgaggcaggagaagcgcttgaacctgggaggtgaaggttgtggtgagctgagatcatgccattgcactccagcctggccaacaagagtgaactccgtctcaaaaaataaaaataaaaataaaatgttcccatttaaaaagtacacgtccttgaaaataaagtgttgaaatgtataaagtgctatttccactctccaggaaaatcagtgttaatagagcatttttctatatgtctatttagttatatatagttaaaatgttaaaaaaattatagaatatgtatatgcattttttaaacaaaaatgatttcacagttgaacatactgtttagcagcattctttttgtatcttctgtttagcaagtttttatggaagtccttccacaccatgctgcttctctcacagggtggttttgtggctcaaataaaagcacggataaggccaggcacggtggctcacgcctgtaatcccagcactttgggaggccaaaggtgggtggattacgaggtcaggagttcaagaccagattggtcaagatggtgaaactccatctctactaaaaatacaaaaaaaattagctgggtgtggtggcgggcacctgtattcccagctacttgggaagctgaggcagagaattgtttgaacccaggaggcagaggttgcagtgagccgaaattgcaccactgccctccagcctgggtgacagagtaaggctctgtctcaaaaaaaaacacggataatttcagtaacgccaatatggtacaaactgtcccattttgcagatgaggaaattgaggctcagaggtctcactgcaccactccattgagtaaggagctgctcaaagatgataccctctgaaagctcttatcaggaaatcaagaggtgttgcattgatcaactctgcatgctttaaagaatgtaaagcaaattttcttagaacaaacgatgcctctactagcactaaaggttaagcatctcagagccacctcctctgtaaagccgtctctgctactcccctacctttgtaccagtcctgtggttgttcctctggttgtctgtttctctgctagcctgcaagctccttgagggcagggactacatcgttgttaatctccaggtccccagccctggtgatgatggctgaagtgatgccatcctcagacactgctgggaagtgatttctgcctctaagaaactcctgtgtacacacatcacctaggga

SEQ ID NO: 1881243 - DNA, 4001 bp, Homo sapiens
aggggaaggggtggggacagggtgtgggcacagaggtagaggggaggccctggggaggctggcctcaggtgcaggcccagggtgagttccgctcagaggcagtgctgcctggcaaaggcctggagggatgaggcccacctggcgtggggctgtgggcatcgggcggagggcaccatccgtggctctgctgccgcggcctctgaccgcctgagtctgggtccatggtgtggcctgagaagacgaggaacaggggttagagctgggggtggcaggggctgggggagcgggctcgggctgccagcctctaacaccacacaggccaggaacacacgtgaacacgtgggccccccagagcacgtctatgcgtgtgtacatacatacacacaggcttggcacacacctgcacacacaggtgcccctcagatccagtcattctcacacatgccctacaagttcacgccagctcacacacatgcccacatggaaatggaaaagggtggaagcaggcaggaaggggcagagctggggaaggggcagctccccacaaccctggccctgggggtggaaggcagctctcccccaggccacatggtagaagctgacccaggggtccagcctcctattgcaaggcccccaccaggccctctggctcggccgtcggggcacggtccacaggcatagccaagagagctgttgccacatatggagcaagtgcttactatgtgccaggcacagtgctaggagctttgggagctttagctcactgcctcctcctcacaccgacctgtgagaaaggcagcggttagccccattttcaagtgaagaaactgaggctcagcgaggtgaaagaagtcactcacccaaggtcaaaaggctcggaagtggcagggctggggctgaagcccctcctcccatcaggaccctgggatgcagccaccagcgggggcagcacagggccagggtggctggggcttacctgggcgcggcgtccgcggttcacataggtgcacatggggttgtaggcacctgtcccgcacacatacaggtgtgttcggttccagggctggatgagcctgacgaagttcccacactcgccctggggccacagggaaggctgcataggtgccctggccaggcctgccccctcactgggggcagtaccttcccacctgtggattcccccttcccacctgtggatcccaccaaactcacgttgacatccttgcctgagagcacgcattcctcgatgcgctgtggggaggctgcccagtgtatctgcagagaggggggtcagaaggtgcagccttctggacatgccctgagccctggggctccgtgcccaccccacgtcccacatcagggccagcccttacaatgaggggctcgcggttgatgtcgtgcaggtccagggacagcacgtagtccttgctgcccacgtacatgcggtcgtggtcctcgtccttgagcaagattcggtagtcggttgtgttgagcaggaagttgaagaagtgggcggtgcctgtggccttcagctctgtgggtggagggcagggcaccaattaggaccttcaggaaaccatccagccataccccctctgataaaggggagactgaggccctgaggttcccctcaggacccccaccacagagtggtcttttttctttctttctttttttctttttacgagatcaagtctcactctgttgcccaggctgcagtacagtagcgagattgcggctcactgcaacctccatctgctgggttcaagcgattctcctgtctcagcctcctgactagctgggattacaggcgtcagccaccacacccagcttattttttgtttgtttgttttttgagatggagtctcactctgtcacccaggctggagtgcaatggcgcgatcttggctcactgcaaccttcgcctcccgggttcaagcgattctgctgccccagcctcctgagtagttgggatcacaggcgcccgccaccacgcctagctaatttttgtatttttagtagagatggggtttctccatgttggtcaggctggtctcgaactcctgacctcgtgatccacctgtctcagcctcccaaagtgctgggattacaggcatgagccactgtgcccagcccacacagtggtcttaaacctccagctccccttcctggatccttctcagctccctctccagtccctgacagactgagaggacaaagtggcacaggtaggcaggccagggaaggcgccacacccaaagctaaacccctgattcatagacagccctagctagtctctgggtcccaatgaaagggcggtaggtgcgggccagggtacgcaacagcatcaaagagtttttgctcaggtgggggttaatgctcccacgctcagggtggggccagcttcacacaggggcttaaaagggttaatgagcagataggggtgtgaccgggtatatctgggacagccggcagactctggcatggagcctggatgccctgttcttaccctggctgcccaccaggcagagggcacagctggtgcacagcaaggtcctcacttggtctgaagcaggttagccaggagaccagaaagccctgctggacacactgccctacggaccccagcttcccccagaccctataaggctgctaatggtggaactctcaggccaccttgaatgagccaggacagtcatttctgggaaagaggctctctccctggagctacaaccctggggctaaaggcagggttcaactgggtcctctagtttcccttttgcatgagtccagcagccttggcccctccaactccaggatgctggggaaaagtccttcctaaggatgaaggacaggagggggctcagacaatgacagacaaaggactcctagaagcttgggaacctgcctccaaggggagggagagccgaggggtccccttggcaagccccctctccacccacccccagctatctttagctcagcaaaagagggaacactgtaatgaggatgatgaatattcacacacacagggggcttaagatagcagcacacagaagagtgcatgcatgtatacacgtggcacaggcatgcacatggcgcacacatgtcctaccacacatgaggcactcaccaagggggtcacacatgtctcatctcccctccccagctggtaacccatttcacaggtggggcagtcaagggagaggcctgggccaggccccaaggcacctggagggggagaacagctgggatccgaggccctagacacagcctgaaggtggggcagaggtgggctggggtcagggggttccaccagctgacccagagcccatgtctggtcccaggacctcactctgagaaactagtgggtaaggaaaggtcttgccctgcctggccctgactatgcggtgacaagggaatgcaggtgatgaccttggccaaccgctgggacgcagggacgccgagggatcaaagggccgatcctgcctggcgatggcctcacccgcctgtccagcggcgcctctgaagtcctgggcagggcggcccaggcacctgtcccgcacctgttgttgggccactcggagtcccccgcctggccgctcacccgcctggctgctcacccacagtgacaacaggaaagtaaacattcccccacccccagggctgggaagtggccagagaggaagtggggctgccagtggagcccccccaggctgggacagcccgccaggggttatttataccctggctgggggcatggctcggtcatgcccttacccatcccctgggctagggggcactttgggggcaatggcagggggaggggctagaggcttaagtgggcgccttcagacacgggcactccgggtaaggggaagcttcagccattaagcccccaggaacccaatcagccataatccccaagctccaaccctgcgcagccttgggcctctataatatcaaccctgcaccaagactcccagagcccgaggcccaag

SEQ ID NO: 1881244 - DNA, 4001 bp, Homo sapiens
aatcaagaccaaccacaccacagcagcagcccccacaggcatcgcaggcctcttcacatgggaggaggctgaaggtttctgggtttttttttcttttgaaatggagtttcactcttgtcacccaggctggagtgcaatgatgcgatctcggctcaccgcaacctctgcctcccaggttcaagtgattctcctgcctcagtctcccgagtagctgggattataagcacctgccaccatgcccggctaatttttgtatttttagtagagatggggtttcaccatgttggccaggcttgtctcgaactcctgacctcaggtgatccaactgcctcggcctcccaaagtgctgggattacaagcgtgagccaccgcgcctggcttttttttttttttttttaattcctgtaactggggcacaatctcttcactccacacacatatagtgtctgcctgacccacagacacactttattcaggatgctctgtgaggaagatctccatttatgagacttccagtgagctaaaatttggccttctgaatggcattcttaagaactgttttacataacgttctgccttcttaggccaacattactcttgcctctcatcctcaagaaacagtgtcatcatcataataaacaccttgtcttgtactatgcactaacacttgtgcttttaaccccctgttccatgcttctgattctagaccgttaatgcacctgctgccaaccacaactacttctaatttgcctttcattcattcaactagtatttactgagaacctactcatgtggagaaagtgattctgatggactgtggatgagaacataaaatattcaagattgttggcattaggggctaaataagagcaaacaagcctccgagcgaggtatcagaaagtgagatcagcagcaaaggccagagcttcactacaaagcaatggaaggatattttgagggcttgaagccatttggccttctgaccttcctttctgtcaggttttgttctgagtgtcaaaagttctcagattctgataaatggggtgtttgttacatttattaaagaacatatctatttccttgttctgttcttaattttaaaagttgacaagtaaatttgtcataattttctaaggaaaggaataaacttgtctttgtatacccctctattaatttcttaatggtctcagtggccttcaacagaaaaagaaataggttccccatattgagatactctttcagcaatttagctgtatcatttatttccaattcttcaattcttacttctcttgtgaaaccacagtatctccataaaggttgctaatcatgttgtaaagtaggatacagggcttagaatgtgggtgaactgcatgaggaaacatgtagcaatgttcatctttatagttgaattatcttttccataattgctccccaactacactgtctaattatggagggcacggactgtgtagcctccacagagaggggaacatcacctcacagcaacaccatctgctgaggggatgagtgaataaatgaatagtctgacacagtaccaagtcaccacagttgccaaatcgaaccaagccaatttgaccccaatctggttcacctgtttattgtcacaactctgacttctttacttgctctacttaccatagagcaagagggatgttggatcaagccccagactctcacaaccaggtatattctgatcacggaaatcctgtagcaaaatgcccagcaccaactcctcactcatcatatacttcataaaattttcatcatctgatggaaccccaaattgcaggtcatacgttactgtggcattttcaccactgaaaggcaatggaagacattaaaacataaacagcatcatactgcaactcaagaaatgaatttaagcaataactttttttttttttagttttgcatgttcttccagtacaaaatagcaaagaatgttctgtcctggaagaacatactgtcctataagaatcctcttccatagattcatcacaaaaagttgaggtgatcctaacctcctccttccacctagtacctatcctctaggaatccactgggagaggccatcagaggtagaggtagaggtgcccatctccagtcaagatgctgagaagatcccaggcttgacccaccatctgtcccaaccccagccttcatcccttaaggcaagccagggaagcctccccttttctccacacacattccttcttcatgttctcagcattgcccccacaaaggtgtgccagggatatttagtttaaccaattctttatttgacctatgaaaatgtttaaggcacagccaaagtttcctaccattggctgggtccagaacttctgaacgttgacagagaccaccctgtgtatcagcaacaaatcaggcttccctggtttgtccccaaagtgagaaacttttctgtcccatttccagaggcccctagggcaagataaccaagccctgtaactctcagtaatgggacctaaggaaagggaattttcatcttcctagaacattttttcccatttccaaaataaaaataatcaagggctaccctccattaattagtgtctaatgctactctttaaatgctacttcaacatttagtttattcatagttatcctattactttggtttaagatgggccagattaagaaccagcaataaaataatgagcaggaggccacatctgagactatcaccttggggaagttttgcagatgcaccagtcccattagtgtgaatcaggccactgcccctgctaaggataggcaaagagctccctcttctggctacaggtcacataggccgatactcttcgatcttacaaggtggctgacaattgagcttataaactctactacggctgggagatgtgccagatcctgcagatcaaatgaataatggagagtcaggactctgaagaaactcatagtttcaaggatgccactaaaggagggccaaaaaatgcactttcaaactgcaatccagctaacctagtttgcaggtgtcataacttgttccctgagctctgccctctaattatcgctaatgatgatcaacacctacacagccagccaccctgcattcccaggggcaaggacttgggctggctaatgaagagggccagagtctgactttcagaagaccaggtcagaagctgaatgggaaaatcaggccacctagcctggcctggccagcccatcctaatcccccatggcaggtcacagggtaaatttacatgaggctgaattttgagaaaagagcaactttcagggcctttcgcccagctgcccaccactggagtgagtctagcagctaataaaccaaagggcatttttccaggttctagctgggccagtccagggctgaggtcacaatgcccctgtagacacaaatgcatgtgccagggatttagccgcctcccacccatgtgcagcagcaccctttgggaagcaatggcttttcttcctcaattcaatactttaggacctctgcctggacttcttgaaataaagtgcagagatgtcaccgtaagtaccatgtacactgggtctgttttgttttgtcttgtttgagtctctctgtgtcacaggctggagtgcaatggtgcgatctcagctcactgcaacctgcgactccctggttcacacaattctcccgcttcagcctcccaagtagctgggtttacaggcacgcgccaccacgtccagctaatttttgtatttttagtagacatggggtttcaccatgttggccaggatggtctcaatctcctgacctcatgatctgcctacctcagcctcccaaagtactgggattacaggtgtaagccaccatgcccagcccattgggggtctttaaagaaggagatcaaaggcagcctgcaccatatgtatctgtagacttcaggtctgtttggccccacaccatggtgctacctaccacctgctttatgtgcctcccctcccaggtc

SEQ ID NO: 1881245 - DNA, 4001 bp, Homo sapiens
ctcggaaagtgaaacttacaaaaaaagtgctggtaacatttaaaaaaaaaacaacaaaaaccccaaaaaaacaaacatcattcttagcaacatcaattactcttccacacaaaacagaaaccttgtaaaatttattttcgtatttttaaggcgtaatacttccgtataaagtatatgcaagagataaaacttcacagtattccaaaatgtcacaataataataataatataatagtataatgaagcgctacagttaatttttctttttttgaatgttttttttcctgtttaaataacaaatacaagtcacaggtaaatatacgtgagaaaaatacgaggctaatattaaatggcaggtaaggatactgtcactgtaagaaaaaactggcaggatgtgtgtatttagtctatattttaaagcacttgatagaaaaggcgtatgcaaggtttttccaaacaatttttctgtttgtttgtttgataactgacaacaatttaagagtataatgagaaaaaaaaaggaacaaactccctctcaaaactattgacctgctcatcccaaaccatgtatatgttgatggatggatgtgtgtttttgtggatatatggatttataccgtgcacagagtgatacaagcagtgttccatgcccacctgcaaagattggagggtataacactgcagtcattcagcccaggttcctcttaggaaattaacctttcaatttaaagctctctttccttgcctctccctctttccaaactcttcctcaattcccaggtctttgttctgaaaagacaatctggttagaaaagttgccctccactcataattcactgggaaatggaaactgcataaacagtgacacacagacactggaaacaccacttgaatgaatgaatgaatggatatgtatgtgtgtgtgcatgtgtgtatgttttaggtcacataaacatacagtgtgtgcgtgggtgtgtgtattttaggtctaaacatacagtgtgtgtgtgtgtgtgtgtgtgtgtgtgtgtgtgtgtacacagtagcaattgcaaaaaagggaccatattcctttccatactaagatacaatgtgataagaaacatttctgtgcagggaaaaaggtttcttcgaatcttatcacaacactgcggcgggaaaatcaggaaatgggttcacctttcagcagtcaccacagtaaacttcattgagaacatacatgcccagatatctcttctgtgcacatgtatatgttaacagctagccattcagccaacaggtaacagaaagacagcagatagcaaacacatcaataaggtgctcaaagaaaaaagtggcacccacttctcaaatggatggccacgttaaggtgcttcaaaaaaggttttttgtttttttgttttttttttcagtttttatttcaaacattaagagagtactgattttcacatggtagttctgagtcaggccaaaggttttgaggtttctgacatctttcactgaaaagggctttcactgtagtagttttgttcagtttgttgtgggtgacgagtttaaaaatgtttttcatagccagaaactgaaatcaaatcaacatgactaaaagaaataactgatgaaatggtatatagaacattactgcattcgcatcggatcaagatggtttcgcccatttttcctttttcactaacactgttcctttttttccttgttacaatccattctttatgaacatacagaaatgaccaaagtcactgcaagtagctgtttttattttttgtgatctgttgcaagagtccaaccttgtttcctctgctgctgtttgtgtagcatctggttttgtaatgagcatctggatttgtaatgagcatctgattttgttatgtgcatgtgtgtatatatgcacatatacacacctatacatgtataatatatacactatatatatgtggatacatataggaagtgtgtatacatttatacataatatagtgtatatcgtttcaactggagataaactgaactgggttcagacactagcacatgcttaactttcccctgctccctctgtatattttaaacagtctggagctttaatttattttttaaagtgcattttcaatgcagaaaaactgtaatccactgattccttggaaaacatttttgatgagaaaaatctgacagttctcagccccaagcaagagaaacctgggtttggtcatgctgggggctgacgtggcagtgccaggctcgtgcctgagtgattaatggacattctggactccgggcaccttagcagcagcagcagcacctttatgagaaggtagagatagaaaaggaagaaggaaggaaagctcagatgaggaagaatgaagtattgtgtttacgtatcaaaattgctaactttgactataatggacttgtgcagttcctgttggcctcggctaagagatgccatctagtcccttctccaccaactgacaccaaactccccatggcccctgcatgctcaaacatcacccatatgtccccacgcctaaggctgacttctgtgtcagcttcttgtgggtatgtgagtgccagcatcaagtaggaataaggcaccagagaaatcaaaatgttacaaaaagatgcaaaccccatttcaaagagcctctcccattgctccattaaaatattgcatgtgataccattcgtttgtgtgtacctaaagtgtgtcaaatacagtctctgaaaggaactcgaggcccttcagcaccagagatcttcaggaatgcatcttttttctaaacacacccacaccacccccaaccccccatgcccaccccacaccaaaagcaaaagcaccaaattgggagaacaaggctgcttgccattgctcacctcatttttgaaaaaatcagagaagtctatgaaatacaatgttcaggaaatgctctgaaatcaaacggatttaggctgtcatgtacatggttactcaatgctttaaatgtccaaagagtgtcatgaaggggttgaaatgtttgtgttcaatgtttagggggaatgtgttaaacaaaagttacttctcaaacgatgcccaaatcttccactaacacatcaacctcccctatcactttttaaaaaaattgtaaagaggaagaggttcatctaactataaaaggaaaagatgaaggcacgtgatattattcggtcccacaatccttaagaaaaacggtattttgcaagtttgtgtgtgtgtgtgctcgcatacatgaaacgcgagtccaaggggccattggggcagtagtccaagggaagctggaaaaggggaacaagagagagtttttagacagaagaaaggaaaaaggaagaaatagaggcctctcttcagctttctgtcattgacagtctcaagattcggctgctttagagtccagaaaggaatttgtttgtcttggtctggaaagtgccccagttaaatatctccagttcatcatggtacagcttttggtgtttcccttttcccttccctccagccaaatgattttttaaaaaaatcacagtttttaaaaattattttttcaatgttgaaaaaatatggaaaagctattgaacagccttagggcactgcctctccatcttcacagtgagcagatggatggataatccacagagtcaaagaggaggtgggcaagatcccttgtgctcagtggtctcttgccccaccttcctgagggctggggggccttcacaccacccacagccatttccctcctttgggtccctgcccccctgctcccatccatggaatgtgggctgctgagaaaggcagagccaggctagggaacgatgataacagtaacaggagggtctcagaagcagagggtgaaggagacaggaggcgtgctctcctcaggcagtgttagcagtgtgctctcttggcagcctcatctcaggatgggaaagtgtggttgcccactgagagggtgaagtcccactcacattttacttcgtgagac

SEQ ID NO: 1881246 - DNA, 4001 bp, Homo sapiens
tctttcctgctttctcttgtgggcatttagtgctataaatttccctctacacactgctttgaatgtgtcccagagattctggtatgttgtgtctttgttttcgttggtttcaaagaacatctttatttctgtcttcttttcgtcacgtacccagtagtcattcaggagcaggttgttcagtttccatgtagttgagcggttttgagtgagtttcttaatcctgacttctagtttgattgcactgttgtctgagagacagtttgttataatttctgttcttttacatttgctgaggagagctttacttccaactatgtggtcaattttggaataggtgtggtgtggtgctgaaaaaaaatgtatattctgttgatttggggtggagagttctgtagatgtctattaggtctgcttggtgcagagctgagtacaattcctgggtatccttgttaactttctgtctcgttgatctgtctaatgttgacagtggggtgttaaagtctcccattattattgtgtgggagtctaagtctctttgtaggtcactcaggacttcctttatgaatctgggtgctcctgtattgggtgcatatatatttaggatagttagctcttcttgttgaattgatccctttaccattatgtaatggccttctttttctcttttgatctttgttggtttaaagtctgttttatcagagactaggattgcaacccctgcttttttttgttttccatttgcttggtagatcttcctccatccctttattttgagcctatgtgtgtctctgcacatgagatgggtttcctgaatacagcacactgataggtcttgactctttatccaatttgccagtctgtgtcttttaattggagcatttagtccatttatattgaaagttaatattgttatgtgtgtatttggtcctgtcattatgatgttagctggttattttgctcgttagttgatgcagtttcttcctagccttgatggtctttacattttggcatatttttgcagtggctggtaccggttgttcctttccatgtttagtgcttccttcaggagctcttttagggcaggcctggtggtgacaaaatctctcagcatttgcttgtctgtaaagtattttatttctccttcaattatgaagcttagtttggctggatatgaaattctgggttgaaaattcttttctttaagaatgttgaatattggcccccactctcttctgaacaactctttactgatcttaaagttttttgatatccttgaaatttctgctacattacttattttaaactaaaataaccagaattaggactaaagaaataagtcctatctagtttcaacaaatttctaaaatataaattcctttcctcttaaaaaaaaagactaagtttagagatttggcgtgagatagctgagtagaagtgggtaataagcaccactctcatggagagaagaaacagtggtgaatggacactagctcttcaaccagaacatccaggtggaaacatggggatttatcagggaaacagcatcacccacagtgaacagagaagagcaagacaggacaattgcccacccagaagtggcatggagccagaggagtcctcacatcacagggaacagtgagtgagtgagagtccccagggattcacacttctgtcatggacctttgcatccttggactcaggatcaggagatttctcatgatccctgcaaccagggcttccagacaaacatgcaaagagttatgtggagtcttggcagagccatcactcaggtactcacagactcccaggagtgctggatccccaggcacctcaacaccagcagatgcagctctagcaatggaggaggccaggctccctcacgtctccaggaaaggggctgaatccatgtggctgaagagtaactaggcccagtagaccttatcctgcaaggtgctacaggcctcgtctctgcagcaccttgcaggataagacccatgggcctgggacactagtgagaccaccacagccctaccagaattctcggatcaggagcagctctgtgcttttctgggacaagcttctagagggagaggcagaccacatccacaaccctccctcctgtttgccctcaggctggggagtgtactcagtgattaggggcaatcgtagacactcagtaaaaggcagccaccttaaggaaaagtagccagattgttttacacaggagcccccacccctgctacttctcactgagcaaggcctcctgacctagaacctcaaccaccccacactggactcttaggccactaccagctctccacttccctgggacagagctctcagtgggaaaggcaggccaccatgtttgttgccctacaaccttccccactgatgccctcaagatcaggagggtacacagtgattagggactaccatgaacccctagcacagtgcagccaccttacagaaaagcagcagactgttttctacatgggtccccaaccctgctatggttctctgggcagtgtctccctaccggggtctctagccaccccctacctaggctctcaggctagtagcagctctgtgcttttctgggacagagctcacagaaggagcaagcaggccaccatttttgctgccctgcagcccttgctcctgttgcccttgggattgagaggacatatagtggttggggaccgatacaaacctctagcacaacacagccactttatggaaaagcagccagacttgtccacatgcctccactactcttcactgggcagtgcctcttgacctgggctcccagcacctgtagtcccagctactcaggaggctgaggcaggataatcgctcaaaccagggaggcggaggttgcagtgagccaagattgtgccactgcactccagcctgggcaatagagcaagactctgtcttaaaaaaaaaaaaaaagactctaactgatctgatagagtggaaaacacactacaagaatttcataatgtaattgcaagtattaacagaagaatagaccaagttcaggaaagaatctgagagctcaatgactggttctctgaactaactcagtcagagaaagaaaatgaacaaaacactcaaaaaataaaggattatgtaaagagaccaaatctccaattcattagtatccctgcaagagataaggagagagcaagcaacttggaaaatatatttcagaatatcacccatgaaaacgtccccagcctcactagagaggccaaaatacaaattcaggaaatgcagagaaccagcgtgagatactacacaaaaagaccatggccaagacacataattagattctccaaggctgaaagaaaagggaaaaagtgaaaggcaactggagagaaggggcatgtcacctacaaaggaaaccccatcaggctaacagaggacctttcaatagaaaccttacaagccagaagaaattgggggtctatattcagccttactaaataaaacaatttccaagcaagaatttcatatccagccaaactaagcttcataaacctaggagaaattagattctttcccgataagcaaatgctaagggaatttatgaccaccagacctgccttacaagaggtcctgaaaggagtgctaaatatggaaagcaaagactgttataagctactacaaaaagacacttaagtatacaaactgttgaccctataaagcaaccacacaaacaagtatgcacaatagccagctagaaacatgatgaaaggatcaaatccacacacataaatattaaacttgaatgtaaattggctaaatgctccaattaaaaggcacagagtggcaagctgtataaagaagcaggactgaatggtatgctgtcttcaagagacccatctcacatgtaatgacacccataggctcaaagtaaagggatagaggaaaatctaccaagcaaatggcagtcagaaaaaagcaggggttgttatttcagacaaaacatactttaa

SEQ ID NO: 1881247 - DNA, 4001 bp, Homo sapiens
tatatttcaaaataatagcaaatctatgcaaatattaaaatctgaaatctgaaattagtatatttcatatataaaaccgcattaaaatatagaaccagttaatataaattttccatttcagagaactgcctgcagaaagttatacaagagttcagtgttttatccactctgttgtttatttgtcagtatcaggattttaaaaaaagacctatctacatcaatacatatttgccacttgaaaataaaatgaacaccaactttagctaaataaaaggcatgcaactctgttcaatagtgataggattgtgtttctaggtagcaaaaagaaggaaagtaaacaatttaacagaattaatgagatgtataactttacattgtatttacactaactcgtatttgcttattttttctaaattatctatttaaaaaatttccagtgaatatcccatgcaaaacagaagttaattatatgaatgatttagggggaaaaattacttttccaaacacctacactaaatatagtgtaatgggcatggtctgtagcctgaccagctttccatccctttttgctactttcaacaaaactttaatttgtgtaccttttcccccagcggctccatgagacaaattctctcctaactcccagagtattccttactcagagagattgctttaggaacccagactgagccaggaggcttagcctgcctgtggaactgctattgtttatatggtggggtaaagttagggacaagtaaataaagatacaacatactgaagggaatgatttttattccacctatgagaatattccacatatgagaaatgcctgcctttcatactggatgcaaatggggaaacatgttgtcctgggcttttctgtgttttctggcaaatatgaagattttctccctcaagtgtgtgctcaattcctcccttctcattctcacactttagtagtaatccttaacatgcaaaaggtagtattcacggtgttttcacttacattgtctcttttaattatccttccaaccctggtaagtatttcagtctctagtcaacaaatacaaaaactaacccacaacaaggtttaagtactctgcccacaacacgcacactgtcagtgagaagcacagcccaggtttgaaattctgtttttatattctagctggagcaagcatcccacatggacaaggatgaaccaagaatttgggtcttcagacaacctgctagtttaggaatggtcactcagaggtctcaccctactgccttaattgtgaatttcttagcttgctcagttgccctatctagttgttctccccacccaattcccattctccagtttcaggatgggacctgctctccttaatactttatactttcttgtattctctttgctaaggttggaccacgttccctacaatctctacctatttataaatggtttatcaactaagtgcatatctctcaaagtaaccaccaccaaaaatgactttcaaaataattagctaccttgaatttatacacaggtatgaaatcactcctgaaacctccagaggcctgtggtctctgcttactgcagcctagtgagtacgatggcaaggatgcaaataaagtagtatgtagttaggggaaagccgagattccttcaaacatagcttctcactttgttctgcatgattgttcatatggtactttgttctatatttatttgttttaaatataattgttaatgcaaattagaatgtcttcatttattcttaaaacatgatatgaatgtaacatgcaaaatgaatatgtgtactatgctcagtagaaactttttcagaataacatccaattttatgtcaaagcgagaatgttcaatttatacaatcttaaggcatctagtttccaaaaaaaaaaaaaaagagagagagaaacactttgctgttttacaggtgtttgttatgtttctatgtccaaaacataataaactcctgtaaaaaggcaaagtgtttctcaaagggtattttcggttgaaaaaaaaaatcaatgttgaacataattaaaaaagaatatattctctctccactgaaaaaaaatagggatcactcaaataaattgctcttaacaacatgaacctgccaaaactcaattctttcctgtgctattatttatttgatagattttactacatcatagcccaacctcataaaacaaggatgaataagttatttaccaaaacatatccatgattaagttttatttacttgcaaaaggccataggacatgcatttctaaacattaacaaatgagccatgtctatgattctctcccctactatcagttaatctatacattttccctccctgctcactctcctcccaaacaacatatatttttttctgttttgaaaaattcagcatatcattgtttcttttcttaactggttaagggttgcaaatgtaaatgaataaaaaataaacagtgtgtcgcctgggcatggtggctaacgcctgtaatcccagaactttgggaggctgaggcaggtggatcacctgaggacaggagcttgagaccagcctggacaacatggcaaaaccccatctatactaaatatacaaaaattagcaggtgtgctggagcgcacctgtagtcccagctactcaggaaattgaggcaggagaatcacttcagccttggaggcggcagtggcagtgagccaagatcacaccactacactccagcctgggccacacagtgagactccatctcaagaaaataaataaataaataaataataaagtaaacaaagctttattggaggatataggaaaacatttatatatttatatgcaattgggtatataatctttcttttttcctgaaataaaaggtcaataaattccagtaatttgaaatttaaagcttttgtttataaaggtttatcaaaggttgcagtataaaaagaaaagccacatacccatggaaaattatataattgttatatatatatacacacacaagtatacactcacacacacacacacacacacattttttttgacaaaatattacacagagaataataagcttctgaccaataagaaaaggagggcgggcgcggtggctgacgcctgtaaacacagcagtttgggaggctgaggcgggcggatcacctgaagtcaggactttcagaggagcctggccaacatggtgaaacctcgtctctactaagaatacaaaaaaattagccgggcgtggtggcgggtgtctgtaatcccagctacttagaaggctgaagcgggagaatagcttgaaccccgcaggtggaggttgcagcaagacggtaccattgcactccaccgtgggcaacaagaacaaaactccatcttaaaaaaataaaacaaaaaatagaagaaaaaaaagaaaaatttaacacccaatggtgaaaaatgcacacatgcatttcagcagtgcattctataagatatatggatactctctacataatcagcaaaaaatatataacaatgggatgtcgtttttctttcttcagacaggtacagatttaaaagataccataacaagaatatgcaagaatgtagaagtagaatatgcaacattggtggaagtgtaaactggtattatttccttgaaaccaatttgaatttttctggcaaatttgaatatttgcaaattatttaatccagcagtttcattcctggaaattactgcacatgtacaacatgatcatgagatatttattagtcttttcagagaaacacagtttttaaaagaaaaatacttagaaataactcaattattcatcaaagaagaaatgataaatagtggtaagttatattcattaaacaaaatactatatagtggtggaaatcaacaaaggaatggaacttttttgaaaacaaaatatcaaaggaggaacagtgagtattgaagaatgtatacaatatgaaatcatttatataaaatttaaaatcataaaaagtttaaatata

SEQ ID NO: 1881248 - DNA, 4001 bp, Homo sapiens
tgacattgggcaagccacttagtttcaatatcctcatctgagggaaaagggggttgaacccctagttattgttcaccttccatccaatctaaattgatgtgctttgaaatttttgatgcccacatactaataaaaaacagcggtaaaaacagtgttttcttacgtgtataatctttgtgtcacatatttaattgtgccaacagagaaaacccatttattttcaaagactatattcaaagactatattaaatagactatgctgcaaaatctcatattccattagaaagcaatgtcacattaatgtacactcccccaaattaatttttataaaaagttaaatcattagcaataacaagcgacaatatttcaaaagtgattttcagatttttcatttcaatcccagttatctaaattgcaaaaacagtcgttgagagggaagccctaccaaaacctatgaatggagaagggagaaaggtgtagttcaaagtttctcaattatggccctgttgacattttgggccagataattctttattgtagggagttctctgtgcaccacgggatgtttggcagcagcacccctctgctctatccacaagatgccagtaccactgcctgctactctgaagtggtgacaaccaaaactgtctccagattttgccaaatgtctcctaagggaagaggagtggaggaatcagccgtggttgagagccactgggttaggtagaaccgctttattttagtggtttggatcagtgatactcaagagatcaggatagtcacctggagggcttttccaaccatacatggctccagagattttagtatgcagctcacaccccctcaattatttgtaattacgtatacctccattgccccctctcatctctgtccagtgtggtgcagtacaccaaaaaaaagtagagcaatttttcaaagcctaaaatattctgggttaatcagatgaaatctgtgagagccttttccttaatgacggcccctccaagccaatttctgaactcatgtaattcctcttgagttctgcacatgcacagccattttattggcaactgtagcaccagaacttcactgtctttctttacctgttctgggagaaaactgacaaaagttgtgataatccctgcccttctcactattatgagagagaggggcaagcaaggccacggcacagagcaattaaaaacacactctcctcttccctttctataaatgccatccacacaccgcaaacatgcggagtctcattcttttataagcaacaatccttcaactatgatcataactgtctcgtcactctgggtggtgaggtggccataagtctgaaaaagtgaggctcttcggtgaagaccagatacatggaaacatgcttctcctacctgccaaaatagctccatgcctctggcccaaaccttaatcaaacccttggctttctgcagcaatgttacacataaaatgctttcacacacattaccttaaatgatcctaaacaatcttgtaagtgggatggggaggtgtttttattctcattttatggatgaggaaactctggcccagtgaggttatgagactagtctcagccagttatttactgggggagccaagatttgaatgcagcttgctgacctcaaagccagtgctttttccattaaatttcacaaaagtagtgctcagcagagctacagctttaaagccatgatggtagtctttagattccatgcatttaggactctttgcaaggcctggatcttaaaaaaacaaattctactctgctgtattcatgcaggtctgacaaatagcagtaaggcagtcatccttcttagcaagctacctacaactgacaaagccatatatttttctaatggaaaacgtctccacagacaaggaaataaagtcacttaactttccaggattcattaactaaagctgatgttgcttctgatgctgttgttaatgtcccacaaaattaatctaacaatacctactaactccttgttcacaaatcacacactctaaatttggagtgtcctagaatgatgtctcttttcttgttagtaaaactgctgagagccattccctagcaaggctggcaagtacaggtttgctattggaagatactggaaggagaaactgccattaataaagcatgaatacttgtcattagccagactggaacattggaaaagtgacattttagcttagaaggaaggtctctgaagctatatgggtaggtttgagggtcttaaagttggcttccatttgaaggggcactcctcccagcagattgctacaaatctcctcccagctgattgctcccattggccacctttctgaatgtcaacattaggaaataagtttaatatttacattttgtgaaagcatgaccaagaaaaggtaatactaacctcatctatagcttttttgtagctctgaaatgagaggaacccaatccagaagaatccacagaaggaggaaaagccagcagaaaggcagcagattagacacaaaattgtaattgttagtacgcaactgataaatacaaaagggcgaagagaatgtcaatccagaatgatgcaaatcccttcattattactctcggtatacgtcgttactttaagatgttaaaaaagagtaaaccaaaaagcttcacgttcattttacagaaaagattctcaagagatttaaatagaaaaaatggatagtaattcatcccaaattaattttcaactttcaaattttagcctccatactcctctttaaggctacctgggggtctatcatgttacagcagtgaagctggatgctaagttgttacgacgcctgttggaccctgcttaaaaagtttggtccagaaaatatagtcctggaggcatgaaaaatagcagaaaaactgtaatattaattcatgtggaaaataatatggggaaagagtagaagagattagagaagttcatagaaagtacccaagtctctttaactgctactttcaacatctttttgccaaagttgctgagtagaaattatggaatgataggagttgtttctcttcctgttttatagttaaaggactgctaatgatcagcaaatagccaaaggcagaggagtcaatccaagatctcttcggttctttcctaatcaggtatgactttcttcgggatgtttctagcatccgttcttactaatctcaacaatttttgtttgcatcatgagtgtatccccaactacttaatcctgtgggttctctggtaaattaagagttcaaaactcttggagagaaaagcactcacagctggtcgactgggccgggtaatgtccctggattcttctggtttcaccttcgcaggctcatgggggagcacaggtgatccttctgacttactgttggctagaggaaaaaaacagaggaccaagaaagagatggccatcaaaaagtgctggctcaagttctgaatgaattatctgtgatgtgtcatcacattgagattactcagtggacacgtcattcacctgggcaaatcctcaagaaacatccatgaaaaatataatgttcaggcaaacacatttaggcttgtgacctggaaatcactagtaacaattaaaaaaaaaagaaatgtagcaagtactatcaccactagagcacttcttatgtgtcaggcatagtgctaaatgctttccatgtcaattatctcatttaatcctcactccaacccaatgatatggcactattctcctattttacagaacacagatttacaaagatgacacaactgtccggaggtcacactgaaattatagacagagctggagttctgatttctgaaagtcctattctcagtcactatgctaaatgagcctctaaggttctatgcttgttttcttcttttatcatttgtccaatcaggataggttattttgttgaaattttgtgagggaaaaaaaatttattttatttggtggaacggtttttaattggagatgggagt

SEQ ID NO: 1881249 - DNA, 4001 bp, Homo sapiens
ctccagcctccaggggaagaatctgaaaaaccagagtgacaaaatgacagcgctcacaggaactttgcagattatctaatctttttatttattttattttattttttgagacagagtctcactctatcgcccaggctggagtgcagtggtacgatctcagctcactgcaacctctgcctcccgggttcaagaggttcttctgcttcagcctccccagtagctgggattacaggtggctactattacacccagctaattgctgtatttttagtagagacgagttttcaccacgttggccaggctggtctcaaactcctgacctcaggtgatccactgcctcagcctcccaaagtgctgggattacaggcatgagccaccacacctggccaattgacttttattagcattcatatacaggttttgtgtgaatatatgttttcatttctccgggataaatgtgcaaaaatgaaattactgcatcatatagtagttgcacattcagtcataaaaaaaaacagccaagctgtttcccagagtggctgcaccactttaaattctcacagcagtgattgagtggtacagttcctttgcatccttgacaatagtattgttactattttttattttggtgattcttttttttttttttttttttgagacataatcttgctctgtcgcccaggctggagcgcagtggcatgatctcagcttactgcaacctccgtctcctgggtttaagcaattatcttgcctcagcctcccaaggtgctaggactacaggcgtgtgccaccacacctggctaatttttgtgttttcagcagagacagggttttgccatgttggccaggttggtcttgaattcctgatctcatgtgatctgcctgccccagcctcccaaagtgttgggattacaggtgtgagccaccatgcctggccttattttgttgattctaacacgtggtgatatctcctggtttaaagaagcgtttccctaatggtatcaaacatcttttcatgtgcttatttgcaatctgtatatcttctccagtgaaatgttgctttgtatcttttgctcatgttctaattgcattctttgttttgttactattttaagacttttaaatgtattctagatactagtcctttgcaaatatagtcatgcatcgcataaggacattttggtcaatgacaaactgcatataggatgcggtcccataagattataataatgggcctgaaaaaattcctgttgccgagtgcaatgctactcatgtgtctagtgatgctcgtgtaaagctactgtgctgccacttgcataaaagcacagcgcacaccattctgtacagtacacaatacttgataatgataataaatgtgttcctggatagcacagcacacaccattctgtacaatacacaatacgtgataatgataataaatgtgttcctggtttatgtatttactataatatactattgatcagtgttttagagtgtactccttctctctataaaagaattaagtgaactagcaggccctttgggaagtactgtagaaggcattgttaccacaggcgatgacagctccatgtgtgttattgcccctgaagaccttccagagagacaaaatgtggaggtggaagacagtgatactgatgaccctgaccctgtgtggatctaggctaacatgtgtttttgtgtcttagttttcaacaaaaaagtttaaaaagttaaaatactaagtttataaagttaaaaagttacagtaagctaaggctgacttattgaaaaaatgtgcttatacatgtaatatagctaagctggcttttgcaaacatagagtcctgtggatgttatgctgacttcggcttggggtttttcacagagagaagcatggcaagggggactccatcaggttggtgcaaaggtaattgctgttttcgcaattaaaataatgggaaaaactgcaattacctttgcacccacctaataacttatctaggggactctttctccacccaaaacccaggacacttggcccacaactacatcaccaccccagggttccaggacacttggcccatgactacatcaccaccccagggttccaggacacttggcccacaactacatcaccaccccagggttccaggacacttggcccatgactacatcaccaccccagggttctttactatagttttcttgttcttccttcaattacgtgtgacattcccaactccaagattcttccagtccttctctcccccttcatctaaagcaggctgtcatgagtttctgtcagctgcaatcaagagtcatgactcttacagtgggtaggattactcccttttttgttgtcattaaggaaacctgtaagaggaaaaacaaacacactttatgtggagagacagggaaagttgttctattcagtctggaatctagtccctcagctggtggtccaccttcggattcactggtcttgggagtaagacggtgccttgtagtcaaagaagtgaggaattctggtgcctcctgagggtggaactgaggagaggagacgtgagagaggatgctggaaaggaggaagcagccagaatgtgtagggcctttgtggccaggccaaggagcctcagggaatatctgagcgtcttaaataggtcagagggcaattctgaaaacaaactccttctacctgctgtgtaggcaatgagttgtcattgttagatagaggataaaatgaacccaattagattattgccatcattccagtgattgaagatgttgatctgtaatagggtaatggccatacactttcgagaggaaaaatgttcaaatttaggggataattagaaatctgcacttacagcccttggtgacacttttcctatgagccaaacggagagggggagagagagagaaggtggacagtcaccgacatatgaggcagtggaagaggaacaggcatggataggaagagaattgtgggacacactgggttcgagatgcctgtgtgagacagtctcatgaatatgtccagtagtatattgaccaagcaagtctgtcaggagcctctggaaatgaggtacagaatttgatagtcatcactatggagatggtaacctgagccgtgagagaagctaaaatccccggggagaggatgtagaatgagaggagaaaatgggccaggacaaacacaaggaatgctcggagggaggggcaaaaccagaacagtacagcgtccccaaaccaaggaaaagaatgttgccagaagaggagagtcaggctgtttcaaactctgctaagaagtgaaggatgttgcatattgagtagagtccattggggttaccagtcaggctgactcagggatcctctttggcagaagtagttccaatgaagtgggaggaggaagggaggagcagaggccaaatgagcgtgaggagtgtttaggagttgacagaaagtgtatccacttttttgagacgtttagccaggaagagggagagacatggggcagtaggtggaggaggagatgaaattaagggagtgtatggagttttaaaatggaaagcttgatcctgtttaaatgctgttttatgcccctacgagggcgaggttaaacatacagaatagaggcataactgatagagccaagactcccacccaggagcgggtttcgagcggcacctctctaattcaatcccaaaggaaaagaggatacatgtgggtccaggtacatgctgaggtttggtggcaggactttgaaggaggtcccatctgatggcttctatttctcctgtgaaataggggaagccctgtctgctggttgtgatgtgccgtgacagtcagaaatgcggggaaaaggggacaggtctgaaacgggaggcgttaagaatgggaaagtaaaggcaggcgcgatggctcacgcctgtaatcccagcactttgggagctcgaggcgggtggatcacctgaagtcgggcatttgagaccagcctggcca

SEQ ID NO: 1881250 - DNA, 4001 bp, Homo sapiens
ggatatgggagaagcacaaggtaatcatcaagccttacagtgaattcagtactcctgccaaaagcaaccagaagcattttgcccttctgactggtagaaaacttgactgctcctatgtagagctcagcatctgagacaactcctcttcaaagcattgttccatgtgctctcactataacacattagctaggcaggtaatgttttcctttcagttgagacttgtagatttttactcctttaagaggccacacaaatggtaagtgactgagtaaagactccacaaagatctcctaactcttcatcctgtggtctttacactgaactgcactgcctctagataaacttatcttttatcatattagaatttaatggttacaacagtaccgtttcccattattaaaagtaaaactgcataagggtttcttgtgattttaattcaccaaaaagagcagtgcttgtgcatacagaaagaaatacaccatgagatatttgtaaatattagagctgggacaaaccttaggagatgaactaatgctgctttaactcttctcccccacctctatcaaagtagttgatgtgtaaacaagcttctggcatgaaaaccctcccatatatagctactgctatcaagtgtttattgagctactatagatatcagtgcctgcctatgtccctttttccctgaacgatttttgcatatgctggcccatcttccaactgtatcacctacatcactttccttaagggcttgttctggtcactggatccttctctgctcatatacatggaaggttgtagtgccagagaattaagaattgatgactgataggagttggtagattaatacctcagtttcttctgtcttctagggagatacctctgaggtctatcttccacattggttctcagagttccccagtaagattaagctccaattactcacaatgcaaatgtgtgtggtaatccactccttgttggctttcttctctttcttgtctgacttctccatctactaccagtatttcctggggtgacctctgtcttatattgggctgctatgacaaattaccatagactgcatgacttataaacaacagaaatttacttctcaaagttctggatactgagagtctgcgatcaggatgccagcattgtgagggctcccttccaagttgcagagtgtcaacttctcattgtgtcctcacatgacagaaagagttagagagccctctaagttgtcttttgtaagggcactaatcccattcatgaagactctaccctcatcacctaaattacctcccaaagttcctaccttctaataccatcacattggggattaagatttcaacatatcagttttttgaaagggacacatcagtctataacaacctctcaaactacttgcacccaaatccttgtcttggagtctgctcctggggacccaaccaaagatattaagtgttttactatgcatcatgttagaagcttagtgcatttctgttttatgttaattaatcctcaggataatcctgcaagctatttttaatacccattttaaagatgagaaacatggaacttacagacattataatttgcctatgattgcccaaataggagtagaagagccaagattcaaaaacaggtttatctgactccagatcttattttaaacactgagaatcataagttctttttcagtgctgccccacaggtttatatacaaaataaaaaatatattggatcacttcgtaatcagtggaattcaatgaccaattgaaaccaattaagtcatatgcccatcaactccaagggaatactatattcaatgaaaaaccttaagtgagatgctgtaataaaagctatcactgatttctgctacctagtccatgtactgagcacaacactgatgatgggataattgtctggtcttgtttaggccatcatcctgttatgtttgcccatggacttagcataatgggatgatggcctaaacaagatcagacaatagtgactattggaaataattctaagggttttcaaccaagatggatggaagaaatacgataattatatccatctttttatatttcccaaaggagtagatgcattgaaaacattatttaaacatattagtaactgctaaatggtaaatttgaggttaggaaaagtcatcgcttgagaagactactgaaagatcattttacaactgctttaaccagattaagcccttctccttagcagtatttacctatagggggtgtgtaatggcaaaccagctctctaggaggaagtcagggaggaaacagaacctgattggtagtgtttgccaatttctgttgtgtaaatattcccaccatggccaagttcaagctaccaacatgatgtcattgaataatttgaatgacattgtatatagttggaagcacacaatctgccctcacaagccagtatgggtcagctctagcacaccactgttcccacaggatgatgagagcaacaacctaatggcttaagtgcatctcctttaggttctagggaagataagagatgagaaaagcagcaaacaaacaaaaaagcaggcaaatctgctctaggcaagatctgctttattctgagaggtaacgactgttctctcctagcatggatcagagacaggaggaattgtgcaacatagaacttaaggaggctgggcccggtggctcacgcctgtaatcccagcactttgggaggccaggcaggcggatcacgaggttagaagttcgagaccatcctagctaacatggtgaaacccagtctctactaaaaatataaaaaattagaagccgggaggcggaggttgcagtgagccaagattgcgccactgcactccagcctgggcgacagagcgagactcggtctcaaaaaaaaaaaacaaaaaaaaacaaaaacaaacaaacaaaaaaaaaaaaacaaagaacttaaggatagacagaacagtgtttttaaatttcagctgcatattacaatcccctaagaattttcaaaaagtcctgatgtccagtcctcactcaaggccaattaaatcagaatctctggaagtggtacttaggcatcagttgatatcaatgtgcagccagcagtgagaatgaatgctccataaaaacacttctcaaatttgaatgtgcacatattcaaatgtgtgatttgtgggtgatttgtgaaaattcagactctgaaaatattaagtaaaaaatagtggtattttgtaagttcaagaacatgaaaagctaataagctaattaacgatagtagaagtaaaaccagtggttgcctctgggagagtattgactgaaaagaagaaggaaaacctctttggtgctggaaatgttctacatttgatgtgggaaaaggtaacaaaattgacacaataagtagtacactttaggttagtacactttacaaattaagttgtacagattttttttttttttttgagacagagtttggctcttgtcacacaggctgcagggcaatggcatgatctcagctcactgtaacctccgtctcccaggttcaagcgattctcctgcctcagcctcctgagtagctgggattacaggcatgcaccaccacacccagctaattttttgtatttttagtagagacagggcttcaccatgttggccaggctggtctcgaactcctgacctcacgtgatccaccccccttggcctcccaaagtgctgggattagaataaataccaggcaccatgcccagccaagttgtacacttttagattagtatactttacacaacaaaatagtgaaactgggggaaaaatgcagaacccatgtaggttctgatggtctagatttctaacacgttcccaagcaattctgatgctcgatagcatctgatcttactttgagtctcaaggctctagactagtgtcagggtgacttacaagtcgatttgctataaatgtttacccagtgcttataatgtgccaagcacagggctg

SEQ ID NO: 1881251 - DNA, 4001 bp, Homo sapiens
ctggcattcagggtgttcctgtatgactggggaggagctacccaagccctgcagggaactcaggagctctcagggctttggggccaaggcctaaacttaacctccctccttttctttgtccttgaagagttcatggtacaacctgccactgtgcctgttgcataggcagtctccaaaggccacctcccctgggaagcccagggtccttggggggcctgggaaatgataatcaattctattcccaggagctactgctttgttcatgttattgcctagtcctccttgccatgctttccaaaggctggggctggtagcctctcccgtgactcgttagggctgtcattagcactgcttcctggaatttaatttaatgaaggagcaaaaacagccctaatgaaggtgatgcaacagcaaacagccaagcaaggtgcaccttgccagctgggctcaggggcttcctgtagattgtgactaggagcaagggagtaataggggaggagggacctgttgcgggagggaagctggtcactgagttctggacgcacaagcatcgctctgcctgtaccgtatggagcaaatactgcgatcaaggccaagcagacagagttagggaagtgggccttgtcaggagtgacttcaggctgttggagaaaaagcttttgaaaagctatcagccagtgcaaaggccctaatgtgagggccagcatggcatgccatgccaacaggacaggctgtgggctagtaccagggggcaggggtcagcaggggccagatcatcccggccatggggcaagaaagtttaaattgcattccaagtatgaaggaaacaactggagggtgttgaaggcagaatgacatcatctgaattttttttttttttttttttggagacggagtcttgctctgtcacccaggcttgagtgcagtggcgcgatcttggctcactgcagcctgtctcccaggctcaagcgattcccctgcctcagcctctgagtagctgggattacaaggcgcgcccccacgcccagctaatttttttgtatttttggtagagacggggttttgccatgttggccaggctggtctcaaactcctggcctcaggtgatccgcccacctcggcctcccagagtgctaggattacaggcgtgagctaccgtgcaccgtgcccggccaacatgatctgatttttaaagttccttctggttgctatgagtagtagaacctgaggataagagagatgggaggataggaggtgggcaccattcgagggaaatggagtgaagcctgtggagacagggctgtcccgtctccggggagaagagagctggtgagggggcggggagcaattataacgggagtgagtttttgtttcctccagcaggtttgggcgggctggtccccattcagccttccctccaaatgggcgtggctcagacacctaaagatcggtctaaaggggctcccaatgtccccgtatctgctttcccgcctttgtgcacctctctacctctaggaagccttccttgccctgtcctgggtcttggccagcggtgggctccccagggacctcaccaggacggcattttgcgaggtaaaaagccaggaggctcagcagtggaccgagagctgcgcagggtgcaaccttgcagggtgctacctgcccttggccctgcccaccgcagcccctccctaattcttattttcccccttgtccactcccagtgcaacctcctagttcttcacctcccccaggttctctcacccacgccccgcccaaggcgtcctcccccgattctggcctctcctgcagagccgaagccggaagcggcctcggggtgcgctgcaccgcctcttccggggcctctctaggccggagcgcgggatttcggtggccgggagaggccggaacggcttcgcggggcagcggcgcctcctggcgggcctggggtgcggcgcgggagccgaggccgacctagcacctccccgcgccccagcccccgcctcgcggcccccactcacggtggcccccgccttgcctgctctcctgtctcgctctgcctccgggcctggcccccgcctccgccgacctgccactccttggccgtcgaggcccggtctccgcagagctgcagccgtcacgcgtcctcttgcaactagccctctgtggcaccccatcccccttgccccgcgcggggccccacctcgccagggtctcctccgcgatagccgccatcggcttaccctcagaacgtccccagtgacacccgcctttctgcttcgtccagcctagcgtcttcacaccctccgtcatgagacgctccctccttctcgcgcttccacttcacagcagagattagacggtgatgtgggtgattctcccgctgggcacctcgcctgcttcctgagggcggagtagctccgcatcgcccatgccagcctagggccgctgcgccgtgggggctcggatgacttgctgagtttgatttcagagtcatcgggaggatagagaggaactgggtaaaatttgctctcagaggctcacgcctgtcatcccagcactctgggaggccaaggcgggcggatcacgaggtcaggagatcgagaccatcctggctaacacggtgaaaccccgtctctattaaaaatacaaaaaattagccgggcgcggtagcgggcgcctgtagtcccagctactcgggaggctgaggcaggagaatggcgtgaacccgggaggcggagcttgcagtgagccgagatcgcgccactgcactccggcctgggcgaaagagtgagactcagtctcaaaaaaaaaaaaaaaaatttctctcagaacacatagtcaatggcggacatagtcaatggcgggtctgggggtccggcctcttcctctactccgggcttcccccaaggtcaggcagtccgtggggggtctggctggctccctgcagtacacacctgcgccgatgcccagcgttgaggccctacccatcccgggggacctttcccctcccgcctcccgcccttctgtcggctttcttcccacggatctgccaggaagccttccaggactgtcctggagcatcaaggctcgaccgcacggccatgggtaccgaccatcccagccacacggctgggcaacgtgtggtgggtcaccgcgcagccagactccggctggtgaccgccaggggtcagcagaggcctccttttgcatagcttggcggattaggtcgctggctaatcctgtgtgtgtagccaggcggtttgtagacttgtgtggttggaaagtagttttatgctttcagatttttccagggctgctcttctttctaagcaaccttcagtcaattattactgctccgcgttgttggaaagtcagttgctgggtgactttaaactagggtccaggcagacatcttttttcttttcttttttttttggagacagggtcttgctctgtagcccaggctggaatgcaatggcgaactcggctcactgcaacctccgcctcccgggttgaagcgattctctggaggtgcctcagcctccagagtagctgggactacaggtgtgtgccaccatgaccggctaatttttgtatttttagtagagacagggttttgccatgttgccaggctggtcttgaactcctgaccttaagtgaatcccaaagtgctgggactacaggcatgagccaccacacctggcctaggcagacatctgaattgtcccctgggtctctccacggctccttgccatccttgcctgcgtcttggacccgctgtgtccctagccaccagcacttgaccaggcaggtcagtggccaagctgcacactccctgatgtccagacccccactatccaatctctgtctactgttttccagctcagtttccagcacccccatcctggaagtctttcactgagctcaaacctaccctcctaccagctgcttccattctctcacctcaataccttcttctttccagtctttcttcctcc

SEQ ID NO: 1881252 - DNA, 4001 bp, Homo sapiens
cctccattagaacaactttatgtccaaataagaagtgtctaaggagtaccctaaagagatgcaccttaaagttgaagactatgtatataaatcttcagttactaattgggactgatactaaaaataactattgcaggtgccaatacctcccaacacaagtagtttcggtactgagactatctctgaggacttaaacaccaactttatcacatttacatacgtaataatcaccctgtccattctcacacatctctacttgctggagactatttttctttatatctaaaatgctttagcaccttttcctataaaaggcatatttttagaactccacattttttttaaagtaaagttttattttcctacagtccaaccgtgtgtgtttaggaaggtacatgggcctagaaattctgagaaaattatagtagttgttctttgctggggtgctctctttcactgatcccttttctttctttctcaataactctcttcatttacatattattgctttaaaggaccttcaaaatattccctcctgactataaactagaagctaaatatctggtcactctgaggcaggaaagcaaaagaaataattaactgttaacattttatccatgcaataacaacaacaataaaataccttgtttgtggattaaaaggcaaagtcaatcctagaggttgccaatactagttacaaggtataatttgacagataacaccaggtccagactgtaagaaaaatacagtccagattccagaaaacatggccaccctctggggcctgagacatatagcagggaaagattctgtccctgacctctccccacctagcccaccaaggaatggggagctgtggaaggcagagtcagggctgtaagctgggcctaggggagccaggactagcacttagaatgggacacaaagaagatggtgcagagagcaaggggactagaggccagaggttggcccagagctgcttcctgagacaaaccagagggaacaatagacagcaaagatagctgagcaattaggagaccaaaatgaggcgtgcgctatgcagacacggagctctgaagactggaggaaggcttcctccttttcccactgagcaggccccggatatagccagcgggtattcatattgctgctcggaagcaacccatctctcctggaatttgataacataatctccactcctctggtcaccctctcccttccctcatttccctctctctattggaaatggcaaaacaatgaaggggaacatgtagccacaacataaaaatgtggacaaaaatattttaaaagtgaagaagatagacttaaatatacagatgtggatacatagactgcccagtgaccccatctcggcagaaattcattcttgcatggaattcctgaagccaaagaaacaagcagttggtgagacagcatccccatggaacagaataaggctgcctgctgcaaggtttggcaattcaagaggtatggggggaaatgtacccacagcaatgttctctctcaaaagatgtaactttgcagtgttgctgtttttcctgttttctgtattctatgtttggctggcagtgggagggagtgggtgtcagagagagaagactgggctttggagagacaagacagttggcttgaaaatactgctgaaaactgtggggcttgtggatttatttttctctcctgttccattcctaacggaggaaaagaggaaaaggctgttcctgacgtggaaaggtgggtcagatggtgaggtgaccaaatcagagggtttggccacacttctgcttctatccctgttagcatagtgctctttcaagtcctttcaccctgttttggtcacatatatctctgttgcctgaggttatgcctatatacatctgtaggaagcccacagcctctgatataagagcaaaggtacctgaccctcttaaagacgatgctcctgctccctttccaccttcccagactctggactctttttaccttagaccattcatgctgctataacaaatgctttacaatgggtggcttatacataacagaagtttatttcttacagttctagaggctgagaagtccaagatcaaggtacccacagattcagtatctggtgagggcttcaattcctggttcacagatgatcttctcactgtgtctttatatggtagaaggaactagctagctttctagaacctctttaaaagggcactgatcacctcccaaagttcctgcctcataatacaaccacattgggaattaggtttcaatatatacatttggaggaaacacagacattcagaccatactgctacttgccctgggttttaccttagttaacctccctgggcttggtccacagattatgtggaacagagtttctcaacagtaacaccattcacattttgcactggataattctttgcttgtggggctcttgtgggttgaattctgtccctgcaaaaagatatgctgtagctctaaccccagtaccttagaatgtgaccttatttggaaataacgttgttgcagatataattagttaagatgagatcataccgaaataaggtaggcccatagtgtggtatgactggtgttcattcatatagaaagatgtccaaatgaagatacagacatacagggagagcaacatgaaagctgaggttggagtggtgcagccacatgccaggaaacagcaaagccactagcaagtcactggaagctaagagagaggcctggaacagattctccctcacagccctcagaaggaacaaccctgctaacactgcaatctcagacttctagcctccagaactgtgagacgataaatttctgctgttttaatctgtgcggattgtggtactttgttacagtagccacgggaaacaaacacgggctgtcctgtgcactgtagaatgcttagcagcatccctggaatctacccacaggatgccaatagcaacctcttccccagatgtaataatcaaaaatgtccccagctactgtcagatgtccaggtggggtagaagtcggggggagacaaaaattgccttccagttgagaaccaccattttagaccataagaccatagaggaagctgtattgagaaagatcatacaaccttcccagtttacagtatttttctgataatccttcagatggcagaaaccttaaggaatcctctaatccgtggttctcacaggacagggggaggaggttagggggttgagggccaaggggtatgagggataaagaaaggagcttggagggacaatgcagggcccaggctctgctccaggttatgtaaattaggatgggctgggggagggagttgcgggaatgtctggcagccacatgttttaaaagctcccaggtgactctaattgtagccactcatctaccattgaaaccgctcatccaagggaagggctcaaagcctgggctgaaattccaacatgagagaaatctagtcttttgccttgaaattgctcagaacttaggacagtgatctatttaacactttgtttggcagtttaaaaatagtaactgtgggttatagaaatgaaaaccagaaatgaccaaaatgctcaacaatacagaatagttcactacactgtgataacacgtgatagagtattacccactcactacaattatgtttttgaagaatatttaatgaaaaataaataataaataaaaaaataaataataaaaaagttcttaatgtaatgttaaatgaagaagtcagaataaaccaaagtatggttctaattttattaccaaaaaaacttactactgataatgataatgattatgctattatattatagataagaaaactgaggattaaaaatgtaaaagaagctcacataaatagttgatgttgatctggaattcacatttgtttgatcctgggcaaaacaatcttagtattctgctgtgctaaatggaaatttatcaataaatattaataatgattatgtctc

SEQ ID NO: 1881253 - DNA, 4001 bp, Homo sapiens
aaagcattccagatccccagctcatatcaacaaaccatgtatgtgatcagcagtgtgttataaaaacaaggctcagcaccatccgagttacactgttccaaagggacccttatctgtccactgttcccaaaccttagtcactggacaactgctcttgaaaactctgcccatatcatatctgcattctacttactctaaataatttttctttaaatcaattatatcagtatgcttaaaagttaaacccatcccatggaacagcacccataaattcctgacttttctgtgctagttggttttccatgtaaaaatgatgtgtttttaaaaacacatagttattaaactttaaaatgtttgctgtgtatcactggcagagagttgtgccatgatttgggagacatctaatttcctgccacaaatggggacactaagacccagagaggggaagggacccgggaaagccacattgggagatcctaggcttcctgattgtcctgaggccagactgtcccattattggcatccttaatgacatcaaggaagactggtattgggagcacagcaaaggtgccctctgtcaccctcttgccagttgcagttaacattattcatctaaataggaaccactgcatttgcccccttagacattaaaagggtttctgtaggatgttagataggcagtgtattttgtaaaagctgaagtgggaactattttttcttggcatgtatttccttgtgccaggcgagggtagtcaggtttgtcccaaactggtaaggactagaagaagccagctggacttggcggggagtgggggtgcggggggcaggggcaagggaaacaatgcatggacagggtgggacaatggctcttgcaccctgcaggccctctcacacagggccttagctgtgcgggccttctgcagttaatcctcctgtctgggcccactgcccacagcatcctgggcccaccgccaggcagactcagggtagcatggcagggagaagtatctgcttctttagctccaggatcctggagaccagacaggagaggggcaacaaccattgaaaaacagctgaaggggattcttttcaaccaccattccactaggagccccctctttgctcccctccgccccctcaaagagtctgggataaaagcgaggtctgttagaaagcgcccaatgagcccagcaaaagttaagccagttgatgtctttcttcccagagcaaaatttcttgtgccttaaaaacataaagttaggtcagatgagacatgactcaaaataaaccacatacactatagaaatggggaagaatgtgtcattttctgaatcccttctccactgacccactttccatccctccacacaacttcagtaggttgatggcttctactggtccaggccccttgaccccagctagggcctcagggaccttcgggccttttccaaaatttcctccctgatcttggggtagtcggggtgctccctgaggacctggaacagagagagaatgggtgtgcagtatcatgcaggtttccccaccactacaccaggccctccccaccaaggctgctggcttacatcgttgcagatttcaatggcctccacaaatttcttgtccttcaggtagttgaaagcaagtttgaagcctaccggggacatggagagcaaagatggtggcaccctggtgacctgagaacccctctggttctcataacagccagggtacaggccttgagttctggggtcatggtgggggccctcctgcccacctccctcccacgtccattcacgtgcaccctggctggttgccttaccaatggcagggttggcgtgatgactgtacttccaggccagtttgtagttggtgactgcatccttgtaggactgctccttctccatgatgaagcccatgtactcataggccttgtagcaggactgcagggaaagccagttagagcctctgcagagcggaagccccaactggttccctgggccagggtgggactgggaccagaaccagaagcaggcaagggacagaagtgagctgccataaaccaaactgccaagggaccccaggggtaccccaacctttgcaagaagccaactgtgtgccctcctctcagctaccccagacactggcgtaacccctttccctgtagccctcctgttccgccactcccattcctggcctgctctgacctgcaaaagtccctccagcttggaacccatgaagctttcccatctctttctgtcctttagtgttccctcctctggacataacacgacccctgtgcacctcctctcacctggtccatcgcccttgatcctcattcctattctggtctgtcgcccatgtgcccctctcagcctgcctcttcccgactagttcttattccatatggcctctacctgcaaagcctgcttcaccttcctggaatgcctagaatcctttccgccatcccgcagccctagtgtgtgtgtggctccttgccttgttgtattgcacacagcgccgcagcagttctaaggcgaggtcgaacttgctgccctggcagtaaatgtcagccagcaggagccagctcttctccaggtcctcagcctcactcagcacccagggggtcttggccaggcgcttcaactgcatacgcgccttggggatctgcttcaggaacacgtaggcttgtgccaaggccagcagggcagggacgctgtccttctacacaccaggtaggaagtggacgtcagcacgtgttggccgcctggtcttctcggccctgccacctgcccatgcccgccagtccccaccagccacacctcagcctgcgctatctggatgaagctgcccagcgcagcctccatgttagccttctccctggtggccagccggcagaggccctgcagcagccgcagctgggtctggctggagtctgaatgtgggtaaaactcacgcagcagtttctcggcggtgctcacaccctgctgctccaactccttcttctccatgtagctgcaggtgttagacctgggtatcagacacaggccggtggcctgcccgtgtggccctcacctggcttcaacccagaggttgcaggctttctgtaacttccccagggttccgcccctgcctccatgggcccttacttgctctcagctccctggttctcaaaagcctctccgcccacaacctcgttgtctggattcagacagatctgcaccatgtggtagatggcgctctggccccaagtgctgtccttgcgtgccttgttcaggaactttaaggcttcgttgggctgccctatgtgcctgtggtggagaaaacaccaagaatcagtgagggaaactgaggcccagacagggcagggatatacaaggaccactttgtgagtctgcacaaagcagaggctggatctctggtttcccagctcccctggaggagatgcgggcgtcggacctgtgtgttggatgcaggctggtggcctgcccaagtggccctcacctggcctccatccagaggctgcaggctctccctgacttccacagggttccacccctgcccccatgggccctcacttgctgggtccgggtgtcctggaggcagaatttctgctccttttgtgcagagcaagggcctagcctatctgccagtagggcttcctgcacacagctgcccctcaacacaccacacccaactcaccagcagtagatacctctgcagtaattgaaccctggttccaaaggcacccggctagacaccttcttggccaattcaaagaaggcaggaatgtcttcaagttttccacttcttcttagcagatcgattaatttatgcaataccaaaaaattgtctaaaataagagacagaaatctccaggctgaaatgcccagtagctgttatcagatgagggtgctggggccctaggagaagccaagagatactgcccatctgggctgagcagggacattccaacagctccagagtctccactggtctccagg

SEQ ID NO: 1881254 - DNA, 4001 bp, Homo sapiens
tgcagaaaggcagcaatgagcctgtccccagcttctgttgcagggtgaccttggactagcttcccaacctctctgagtctaggtctcttcatttgaattaatcccaaatatccctaccttagggggacagccagagtggaacagctggcagactctccccacaaacactatggattcaggcaggacggacttcaaattcaaaccctgagtgacccaaggcacccccatcactttctggccttggtcccagcatctggaaaagtgaggcaccgcccaccacagaagctgctgggaagatcagacagtaggctatcagcgtccacagcttggggttgttggctgaggcagaagaattgcttgaacctgggaggcggaggttgcagtcagctgagattgcactactacattccagcctgggcgacagagtgagactccatcacacacacacacaaataataataatttttaaaataaataaataaaatttgcatttgatgttccttgacctacctattgaggaatattggaatgatggacactttttagcggtggatgggcttagattcaagtctgggcgctgatgtaaacttgctattttgtgcgagactcctggcctgtctgagcctcagtttcctcatctgtaaaagtagggggtgacaatgggcatcaagaacccagcacacggtaggttcagacattagtcctctactttttatctggctcaatataaccagagggtccagccttgatttttacccacaatttggccatagaaacctgaatatcaggctccccttcccttcttggtgccacagcctggcccagccacaccgatgcaagaacaaaggcagtctccagtctgaaggtccaagccccacagcagggagttcctgccccctggtggccagagaaggaacgggtagcctagtgtggaccccagtggcagcctggtagccactgggcttgatttggggaagtcactagagctgggtcaacctctgctcactgccctatcctgatggctgggccaagagcaagtctctgccaccctaggttgataaggggcttctcaagaccacagctaacacctcctgagaaaagcacagcatggctgctcagaccaccagctggtgctcagttccttgaagaaaggactcagttcaagtctgaaagttgttgagggtggggcggtagcatatacatatttctatctccagagtaacagcagaagtgtgaacgactcacccagcagcatctaggagatgtcaatgcaaagccaatcgcaccagcaatcacacaccaagaacatgctccaaatacacaggagagagcttatcctggggcaagggaggaagccccccacccccagctccatccctaaggcctgtatgcctgcactcactcaggttcccttccccagcagcagccatccccacggggcgctggggtgagcgagcgtgacctccaggcagcagctccaacgacctgcatgggctgagcccctcttacctccctgaagctctgtccttcccaagggttccttaaccccagggcaggaatggcccagccaccaggaggccacacaacacaccctctcctctcatccccaaacccatcacctcccacccccaccacatcctgagagatccagagaccagccttgtcacacagccctgtcacacagccatcagggctgggcaaggccagggctcaggagtagctcagtcattcaccagcagctccactccaggggcttctcagtaaatggtcagtaatgtgttagctttctccacactgggtcccccagcaacctctccccccacacccaacacatatacttacttcctgattttcaggccctcttcattgtcggggagaaaaaattcaaaagatttgtaggtcttgaccacgtcccggcgatactggccaacattgaactctggagggaaggagaggctcagctttcacagcaacagcaacccctaccaaccctgaccttgacccaaccccaggccaaataatagagaataggccttctctattctcttcgtcatgccccacaaagctccccttagacagctggggccaagcctcaccccgagtgggcacaccaatccagttcaggtatcgagtcagcttcttggagatgtaggtcttgcccctggcgggcaggcccaccatgacaatgagagttgggcagttggtcatgcacactaaaaggcaagcagcacagtgtcagatgagggctgggaccctcccagcgcacccctccctctcagcctgtggtctctcagcctcagggcatgggactggcatcagacgtatcttcttggcttcctagcatccccacacagctcctggagtggccccagatgctggtttcaagccaccgttggcatgtcccccttccccaggcccgcctgggctctggcagacacagtgggatctctccagcccttttcatcctgatgtgcaccaccaggcataaagtcaaccgaacttgccactggctaaacatggctaggggggtccccaccgcatgaaggacaggaccaaaacccagcagggtaatcaacaccctgcctctgtcatccaggaatccataccctaacctttttacatctctcccaccccatccatcactcagtgctcccagaacacatagccccactgcatgccctccctgtggtgaacttcttttcatcatacaaagcccagctaaaaagtcacttcctcaatgagtcctttccccaaggcatctccatggccaccgggaacacccctcaccctcaatcctggtcacctcactaatgacactcttctctctagactgatcacttacagcagaagaagccctgtggtatctgagccctttagggccctggggcctggcacagcgctggtgctcaggaactgtgggcaggatcagggagggaggcatctagaagtctctcagggtaaggaccacaaggggttgagaccagagacccagactgatgcccacaaggacagtccctctgatagcccacccaccaccatccatgtgccacaggtcagtgtgccagccagagaagatgccaggctagaggcacggaaggatctgaatacagccccctatattcccagctggctagaacagataccaaggcagcagaactgccagcttcatcttatgggacctagctcacttttctttttttttttttttttttgagacggagtctcactctgttgcccaggctggagggcagtggtgcgatcttggctcactgcaacctctgcctcccaggttcaagcgattctcctgcctcagcctcccaagtatctaggattacagacacctgccaccacacctggctaatttttgtattttcagtagagacggggtttcggcatgttggtcaggctggtctcaaaactcctgacctcaggtgatccgactgcctgggcctcccaaagtgctgggattacaggtgtgagccatcacctccagccttctttttttttttttttttttttttttttttttttgagagggagtctcgctctgtcgcccttgcccaggctggagtgctggaggacactggtacccagctcactgcaacctctgcctcccgggctcaagcaattctcgtgcctcagcctctcaagtagctgggattacaagcacatgccaccacacctggctaatttttgtattttcagtagagacaggatttcattatgttagtcaggctggtctcgaattcctgacctcaggtgatctgcctgcctcgtcctcccaaagtgctgggattacaggcgtgagcccagccctcagctcagtttccagtgccatcaaacgcggtctcacgtcagaagcctcaggaagcttccttttcctcatccttaggacctgggtcaggtaaaaccatagcagacaggcagatgaacagatgtggggacctgtcactgcccctcttcttggttctgcaagtgccttcacctggttgcctagacag

SEQ ID NO: 1881255 - DNA, 4001 bp, Homo sapiens
cattcaacagcttcaccaccacgagcaccaccccagccacagctgcagtgaccacggtgccaaccttgctctggggcagcttccagcagacctccagcactgtctgaggagaggccaggtcacagctagcactcaaggccatggggcacacctacccctccctccccctaccctcactcacatagatgagggacagtggcccagagtggctgctcagatggaggccaaacacatacttgagctgtgagacgaagacctgcacagctgcagctgtggtatagcctcggacaagaggttctgacaggtaggtgaccacgaagccgaagtggatcaggcccagccccacctgtggggcggccaggggcagtcaggagaggcaggggtcctggggttgctaatgaggagcgcagggcaagtgggatgggagggggatgagtagacggcaagaggaggacgacgatggtcagacactcaggggagtacagacaggacagtggcgggagcagaagtggtggtggggggcacatactcctgactgttccacacctggaagaggccaaccaggacactgagtgtggaggccacctgtacccgggcagcatctctggctgtctcattgatcatggagtcgttcaaggcctgcggggccagggattctgtcacactgcccaccatcacagacatgacagcaaaggtccctgtaaggacggcacggggcaggtctgaagaggagaggacactgccctgccctggagccctggtcttaagagagaggccaggagacttccagttctggataaatgtactcagattatggctgcatgaacagggacagtgctggcggttcaggtttggccaggccaggagtaaaccctgagctcacaggcccttaagcatggctagaaatgctggccctgtctcatctaccctgtcccacctgtgtctactggtcccgggacacagaggctctctgtggagtagggaaggggtcagggctggccttaggctgctcaggcctctgccaagttccaggccccttgggctgcctcacccactctcatcttcctggagccagggctttgaggtcacctgcctctgtggtcctacagtcaggggtctagtcctgcctggggatgactcgtgggctagcccagggatgcagcaccaatgctgccctcttccccagccgctcctgccctgctcagtgccccctcaccctgccctccatgatggatgtgggcatcctcctggaaggctaggcctgcctccacttacccacggagatgtgccgggaagtgccaaacaggaagtagatgaagacagggtagaaggagctatagaggccaaacacggggggcaatccagccaggagggcgtaggccaagcctaggggtagaatggtagcagtgcaggcctggagagcagatcttgaaacgataagggaatcccagccctgggttaggtgccatagttccaaggtagaggtcatggccccagttttgggcatcacagaccacagggtttccaggccgacgcactgaaggtggctcaccctgcggaagctgcatgatggccacactcaggccggataacaggtcacccaggagccagtcacgcacaggataccggggtaaccagaccaaaaccgggaggtgttggagcagaagggcataggcccgagcacgggagcacctagggacatgatatgaggggtaggtgtcaggaacaggggctacctgggccccgccagcgcccccaggccccaatcttggccttactgcaaccaggtccgccactggtgggtcctaggtgctgagccccagcgccccagctcctccaaatgctcctggttcagcagcggccgttccatgtggtagtctcgcctccgcaggtccattgcttgtgttgcagacagcagtgcctgtgtgtccctcggtctggggtggcaagaccagagagacacagtgaaggcatccctggcccaacctcccctacacctccacctaggaccagagagttacctacctgatttttccaggccctaagatcaaggtacagtattccagcccccagctggcatctgtgggccacatgtccaaactcagacaggggcagtacctgaactttggctggtgagaaagcctctttctaggacaaagtcccccaagtagggactgcaggatgagcactagctatacctccagccgagatgtggcagcccagtgctgagtgttctaccagtccaggtcccaggctgctccctcccccacccagtccctctccagtccccaggtcctcctccagctgccccgggagcccactgctggctgagagcacactcagggaaggggtccagcaaaccaggggtccagctcctcaagcaactcctttcccaagcctcaggcctcagatgagaccctcccctctaagggaaggaaagtgttggagccaagcttgcccctgggcctccagccccagggtccaggttgtagacggctcaggcctgttatggggaagccaaggactggctctcacctgagaaggagcttgctcttggagtggcaatctctcacctagagggagaggctcccacatggaaagggaagtacccacttgaagtgggggaaagagctcacctgggaatagaagctttcaaggggaatctcacctagagggatctctgacctaccagggaatctttatcagcctggcaagttctgatacagggggaatcttccctctgcccagaggcacctacttgaagtcagagaaagatctcacatgggaagaaaagacctagagggagagggttctcacctggggggtactctcccatagagaaagctctgacctcgggcgaggctcccacgtggaatggggaaaagctgtcacctgggaatagatctcacagaaggatcttacctgggggaaaactctagcctgttggggaagctttcaccagtcaggaaagttctgatctaggaaaagccctgacctggggagaggatcccatttgagggacaggaactcacctgggaagcgcctctaacctggctgtactgttggaggagtgtggagtgggtgcaaggaagatcctcagagactcttgggaccgctatctcaaggagatcgtagagccccctctcctttcctacgtgagtcactcaggtcttcttaaagggctccctcccccgacaacttgggacccgcgtttggagggcggagccttgatcattggcccctccctgtaggaaggcaactggggccagaaaggccggagcgctcactccgggatcagtggagctgggtggactcgggactcagctgaaagcagctagtccacgggccgctgccagggactcccgtgccccacgcacccccgccggcacatctcctggccgggctcctccgcacgcagctgcctccctgtggcccgggatggccctcgggcgtcacaccagcggctttccgcacagcccaagggactggggtcgcgccggctcccgcccccaccccttgctgcagaggggcagccgcctgcagaaaatcagcagaggtaaaccgaggcgtcgcaagcggagaatgcctgctccagcgaggcgtcgcaagcggagaatgcctgctccagcgaggcgctcgcgcggggccaccgggaatgtgcgctgaactcaccccgacgcatccgccagccccatggctcgcaagttgtccggtgcgggctgctcctgctgctcgagctagaggccgctacgctccggaaggcggcgccgggaccgggtgaggccagctgcgctctcccgggggctaatcccggggcaggacggggaggcttgggccaatcagcgcgctggggcggggcctaagtggcgcgcgccgggcggggagagactggagaaggaggatttaaccgcttcctccccggcgacctggcctatgaggcctctcgctgctcgcccggccctctgcccggagctggatgggactgcagaactggaactaag

SEQ ID NO: 1881256 - DNA, 4001 bp, Homo sapiens
agtgagagcagagatggcaaaggggattgggagccccagggaggtggggcctccagactcatggtgggaacagggccacacagggctactgcccacagaacgtcccttgacctggtcctcctcccctggggactctgggcctgctggcctcctctctggcctgtcctccacaggccctggcagctgccctcaggcattgatggccttccagcgctcgctgtctgtgctgttgatgctgccagtgtggcagggcatggaagcgatgtcatccaggtaggccaccccgccggcagagtcgaactgcgtgctcgagtagctggcagctgaggccccagcagcccctgcagcctccaggccctcccgccgggccacagcgtagggctggggtaggtgtacatctggctcctctgtctcgtccacttggcatttgtaggagaagaggatcttgggctccgagctgataaaaggaaaagaggggcatggaagcctcactgagtgattcaggaagagccttcctctccaggctgatggggccaccagataaggaaggaattgaccaacagtcgcctgacacccactctgagtgggcctgtgagctggaccccagagcccatctagacttgttttggaacccagccctcctccccctggctgtgtgagctcaggcggggggcatctgtgcctgcttcctcatggtgaaatgggtgtgtggacaccgtgtggaggaagaatggacataaatcatgaggcttcaacagtgcctgcccaagcactcaggagacattggctgtggcctccgcccccactcctgtgacccctgctgctcatgttaccacccactccactctgacctcgtccctcggccctcagggcaactctccaagggggacacactacacccaatttacaaaaaggagcctgaggctcaggggagaaattgtgtgcaaagatccaagctggggccatggaccagtctggccctctcccagcttcacccaggtgggaggctgatcccctccccacaagacctggcaggtgagaaaggggggacaaaacacccacattccgaccacattaaggtctggagtgggacccccaatcccatgtcttcagcatcccatctcacagacgcttctgcagatgcacatgtgcacagcagtgtactcacccccagagaatccaactgacttcccaccccaaacctgctccccacttaagtcttcccccaacagggtacaagctttgtgaggacaggatttgcatccgctgtgggcctcgcatcttctggctctagcagtgtctggcacacagtaggtgctcaatgaatgcttgcgaatgaatgagttaatatattattaaataaaaaccagcaatgtagaacaccgtgcatagtcactctctctctcgtggggagagtatgtctgtgtgtactgtacatacaatgtgcatatatatgtatgtatatgtggatatgtgcatatatctacatgtatgtatatgttgagcacgtgttcatgtgtgtatgcatgcatgtgggtgtgcacgtgcatgtttgtgtgcatatgcccgtgtgtatccgtatgtgcgtgtttgtgtgtgcatgtgcatgtgtgcatgcttgtgcatccgtgtgtgcatgtgcacgtgtccatgcacatgtgggtgggtgtgcgtatatctgtgtgcatgtgcatgtgtatctgtatgtgtgtgcccaagtgcatgtatgtatgtgcgtgcgcatgcgcactgtatgcatacacagcctctcagcttcaatcctcacacccatgctggaagaaggcgcagttccgccggcagccacgcgggggcgccggcggccacagactcacccgaagaagccccggaggaaagccacgtagatgagcggagcgaagaagctgaagtacaggaaggttgtggcatctacacagctgcggagaaggcgggtcagcgcggggcctcctagccccatgctgactccacacctccccatgcccccagcgggtggacaccctgccgcccacttcccatgcccccacgaggcagacaccctgcggcccccacgcaccagagcccctcgatgatgtcgaagcacagcagcacactccccagcccctgcagtaggttgagcagtgccaggatgcccgcatacacgtagaagctcctccgagctgggggccggacagggtgggtcgtgaggtcccaccctggacaggccaggctctgcctccagcacctactaccctcaagcctggtgtgtcccccggggcccctctaggcctccctctcacccagggctctccagctcccagcctggaactctacagctccagctcccagctaccagctctacagtggcccggtagactccctcccatccccgcctgtcccagagccgccggccagctgctcacaaggcagggagatgcgctccttcagcggggtcttgggaaggatgaccaccagagagtagacctacagagacaggcagggctgagaaggtgctgggggcgccagcccagacccacagccagaaacccaggaatccaatccctacctggccctaaggccccagccaccccagctgccccagcctgaacctcaccaggaagaagaagcaggagctgaccagccagaactggcggcccccatggccatagatattaaagtcctcagctgagagatgggcatcagggtacaggatctccagggtcccctgcaggggcaagcaggaagggaggaagggagaggatctcaaggcttctctctcccaggggctttccctgatgcaaagccccctaagctctccaccacaccaagttcagcctcttggcctgaccctcaactcacctgccccagtctgctccctggccatgtcctgcccaactgattgcagcatccagagccggcccagtcttgggctgagtcacatggggaagggggcagagatggacaaggtgcagtccctgcccccaatctaagaaaggggcctctagatgcatgcttctcaggggggtctgcggacctgcaccatccctacctgaactccttattaaaacggcaagtcctgagcctcccatcctggcgccctggcccactggatccaaatctccaggggaccccagaatgtgcctcggtaacaagcaccccatgtgatttctcaggtgcaaagttttgagaactctgaaggtgataaagactggaaacctgacccagacccagaagcagtgggtgcctggtgccctgactcctagcgtcccctgcccacactcaccctcttacctgggtgacagagtaggccagggacagcactgtggtgatggccagcacccgcttgatgctggacttactctccaggtggcctggaagaaacatgctggtcagcaggcaggagccagcccaggtgaccactccagagtcagcccacagccagggaggggcaggggagagcatcgccagggcccaagagcccagcggtacacacaccaaaggccaggcccaggatgatcacactcagctcgatggccagcaggaagaagcgggtgatctcccacaggatctgcacgcagagtgggcacagcgtcagcctggaccagcatccccagcccaccccaggccaggcctccctggcctccctcagagggcccagccgcaccttatcagcaacagttgcagcgttcgaggtgctcaccgtcatggataccacggcccgggcaatgcccaccagcgccaccacaaacacctggtgggcaagggagtggtgtggcagtcagggaacaagagcctctgcatcggcaggggcagcaagcccacccccatatctacaggagcctttgattcctgaggtcggaaaggaggaaggcgcaaagtcagggtgggacacagggaggtggggatcactccaggaagcaaggctcacagagttgcagaccctcaactgcaggtgacttccagcctggccctccctctcggggccccagcttcctggctagcaccaa

SEQ ID NO: 1881257 - DNA, 4001 bp, Homo sapiens
aggagctcacttggtcttagagcagctcctgcctcggggtcatttccagctcaaggaaggtccatccatcctcaactgtgactctaggatgacacaatggcgaatgtcagttgtattccactgtgactgtccctctagtcaggaggagttctaacagtccccatccacaggctgagcataatggtctgcactcagatggccctgagccactgccccaaagtcagacctcagaaggatcctgtacttagttccaccgagctaagataggagaatttagaagggctattccagtgcatgaaaggactgcccagcacagcaaacaggtcaaatttatccagaaagcatttgacaagaggaatcaaaatgtcttaaaatcatgcttaccctttgacccaactattctccttctaggaatctatcctaaagaaataatctaaaatgcagataaaaatttgtatctaaagggatatttaatgcagcaatataaatagtgaaaatatggaaacccaaatgcccaacattaaaggagtgaaaagtcaatcaagttttgacatagtatataacagtattttaaatccactaaaaaaattgtgtttatgaagtatttgtaatgatactggaaaatacactatggttttaaaatagcaaggtctacactgtaagaatgatttcaattataccacttccccccaaaaataactctaaggattatgagtaatgttttcctgttgttcatactttgttttgaattttgtttttgtatttcccaagttttctttttacacatgaacatgtatttccataagtttaaaaagttattttaggccgggcgcggtggctcacgcctgtaatcccaacactttgggaggccaaggtaggtggatcacctgaggtgaggagatcgcgaccagcctagccaacatggtgaaaccctatctctaccaaaaatacaaaaaatttggcaggcatggtggtgggcgcctgtaatcccagctacttgggaggctgaggcaagagaatcgcttggaccagggagacagaggttgcagtgagccgagatcgcgccactgcactccagcctgggtaacaaaagagaaacttcatctcaaaaaataaaaataaaaaaataaaattttaaagagctaaaaagccaaaaacagctccagtctcactgtcagttcctgaagggagttgctttgcagcctcagcacaaaactgagcttcctgacaccaggatcttaccacatactcatcctcatagccttcgtcatcagtctccccagtggtgggatcacagtccttgacagtgaacttcatcatgcagctgaatgtgcaggccactgtggggaagagaggctgggtagttaggatgtccccagcctgcaggggatgggctcctcctgcaggggacaagcaggcaggggtcacagcctgctttctaggcccctgctatgttattagtagcagcaacaagccatccaatcccacaaagctggacagagggtgccaccttgtaggacaggaaagtcatgagttctagtgagatcctgtctctttaaaaaaaaaaatttttaaagaagagcacttgggactcagctattcttcttcttgggactgaaatcaaggagctgaagctctaatagaaggcaaacagctggtgcccagccgcccacctcctcctgaccccatgagctcccaggaggatagggtggtatctggagaggggctcaccagctgtggggtcttctttgggcagtgccaccagtgtgtagcaggtcccgggctggttgtagggcaggctccgggcaggcacgtaacagagcacctcataggcctcagtgggctccatctgcactgtgacattctccaaggtctggtcattgagtgtgtttgtgcagtcaaactgaacaggaaagagaggggagcttaaacattgcactaggtccgagccatgctgcagaggaaaagccaggaggtcccacctctttcctattgaccaaggtgattcccatcccagtccccctgccccaggttccctgtcttcatgctgacaatcgggagccatggatgtcccgagtcaagagatatgagagaccgacctgttggggacagattctgtcatcaagttgggctcccaaccaatgcagtgtggggacccatgaccctacaggacctgccagacctgggacaactccctgggcgcatgccccagcagggcctcagcccaccttgctcacctgaaaaaccatgtggttggtgaaggtgtgtttggtgcagcggatgacatactccgtctctgactcggtgagggccacgggctcaggcgaggacttgaagaggggcccaagaccgcggaactctggcactgctgccaactgctctgaaatccacaggccacattcactcagcttctcgatccccagaccaacttgttgatggtttctaataaattcccatgaccattctcaaggtgttccaccctaccttagatggatagatatgtttacccaactggctactcattatttcctgaatatatccatgcattttctcatctccctgacttcgctcatgtggcacaaccccccacaaatactctccccatctctgtaccatgaaagacctcagaagcaaaaaactgatatgagaccacaaaatcctagacctaattggagaatcccccagctatagaagcttagcaaggatttccgccccctaccgcagcaaggattcttaaaagaaggtgacaattaggaaaataagatcgatactgctatagctacaaaatcagacaaaataacaaactggtcctatatatttatcagttaagacaaatggccaataaagagatatttcagaatgagagtgttgcagaaaacctaacttagaattgtttgtgtctggtaagacctatccctacaccctatgcccaggttcaagcactggattcaagcacaggcccatgggaccccaccctggctggtcctggcattccttgcaaactaaagggaataacccaagtgaatgaggcatctggcagatgtgtgcacatggtgtccacctataatggctacagctgccactcttgtacctattctatggcaggattcctcgcactatgaccatggatcaactgtatcagaattactaggggttggcggcagagcttgctaaaaactcagactccatcccaaatctactacatcagaatctctggtttcaggatcaaggaatttgcatttctaacatgtttcctcagattattccaatatatactgatatttaaagaccactgctctaagattttcaacttgtcttcccaattaattgaactccatgagaacagggattgtgctttgaggccatggatctgatatttttccctttacttagaaggtactcaattcacgtttcagacatagagaaaggtaggccttatttttattattttgcttttttcctccacaaaaagtcagcctatgtgaccacttcagccctctgcagcctgaagactgaatctaatgaatatgcaggcaataaaaagcccagaacaatccaggctagatattaggaggaacttttgggccaccatgaccatcaaccactagagtgcttttctattgatatttattttcttgggactcagagttttgggcctgatacttactccctgggggattctgttggtagggtttcagactcttcatcaataaaactgatatcattatcttgatcacagcgttgttgtaaagacaaatgaggcaataaattcaagatctaggaaagttcttggaactgaacatgtatgtgattagtaaatgtgaggcttttggatgattgtttaaaaatggaattgttaccctttaagcggcttaggagacttccttggaaggtgtggcagaataatgactccaagatgcccacatgctaattcccagaacctgcagctatgttaccttgcatggtaaaagggactttgtagatgtgattaaattaaggat

SEQ ID NO: 1881258 - DNA, 4001 bp, Homo sapiens
ctcctgtgtcttgcttgccaggcggcgatttgcagattccaatctctctgtttcaagggaaggaaagatgttttagtgtcaggtgaagctgccagcttgggatttttcctgacgtcctatcaggatggggctgtatcctccatattggggatgggttcataaggaaaccccagctcagctcagggccccatgggtgggagcctcctctgtcaagagccatcatccctgaggggatcctaggcccagtacatagagacaagcatctctctatcagggcagctccaaaggggtctcagcctggctctctgagttcatctgcacttttgacagagaatagagattcccaatttttctctagaacaaaagaagtaagtcctctgcagaggttctccaacctccacctgtgtgactggctctcacctctaagatcccggttgaagtcttgcagcctcctcatttcactgtccatcttgttccgcatggtcttctccagggcctcacgcttggaggaggctctggtcaggctctcatgggcctcagagagccgctggatttcgctttccagctgcaagagtcagacagcagagctgaatgaaggcgagagctcccagggagtgattcgaggctgacccactactctccatcagaaaaggtgacagatgagaggccaccaaacaggagcaaaacctccaggtgactatggtgggatggtcagaagcttgtagcctccggaagtagaatagactgctgggaccagcaagcaacggtcccatcggctgccccaaggaccagatgctgagtgaacccagggccaggtactttggaagtagctgcctgcggggtgactaaacacagcttccctgtgcccagtgtccagaaggaaacattctactcttggctggcttccaccaagaaactgagtacagttggccagaagtgggcaccgaaagactccagccatgatggggtggtttgacctaacttggacaccacaggacagtcaagggaggcctgaggccatctgctaaaactgagcctcagcggaaaactggtaacccttcactaaagaagcgggcaccaggcagagctgcctctgcctggtgtcccaggcatcaccatccacccagagggccagctgggccccggctgctcctcccacttggctgctggcaggttccgcacgtgctcttagctggcctgtgattccaacaagtcgcccattttttttccaagaggagaagttttctttttggccagggctggcctggaacagacttgctgttgtgtgggggacacaaagggctctctgtgggaggtgtccatgggagggggtgtgtgcagggcaagggtgcgagtgtgcaaggagctggtgaatgggctctttctaatcaccactggccagcaactgttcatgctccaggcctgctctgccggcctctcggctgttccccagctgtctggagtcagctcaggagggtgcatgaggagtgagggaggtggaagacagagggatagggagaaatccagccaaacagttttcaggctcctctgcctctccttggactacccactccccaggtagcccctcggggtctctttctggtctgcccttctgaagccccagcagggcctaccttctcaatgcggccagccttctccgcagagctctccagctccctctgcagccgctcattgtctctctgcagcctggcattctccctcagcacggcctccatctgggccaggtgggcactgcccgaggtggctgaggaggcctgggcactcactggcccctccacagcaggtggactgagggagctcagggggccatggccgagagcagctggatgtgggggaggggggtgctcctgagattgctgcaggtactggtactgctgctgctgttggaggaacacaggaggcacctgggcctgcaggatcctggggaacagaagagacggtgctcagagacagcacagaccctcatggctcccaccagagcagcccggggtcaccccactcctaggcatactgggaagatggttaattattatcaataattaatatattattaaaattactgcagataattattcaaccctctagtgttaggcagggaccagtagggaaggccttttccaaatgtttctgcctgaggctctcaagagtcagacagcagggctagaggggattaatgtcaggatgcttgtttcatacccgcctcacagtggctggggccttggggatcagcctgagcaatcctgggcctcctaagcaactaatgcttaaatacatcatcttaaaaaatgcaccctgacacttctaatcaatggaaggttatttttggggctggaggccatgtcaatcatgactgagcatataaccttccaggccccaggacaactttggtggctgggccccagcagcaaccttgtgtctattacacgagtcgccagtttcaagactgccaaagcagcactcattttctccttcctatttcaagtcctgccaccccccaccccccactcacccagagtcatttttagaagactccagttaaggttagagcaatgagacaaatgtcagggtaagagtctgagctctagagtctgacaaataggggttcaaatccctgctccagctgtttaaccttgggcgagtgcctcagccccacagactgggcattgctctgttgcatcatgagggtctccagcctcgctgggatttgttgaggatgacgctatgtaaggcctggcagagtgctgggccagtgctgggcgggtggcaggtgctcctataatggtggcccatcctccatctcttctagtaggagcctcagtttaccctcagtttagagaacaaatgtggcccaaactcttggtttccttgggagtaagggctgcctctggactactgtggtcactgagttcaggggacaatattctattggcctctggcactggtgtaacatcacccccagggctccatgttgagggaaggagcaaagggcaagaggcacggggagtccaagggccttcctgggaccttgtgattcccagtgtcacaactgcctcagtttcacaaagaatcttccaagtcccagaagccccgcaaaaaccgaattccccttctgggtgcatcatctcagcactaatgcacacccagcctgcccctgactcttgctgccatgcagcctatggcccccctgctcttctcaggaccctaggctaggagtctagcccgtttcctaacaaataatcttcactggatcatctgaaaggagatattgggcagatgtatttctcctactacctaaggtggggcttccagtaagagctgggaagagggtccccactggagtgctcaaactctccattccactgctaaaatggccattctcaaggttgcttcaagaacttgctcccccctgcactgggccaggcagacacaactggcattctttggggatgacttagctctgagaaagaatagcaactcctttcccttcacacttgctttcctttctcctcgtcctctccctcccctgctttttgttctcctgcaaacagtctacttccttgccgtgattactatcttttcctgacagggttcaataaggctggtccaaaagaagaaaccaccactcagcttccgaaactcttcctgaccgagccctgagaggggcgataaagtgcgagtctggaggggtggaggctggagaaaaactatgaggctccaacctctggttccgccataccaaccccatcatgtcactcatttctcgagagcaaggaaagccggacggtgggaaagtgggtgtttactaaaggaacacagcaggcatgaagagaaccagactttgaccttgggccaccagaggaagagtctgaaatccttggggtcccttggtggggtttcttggactcccatagggggagatgcagcagtgatggctgtgtctgcttctctggaaaagatgctgggcaagatgagaagcgtga

SEQ ID NO: 1881259 - DNA, 4001 bp, Homo sapiens
agagggagcccctgtgagtcagataaagcaccggatgctgatatgtgttccgtgtgacgctggcacacaaattctttgtggctggaaccaaaatttccacattcagatttttctctggaaattagtggccttttcactcctgttaacacacacacacgcgcgcacacacacacacacacacacacacccttgtggcttcacaagaacctgcaaacctccgtccctttgcaatcctggaaaatggtgccccacctctcatgtcccctcaccttactggtgtcattatgagtgtgaggcctccagatgggaggtacccaccaagtggcatcaacccacacagaaccctgaccccttatccttacccctcaaattcatcatctgatatgccaatctgggggtatgaattccttgtttcagaagaaggtgattttatatctaacccattaccagactaatttgttgtcactgatatgcgcactttgcaacaagagttgttcttaaaattcatattgtctattaggatttagaatgtgctaatgaaactagcatctgagggaaaaaaacggagagaaattaaatcactgacgagaagagagctagaaggaccctccataggttgttaaatgaagccctttatgtgcaggtataatcagcaaaaccaaatgagcacatgccatttcctgtccctggactgtccctcccctcaattcatgaccagcccacctcctcttcaagtctcagagcttactgctgggttcttccactctggaaactcatccagtctgggttaggtgccttcctatgtgtatgcacagactatataccttttctacatgagcacataccatattctattgaggtttccaagtacactcaaagcaaagacggcctattttccccagtgtccccagtacctaccatggtgtctggcccacatgctcaaggaaggcttactgagttaaaggacggagccatcacctggtggtctaaccaccctcaactcctgacttttctcttgccctcttctttacttttttctttctttcttttttctttttctttttctttttttttttttttggagttgcactctgtcacccaggatggaacgcagtagcgtgatctcagctcaccgcaacctctgcctcctgggttcaaatcattctcctgccttagcaacccccgccccgagtagctgggattacaggcatgcaccaccatacctggctaatttttgtatttttagtagagatggggtttcaccatgttggccaggctggtcttgaacttccaacctcaggtgatccgcccacctcggcctccttctttattaactgagctgctcagtcttgcctgcacataagcatcacctgggaagctttcaaaaaatatctttgcctggcctgatgcccagaaaattctgattcaattgatctgctgtgggacctgggcataggtgttcaaaaaggattccactgtgaagactgagaaggcttccatctttcaggtctttcccttaggtatttcctaccttcaaaatcctctttctctttttaaacttatcttcatggtcagtgactcccagagacattacttagccctctgtgtaaactgcccataaaatacaaagggatacagattgtgggagtccatcccccactggcttcacttggcttcctttcacatttctcttgaacttgagaaggcagcaaccacaagatctgagattcatcaggctccctcataggtagggtaccactgagaaagctgtcttacccagcagaatgagcaaaacaccagccagctgggcccgcctgtacttagccacaccgggctcctggcccatccggatgcagggaagaacagtcagcagcagtaaaatggccggcagacccaggaccgaggcagcaatcatcagggcgcggcaggcctgcacgtagcctgggaacaagagagcagatgggaaaggttagaccacagggttctcttgcttcctgagccctgccttaggggaattcagcaccatctcccttcctccttcttggtggattccaggacttagaaggtgctaatgttgtccaaggtcactaagcactttttaacttttaaaacaactcagcaagaaaaaagggggctggagaaactaaatggggacccctggtttaggccacttggccaagcttccaggatggaggggccaagagtccatttacattattacatccccctgagaaagttcagatgaaaactgaaatctcccaagaatcattctgtgagggcctctattggttccagtctgctattgatagctctacctgtgtgaccttgggcaagttacttaaccatgatgtcttattttccacatctataaagtaacaacaggccaggcatggtggctcacacctctaatcccagcactttgggaggccaaggcaggtggatcttctgaggtcaggagttcaagatcagcctggccaacagggcgaaaccccatctctactaaaaatacaaaaattagcctggtgtggtggtgtgagcctgtagtcccagctacttggggaggctgaggcagcagaatcgcttgaacctgagagggggaggttgcagtgagctgagatcgagccactgcactccagcccaggtgacagagcgagactctttctcaaaataaataaataaataaacaaacaaagtattgataataatataatagtacctacatctctgtaatagaattctactgaagattacattagttaatttatttagtgcttaaaacagtgcctataccaaatcctcaaaaaaggttagttgttatcattggtgttctttgtctgtctcagtgcagcgctttcatcttcaggtgtcctaggtgattttctcctaaccatgtgctttcattcacattggctgtggccctaacccagactaaactaagactcaggcttcctctctttgctgtctccccagaggctgctgtcctcatggatcctgcccctaaattgttggaccccatctcctgcctcacccacagtgccctgggcatccttccccaactgtccatcattgcttaaaaggcatctctccagccctcagggttcctggagggcagacacctgccttggtattcacggagttaacacagtgcccacaacagatcatggaaacaattgcgaatcaaggaataagagaactgaaaaatagaagagtagagcaaaactacatgaactttatcctgtcaagtaaaatgccaagtaaaaactgtattaagaaacagattacaatatgtgtcacatttatttagaataaatctgacaagatactgggagaatttcacagacaaatttgtttcactttcaaatgtaatgtttctcattaaaactctccctcctcttaaaaaaggtggggggggtcacatttattaccctcccttttttgctcagaaggaactagtactagtggcctgggtgaggcagagttcatagcaaagccaggaatctagccgacatctgcctcacacaccacgaccctcacgtgcaaaaaggcctaacttcaacgctgtctcttagcaaggaacgttttgccagaattcggacttcacaagggccctcttccagcactgcccatctcagctccttcagaattaaagataatcagtcaagtgtctactgacttgaagatctccagaaaggagctccaggaagtctgaggcccatcccctgacccagccgtccgcctctgcggcttgtagagagccagtactcacacaaagcaggcagtcaactggcaatgcaggttctgaaatccatggcactggctgtccacatgctacagtgccaaggccatgtccggacaccaaaagatagggacagaggactgttcctgcctccacccaaagtatgagggagggggaaggcaggaaggactagcgccgccccccaccccccccccacccccagagtatgcactcccctctggaggacagcctttgttctctgaaa

SEQ ID NO: 1881260 - DNA, 4001 bp, Homo sapiens
ctatccctgtaacacccccccagcaatgccccttgaagaggacacagcatatatccctgtatcacctaactcagcagtgaccctcggagaggacacagcatctatccctgtaacacccccccccccagcaatgccccttggagaggacacagcatctaaccctgtaacacccgccccccagcaatgcccctcggagaggacacagcatctatccctgtaacacccccccagcaatgccccttgaagaggacacagcatatatccctgtatcacctaactcagcaatgaccctcggagaggacacagcatctatccctgtaacacccccccagcaatgccccttggagaggacacagcatctatccctgtaacaccccccccagcaatgccccttggagaggacacagcatctatccctgtaacaccccccccagcaatgccccttggagaggacacagcatctaaccctgtaacacccgccccccagcaatgccccttggagaggacacagcatctatccctgtaacacccccccagcaatgccccttggagaggacacagcgtctatccctgtaacacccgcccccagcgatgccccttggagaggacacagtgtctatccctctaacaccacccgccagcaatgccccttgaagaggacacaggatctgtccctctaacacccccccagcagtgccccttggagaggacacagcatctatccctgtaacacccccccagcagtgccccttggagaggacacagcatctatccctgtaacacccccccagcaatgccccttggagaggacacagcgtctatccctgtaacacccgcccccagcgatgccccttggagaggacacagtgtctatccctctaacaccacccgccagcaatgccccttgaagaggacacaggatctgtccctctaacacccccccagcagtgccccttggagaggacacagcatctatccctgtaacacccccccagcagtgccccttggagaggacacagcatctatccctgtaacacccgcccccagcgatgccccttggagaggacacaggatctgtccctctaacaccccccccagcaacgccccttggagaggacacggcatctatccctgtaacaccccccccagcaatgccccttgaagaggacacagcatctatccctgtaacacccccccagcgatgccccttgaagaggacacagcatctatccttgtaacaccccccccccagcaacgccctttggagaggacacagcatttatccctataacacccccccgccagcaatgccccttggagaggacacaggatctatccctgaaacacgacccccaacaatgccccttggagaggacacagcatctatccccgtatcaccccacccagcaaagccccttggagagtcccacagcatgtatccctgtgatttccagcacccagaccctggcacgtgggccctcaagaattcctagatggatggtgagcgaatgggtgcaaaggagggcaccccaggcttagaacagacaagggcaggcccaagcaaaaccaggggctgtggtgggtccagaaagccccagaagctttgaggcctgggtctgcagggactctgtgagctggcagcacctgcccctcaccaggcgaagggcaccttgcgatgttcctgcatgacgtaatggtcgtcattctgaggtagtgctcgcatcagcccaaagtccccgatcttgaccaggtcgcgggtagccaacagcagattgcgggcagccaggtcacggtgaataaagcgcttggactccaggtagcccatgccctcagccacctgcacagcgtagcggctcagagtccccaggaggaagtggccctggtgcttacgtagccggtccaacaacgatcccagaggtgccagctctgtcacctgaggccacggaggaggcaggaggaatgagctggaggaccctgccccttctcagcagcccacgctgggcccccagtccccttcctgaaggctttccagagccaggctgcacgcaccttcctggcctgctgtctggggacctctaggagtcctgcagtttctcaggcctctccctcgaggcaatttgggaaactgatgcctagagagaaggagcccaaagaggcagtggctagaaattccaaaactcagctggacgtggtggctcacgcctgtaatcccagcactttgggaggccgaggtgggtggatcatttgaggtcaggagtttgagaccagcctggccaacatggtgaaaccccgtctctactaaaaatacaaaaattagccaggcatggtagcgcacggctgtaatcccagctacttggaagcctgaggcaggaatatcgcgtgaacccaggaggccgaggttgcagtgagcctagatcatgccattgcactccagcctgggcgacaaagtgagactccatctcaaaataaatagataaataaaacataaattccccaaattaaactcagtggccagcccctcccatgggagtaactctcttgacactgagcaccagcaaaatccagagacagacccggactggaccgcagcagacacagcccgtaccaggctgggcccctgtggacccctttactccatcaggttgggggaccaaagtaggatctagggcgcctctgaccttaggatggagagaggaaccgaaccacacatatgggaccggagccctctccctgcccgccccctcccgcccgcagtactcaccatcttcatgggcggcgtgagcaccaccccgtagaggcggatgaggtttcggtggtcgagcgagtgcatggcattgacctcccggatgaagtcgtccatggcttctggctggctcaggacatcgggcttcaggcacttcacagccacactcacctgcccagagcgggatttgcaaggactcaggacttgccaggtcccagacacgcggagccaacctgctccaccctccaactcggctcaacgatccctgcctgtgagctcctcatctgggtgggtaagcatgtcaccagtgcctgggcttacgtgctctgcgtgaggcctggctggagaagggcagacggctggccctcaggagccatcgtcggccacacctccccttcctgggggaatgccgggcttaaataccaaccaaaaagtaagagataaccagtatgatgagagaatattcaaatgttataaaatggaatttttttttttgagacagtctcgctcttgtcgcccaggctggaatgcagtgacgtgatctcagctcactgcaacctctgcctcccgggttcaagtgattctcctgcctcagcctcctgagtagctgggattacaggcaggtgccaccacgcctggctaattttgtatttttagtagagatggggtttctccatattgctcaggctggtcataaaatggaatattaaaaggtgttttgctgtagaaggaaaatgctgtaaatgtaatgccaaaaacaaagctgtggagctggaagtctgcacagcggcttccccgggagaaggatgcactgagtgacagcggcttccccgggagaaggacgcactgagtggacggagaatgaggagccctctgaggtgctgggaatgcaccgcacgtgatctgagcagtaaggacacggctgctgcacaggaaacagtcacaccagaactgtatgctgtggtgacacgttatccctgaggggaaaatgttaaatgcaacgccgagaagaaagaacaagattttaaaagctgtatccagaatttgtatcttaactaaatccaacaaaatacctaaagtgggaggaagaggctcggcttcctctgagtggtgggattacaggcgattttttttttcttgtttttcaaatactttccaaacttttataataaattatttttatagttgaaataataaatgtgcttagttaaacctgagcatgggctggacgtggtggctcacacctgtaatccaagca

SEQ ID NO: 1881261 - DNA, 4001 bp, Homo sapiens
gatcccttcttccactcgacagatgggaacactgaggtcttacgcctcaggtcacacagtctaacaaagccagagcctgtactcaaacccgggactgcaaactaccaaaaggggccagaggcttgggacgcgccaggcacaagctcagtccatcccaccccgacccccatcctggtcactcaccctcttggaagaaatttgcatgctggtgacagcggccgagtcctgagagggaggaggggcgacggggtcagggcttagtggggtgggggggtcccgggcgactgggggtgaggcctcacctcaaacacgtgcagctcctccaggagcagcccctctgcgctgggcctactgcccttggggaccgagatcaccttcagcaccgtgccaacgtctgcagggatgagaaggggtaatgaccattggtgctcccggacagctggggctagtgtctcctcgcctttgaggcgtctaccctcagcatgtttgggttgtgaagagtgtggactggaagagtgtgggttgggcagcatccacagggtggagacacagcccaggaaaggatgtggagatgggactgaacagggagagcttccatcagcagcccacagggcctggctgggagcctgggggtcgctgtggagggaccctgacctgtgccaatgaagaggacgtcatagtgtccgtcagcggctgcaacccggtccgcggcaatttgagtgaaggtgtaattggctccaacttgtaggaaaagagggcgccccccagtgggcaggacagagttgtacatgagggggtggttccgcgcaaactggatgacatcgtctgggaagtccttggtggaactgaaggtgccaaaggtcttgctggggcactgggggtgggggaaagggaggcacagcagggatatagatatgggggcttgataggcagccctccatgcccagcctctgggaacatggagggggatggggacagaaccctgccctgagaattagagaggagatcagccttgccctaggaagtcagaggcgggaaacaagccttgtcttatgatggaaacgttttcccacccataactaaaggaagaaaccacattcaccaagaagaccccaggccaagttctcaaacccttgaggctttgaagtgggttgtagcagaagtccctgggctacgaaccatgcctggccgcgggtaggggacgcgaccctggtatgacacccactggtgcatgggcccctccttgtgtgcaaagggtcccaagaaggcccggcgcacgtcgttcatgctgtacacgcacaccgcagagccctggaagatgctgctggaggcgaagaccagggcgaggtgaggggccgggtggagcccagcggcccgccccgggcgctccctacctcctgcccctcacctggacgtggagaagacggcatagagcagcggggtccggtggtcccgcgaggacaacagaaacacatcctctgcggggaaggggcctagctggggtagggcgcacagccccgctgcggcgggggctcccggagtctgcgccgctgcccccctccccaaccccatacccactcccgcactcacggagctgatcgaagtgggtgtcgccctcgacgccgggcaccgagcacaccagccgcgccttcaggaacgtcgtccacttgttgaccaggctgcgctggccgcccacgtcgttctgccgggacgatcaaaggggatgagggcgagaccagggcaggcaaaggggtaggggcagggtcgccgggtgtggcccagggactcctcacccggcagatctggccaacgcgggacacggacaggcgtcccagtgccggcgccgcctctaccgccgtctcacgaaagaagaagtagattttgtcgtcgtctgggttctcgctctccgggatccaaaataccttgacaaacttgggctctgaccgcggcaggaggcatgggtcagcgggtcctggccttgcctcctgatgcgagacccacgcgctgcttccccttcccgtagtgcgggcacagcacccgggatcacagtgtctgaccacccaacctctagcaccatgtccagttggcgctctgcgcggaccgaatccaaaggatcagggcctgcgaggcaagaagcagccgcgagggggcagcagagaccgtggctacctgggggcgcaggcgtgaagcccggctagcctccgatctcgccccacacgtcgcccagcaccttaggctggggtaggagggagatgaggtaatctggtttcaccttcactcatgaatcttcctctctagcataaccagatgctccccactcctgcttcaaatccttctgctgggtcccattgctctttattattattattattattattatttgtttatttatttattttttgagacagtctcgctctgtcgcccaggctggagtgctcgatctcggctcactgcaacctcagcctcccaagtagctgagattacagtcagagcctaccaccacacctggcttttttttttttttttgagacgaagtctcgctctattgcccaggctggaatgcagtggcacagtctccattcactgcaacctccgcctcctaggttcaagcgattctcctgcctcagcctcctgagtagctgggattacagatgcacaccatcatgccggactaatttttgtatatttagtagagacggggttacaccatgttggccaggctggtctcaaatgcctgaactcaggtgatccgcccgcctcagcctcccaaagtgctgggattacaggtgcacaccactgcacccggccaatttttgtattttttagtagagacagggtttcaccatgttggccaggctagtctcaaactcctggcctcaagcgatttgcctgcctccgcctcccaaagtgctgagattacaggtgtgagccactgtgcccaccagcccatagcccttatttaatttttatttgatttagagacagggtctgctctgtcctgcagtggcagcatcatggctcactgcagcctccaactcctgggctcaagtgatccttccatctcagcctcctgactagccaggactacaggtgtgtgcatgccactgcccccagctaattttattttattttttgtcttgctttgtagcccaggctggtatgaaactcctgtcttcaagcaatctgtctgcctcagcctcccaaagtgctgggattacaggtgcaagccattgtgcccagcccccatgactcttagaataaatgactctggcccctgacagtccaggcccccttttcattgctagctctgcaagtctattcctttgcttgttcttgcatccaggcctttgcactagttgctccctctgcctggaatgctccctctgcctggaatgctcatccctaaattttgctggctagctgtcttgtgcttgggaattagctcatactcccctcagcacagcggcttcctttacccaaccccctccagccacccagtctccttttcccttcctcccttgtctctctctggcctcaaggccattggacttgatcttatcatgtatgtgatctgtgaactcaaagaggtcacggtcatacctgtcttgtctgtctctgtgacgccagtgcctgattaaggagggtatttggtaagacctggccacacccactgctcacttactttatgggccttgcttggcacctgccctgtgggagggtgacgacctctacccaccaaccccaccagcctctcaccattgagccagcgggagtcgtgtggctctgttcggagacttggacgttgccctaggctgcgaaagatggtaaagtctcgtcccatgaggtctgctgccacccctgagtatagctcctcccctgcagacagagcaagggccactcaggcaaatggagggctcttggggcaggagggcctggggagctctgggagtgagtgaggttatgggggattccctggagctcttgggggtcttgggactttg

SEQ ID NO: 1881262 - DNA, 4001 bp, Homo sapiens
tatgcagagcacttggcacaatgaacggcagccactgtcactgctgcagatgagggcaggtgagtaaagtcaagcacctttccctgatggctgtctggatccacggagaaatatccaagacgctcaaactggaacttgtcgaagggttttgccagggccacagagcagtccactaatgctgcatccaccacgtgtagtgatgcctgcaggcagggaactcaggcaaccatccaaccagggaggcctacctccctcaccccaaacctcatgaacctaccaggttcaggtcacttaaaaatccaccaggcacctcagtaggatcttcagggttcttgtgctggaatctgcagccaaagtgaaggtcatacccccagctgggcagccatagcaggcaatgtgcatcttgtacctgcccccaccccagctctgttcactcacagtcgctcatagaggcgaacctcacacatcaaaggctgtgacacccagtgaataaaggcctttggcttctctccagcatctgcccgtctgcaggtcacctccagactctctacacaaccactggggccctggaagtggggggaggggagcagcaattagacccgggaaccacaaccaggactgcaggctatactcacatcttggccccagcaggcactgcagtaggaaggctgcagctggctctcaccttgacaacatgctgcagctcaatgacgtagcctgtatgcctcaggcccacaggctggccccaagccaggcgcttaaatcctggctctggctcctagagataggaagtggggtagacacatgaggctgcaagggtcaaacaagtggggaagcttccctacccccgtgtctggcaaagattggttcatctgaagcaggaagtagatggactgacagagatgaggagatgaaaggttcccagtaccagactcagcagcaaacgggaccctccacccccacaatttacctccttgaagtcagtcctctcaatgaagacaatgggtgcaaagggaacctgatggaagcctttggtctcatcagctgggaagttgggcacctggatgtccaaggactatagcaggagacaggagacaggtatgagtcatactcagcattaggacccccatgcccagagccaagtgtacccccagctacacacacacatgtgacacacatgttgaggcaggcccaccttggcagcaggaaagttggtgatgatgacccgtagtgactccagcacagccatggctcgtggggctgtgtcattcagcacatcacgcacacaggcttctagaagatgtggctccattgtggtttgtgccacagtcactcccacctggcaggaaagttcagcatcagtcacagctacaatcacaaactgccacactcaacccccaatgtatctacccaacctgctgggctatacccgggcacagaagttgttgatggcctcaggtgggaagccccgccgtcgcagggccgtgagtgtaaagagccgtgggtcatcccagtccctgtggataagaaggtggtgagaaggcctttgggagcatatgccattaacctttcataagccaaacagccgcacctaccgcacagcaccagttgctacaagctggaggatcttcctcttagagacaacagcatagtgcaggttgaggcggccatactcccactgcacagggcaatagacgtccagtgcattgcaaagccagaagtaggaagagcgtctggggtgggagagtagggttagcactggccagctctggaaccaggcagagaccacaggaagggctgctggaattccactggccctaccaccccatggacccagctccctcaccgggcctggaattccttggtgcagagtgagtgagtgatgtgctcgatggagtcacagaggcagtgtgtgtagtcgtaggtgggatagatgcacctgtggggcataggcagtgggccctaccatccagccctactctgccctaccccatggcccatcgccctgctcggcagccccaccaccccaccccattctacacccaccatttgtcccctgtgcggtggtgtggtgtatacttgactcgataggctacagggtccatcttgccatcctccatcaccagcttcatccgtagtgtggcctcgccctctgaaaacttgcccttgcgcattgcctgaggggaacaaggactcaggctgtctctaagcacaggagcatctcattctcagcaccttggcccacccaaacccagatgctcctctaggaccccacctcaaagagcagcagtgactcctccatgggacggtctctccagggtgaaggcagagtattatggcctttgagctcctctcctcgctggtggcacacataagccagacccctgtggggaagcggtgtgagtgcccagcatggctgtgacctagtcagtctgcctggctctacgtcatggccctggccttacctgcggatgagctccacagcccacgcatatagctggtcaaaatagtcagacgcatatgtgactttgtaaggtgtgtagcctggggcaaaatgaaacaaagtatgagcagccagccacaaacacccagtgggcaggccatggcccaaggagaggcccactaaccaccagcccttctaggctttgcctagtccatacctagccaggctaccatgtcacagatggccgtgaagaactttgcttcctccttctcagggttggtgtcatcaaaacgcagaaaacagatgccattgttggcctaggaaagttgcaccatctgtgaactcccacatcatccatcagccccacaatcctgtttatcaaactaggatattcacagagcactctcatgtcagaattttctttttttttgagatggagtcttgattatcttgcaccatcttggctcactgcagcctccacctcctgggtttctcctgcctcagcttcccagtagctgaaactacaagcgtgtgccaccatggccagctaacttttgtatttttagtagagatggggtttcaccatgttggccagattggtttcgaactcctgacctcaagtgatccacccactttagcctcccgaagtgttgagattacaggcgtgagccacccaacccggactcatgtcagaattaaaaatgtcttcaagagcttctctcaccttcctgtatctaacctagcatctttctaagcctagggactgcactggcaactcccccaaatttgaactcactgactcctcagagggagggagctatttattccaataagctcaatagattcctaggtatctgtcacacatgtggttcctttccatggcctctgcccacctgggtacattattgggagcagacagcaaggcagggatatggtatccactcatgggaacagcaagtggtcatcttgcttgccaggtccctagacacatgcttaccttggcatagccaaagttgaaattgatggctttggcatgtccaatatgcaggattccattgggttctggcgggaaccgggtacgtacctaaaataagggggatgggaaaagagaaataaagtctgagctcagatgaccttaaagaaacagatgttccctcccaggaaggccatggtgatgggtgagatggggcagtatggacgcagcccaggcactcaggcaggtgtttgatggcacaagctcacatggccacatccccacacacctgcccaccagtaatctccaggtgctgctttagtagattcatggtgtgtggagtgaccacatagcctggggtcttgtagttctcacctgccaggaccagaataagcctaaggaccaggctgcagccaaagcctctgaccccaggggcctgactataggagctgctgccaagatccagccctccccagggttttgacatgcccactaaccaggcttgtggaacttaagggcctccccccggagctgctccatcagagacagggtctggtcagcagtctcgcctgtggggaacaaaac

SEQ ID NO: 1881263 - DNA, 4001 bp, Homo sapiens
gtgggggactttaccttcctcccgtcttctccagggtccccaggttctccctgtgggcagaggactcacatcagcccaaacattcactggtgtctggctgcaagacactaccttgctagatttcagatgactgtgactgtatttctgtgcctgtagctccatggttgtgtgtgtcttggagcatggcctgtggccgtctgagtgagctgctacatgtctaagggtgtgcctgcataggcctgctcaccccaacaggcaactgcacacatgtcctttgactctggctctctagaggtagctccacatttatgcatctctgggttggtgatcgtccacatgtcctgggtgtgtgcatatccatgtgtgtcttagtacatgtacccatgggtctgtgtgtcctggtctgtttgcacatcttggcccatgtctgcatatgggcatgggcttatacatgtctccaaagagcatgggcttatacatgccttgagagccatgtgtcttggcatctgtctgcaactcttgtgtgtagctcaatgtgtatgaccataagcgtgtgggtgaccatataaagtcatgggccagcatgtcctagcacatgtcacaggtcagagccatccatgtgtgtctcaccatgtctcaacacaggtccacatgcggtcttgggtccatgtcttagcacatgagtctgggtggaagtgtctgggtatcaacatgtctctaagtgccccaaatgtggctacacaccagtgtgtttgtgcctgtcgacctgtctgtggctcttcacctgtgcctatggctgtgggttatctgggcatgtgtcagcccatcctggcataaattggcccattcacctaactccctatgtgtctgtgaggctgcctgtgtgtgcatatagaactatgtttccaggcctggcgcaatggctcacgcctgtaatcccagcactttaggaggccgaggcgggcggatcacctgaggtcagtttgtgatcagcctgactaacatggagaaaccccatctctactaaaaatacaaaattagccaggcatggtggcgcatgcctgtaatcccagttactcgggaggttgaggcaggagaatcacttgaacccgagagtcgaaggttgcagtgagctgagattgtgccactgcactccaacctgggcaacaagagcgaaactccatctcaaaaaaaaaaaaactatgtttctggatgcatctgtatgtctgggccaggatgcatgtgtctacacgtgtgcctcatgtgttgctacagatcttggctgtgtaggtgtgctggcgtttcttggcaggtttcgccgcagctgccctggacacactcacgttttttccattcaggccaggtttgccatcctcgcctggctttccctgtgggaacagatcactggttggatgtcggggatcgggtgagggtagtaagggggaaaagggggtaacatgaaagtctggtctcaccggtaatccagggggaccagaggggccagggaggccctgttctccacggaggcctggaagcccctggaaaaagtctttgttaagatttatagggcctctgagatatcccttggggcacaccccatggactaagaggaccccaaaaagatctccctccagggtagagacccccaggactgagaggtcccattgagatccctcaggcacagaccccatggatgggggcccctgctgagactcccaagggaagaacccccaggacttggagggcctatgaagacccccaaggcaaagaaggtcagaaagggggattctactaaaacctgtgtgccagggactgagaccctcccaaaggcaaggctgaaccgaccccccaccaactctctcggatgctgtgactatgatgatctggttggagcttacgcagccccgagccccctctgtcccagcatctcccctcacttacgtctctccctgggtccccagctttgcctgcagcaccctgaggagagactcaaagtcagttcatcatggtcatggggtcaggggctctagtccctgtgagcctaaggcctgcatggcaagaacatgccccacccaggcagggctctgggagaagacacagacaacaggtctcgccccagagctcgtcaaggccaagaccaaccaatgaggctggggtctagggtcctcatgtgaaggggtaggggaaggggacaaccaggcaggactaccaagactcacattcggcccagagggcccagcggctcctggtttcccatccagtccgctccggccatccagcccagggggaccccggtcaccctgtggaaaatagagtggtaagaggccaccaaggctgaggtggatctgataacccaggctcatgtcctgagaaacccccacaccctctcaccttttctcctgctgggcctcggacacctgggtccccctggagggaacagggtcagataagaggtgagggtaagatggggacttggcagacggggcaaagtgcatcactcacctgtgggcctgggggtccccgaaacccttcaatgccctgaggataggggaggaagaaatcagagcaggccctcccatgcctgcacccccgaggaccaatcacactcaccctttccccaggggctccagggaggccaggatcacccttgggccctcgaggaccctcttgtccgcggtccccaggctctccctgtggcagagataagcttgctgaggaacagccttgaagccaagccatgcccaaggtagaacctgctgggaggggcactggggtctttcttaccctccacccacagaccctaataccttctctctggctccaggtcctgtgtctacctgtggggggaatgaccagtgagaagaatggctcaacaaggggaagaggagttggcgaggggatacagggtctgtgaggggctccagggatccgcggaggtttcagagggacagtgggggaagtgggagttagtggaaggaatgaggggacatgatgtggagccaaaggggcaagtgagaacaatgacagaggaccagacccagcgcagcccttaccagccgtcccgggggtcctgggggaccctgggaaaggaaatgattatagtcaataggagccctcaggtcccaggccatggctctggtttgccccaggctcaactctgcccccaagttccccgaagcaccccaatgccagcccccagcaggcatgggtggccatccatgcttcccacctggacctccagaccccttgtgtgaaggcacactggcagcagcgccaggggaccctccatcccttctgagcccaggacaccagccctactcaccggctccccacggtcacccttgggtccagatgatccagggctgccctgcagaaaggcaggggtcagggccactcaaggtaggcagcagtttgggagagctttggaagcaccatgaggactcatgggaatgttggtagccttcagatgcgtgtgtgcaggggtcaaaggaagtgaagattgggagggtttagcattacagggttggggggtaggatcaggtattgggaattggctggttggagggttaaggttggggtgaggagtcataggctgggactcacatttcgtccatcctctccaggatctccctggtctcccttttcacccacaggcccccgaactccaggtgccccctaagaagagcagctggcctgagacagaccctcccaatattttgcaggtgcccctatgacccgctacactgccccaggttccccattactccaaaatccacatcagaggttcccatcaccccatgcctccctgcagggactcccatcaccccttacccccctcagcctttcctatcaccttcatgcccacctcccatcacccctgttacttctctctgccaagactcacccgaaggccacgctcgcctgcttttccaggcaaacccgggtcaccctggtgatagagagaaaagtcatactgcacagggcagtcaggatctaactca

SEQ ID NO: 1881264 - DNA, 4001 bp, Homo sapiens
atatgttccccctacaaatactccaaataacgaaggagacccatgtccagacacacacatgctagaatggtaaacacctgtgtcaggattaaatgacaccttgtaagatgttcatggtccccaacaggaagggactcaataattgtgtttcaatgatgtctaaatgtatgcttctgtctttcatatccaatccttgggtgaagtccaggggccactgccaaggaagtgggtgcttaggggaaaagagaagagctgaactggcaggagggtcaattggaaagttggagaactgcacagaacaagggctctcaaaaccttgatttcccttaatgaaaccacccacagtggcaccatcgtcaaaacagctgtgaagaacttggaggctctgtcctcctctcagcagattcatcagcaggaaggacttaggccaggaggaagggagctgggtccaggaaaggagggctgttcctgcaggccaagtccccatcaaggccaccagagcgtgcttccaagtactgcagcttaagcaacgcccccctgaactactggaggaatccaactctaggaccgctacttataactaaagacaagatactagcacaaggccactctgctgtccatggagaaataccaccaagcagacaaaacatgttactgctgtgctcaggctctgcctgcaccgctgggcacagggctggggtgtcagtcacgcaggaatgcagaaagcaggaggactcaccagaaaggtgggtcaaaaaggagatgtacacaggcaggaggccgagcaaggcacccatccatggaaaacgtggcgtaaagatttggggttattatggttggtggtgggggctggtgagcagatctaatatctgcacctcgagaacacaccatcccttccagccagggtgcacagcaagcagctggcacagagccccccttcccccactccattcatgcccctgaagcggcaacttaattttctttaaagggagattggggagggaatggagagacgaagagaagacaaatagctggagaaagataaatacctaagtaagttccaggaaaacacacacagaggaaacacaccaatgctgaaaccgcaatgatccagaagaagctagtgtttggttaccatttgcttcagcatcccaatttccctgatcatcttttgtttttttctttctttttctttttctatttttgagacaggtcttgctttctagctaggctggagtagtcatgcgatcatagatcattgcagccttgaactcctgggctcaagaaatcttcccttcccagccttacaagtagctgggactataggcatgtacccctatgcccagcaactttattttctgtagacatgaggtctcataatgtttcccaggctggtcttgaacacctggcttcaagtgatcctcccacctcagcctcccaaagtcattgatcatcttgacgtatttcctctcattagcttgtcattttccagcaggatattctgcggtccagtttccctgttctgctctcaaatgactgacagggggccgacaccctcaggagtcacctccatgcagatggggcactggagcactgctctgtacctcccagcagaggtggtggaatgaggaggatgtgagtatccaccttttttagtacaggctccacgaaaataaaccataccaccaaataaatggtttaattttatttcaaaattgtacaaaatggccataagcggctataaaaaatttgtcttcagaacatgtggaaattcagaaacaacaaaacaggtatcattcacagtgtaatggaaaagctttttctgaggcaggaattataactcttccttctttttccctagtctttcatggtctccctcccggagggctcgaatataattggtaaatcccaattcctgcagggaagtgggagagagagagagagaaagagctttaatccctgagctggctgtgcactctctctccccacacccccagcccctccagggggtcactcctatgacagggagaggtgggcagacttctgcaaggtggagagggtctgcgtggcttgcaccagccccgaccagcaagtgagaaaaccctcggcatctggagtccagcctgcctctggggacaggacatctgtggcaaccccttgggactctcctccaacaatgtcaagcctcagccaggcccagggcctgggcctctcggtgcagtgttccagctgacttctgcagtttctgggatgctgcccagtgctgcccctcctcagtggaagtttccctgcccatcagcagagagagagctctgggcagacgcctctcccccacttactgtgcggtcgctgtcatacttttctgcgaacttcccatagtggtagtagtggaaagtggggtagcccttgaccgcctcctgctggcacaggtcttggttcttgtctttgacacagtcaacagcggcacaggcaatctaggagccaaggtaaagagagttggcacagggtgtccccaggctgaggcctggaccccacaacacagattgcacatctagtccacgtcacaggcccactctgatttttctcctcagtggcaggtaggaactgaaccaaagcacccccagctcaggactccttggagactgatggtgcttgttttcaatttccagatgggtaaggttaggggactcggcctggagtgcctttagactgtcctttaaaatcaagagtatgatgatcgtaaaggaaatgatgacttgaaagcatttgtaaacaccacaggttctgtggtgctatctgtaagggactgtaggatttaatcatttctccactaatatttccggaacattagcttggggggacagtatagtgccaaggttaagggcaagagctttcaagtcaagttccccaagtgcactcttggtttgcctggacagtaagacttaaggaaaataactcagcctcttggtgcctcatttttttcagctgtaaaatggggataataatagtatctaggctatcaggatattgtgaagactgaataagagaattccagtgaggccagtgagcacagaacctggcaccagattcatggtcaggaaatgtcagctgctattacagtcacttcttccaaccccatatacaagctctgtccccacttaggggctcagtgtctgggcaggggttggataaagggacaattccaacatgatgtgatgtgagggatgagggaggtggtccaggtgccaggtgagtggggcaaaggcgctctgtatgattcgccatctgagccaagactggaagaggaggagaccagggaagcacatctggaaactggaggagccccgcatgagtaaagccatcagaatgtttggtcagaaagtggttcccacattggccactggcctcttcttgaccatctagcaaattccacatgctgggtagcttttcctcatcatttgttgttttttcaaaggaagacagtataaagcagaaatggggaacttgtttccggttgagggtcatgcaccagggaagcccgagaaggggtcctcaatggccatacccagtacagaggtgttatggaagatggggcagattcccatgagaatgagtcctcctaccaggcaacacacactgaaaccctgccgtgtgccaagcctgttctagatgctgggggacaacgtcgaccttgacaaagtccagttatcaagcgtctgctgtatgacaaattagatcattttagatagagctcaatgaatgcttggaagaaattaaaagagggtgattcaataagataatttaaaattattgaataaccatgattcacacagttctttggttgatggttatttgcatttggacaaagcccctttccaggtaggagaatcctgtgggcccccatggccacgtttactcatcatgtccctcatgcccaggtgagctgccagatggatagctgaagagaagagtgaggtgcggcctcccctggccaccaggtg

SEQ ID NO: 1881265 - DNA, 4001 bp, Homo sapiens
gacattttgagccgagatctcaataaataagcaggagccagccttggaaagatcgagataaagaacattccagggagaatcacctaagatccagatgcacaagtccagaggtagaaacaggtttggcctgtcccaagggcaaaaaacaggccagggtagctgataccagaaaggttggcagggccaggtcccacatgcaactcgacttcactctaagtgcaaccagaagggtgttacaaggagtgagaggtctggtttccatggggacaggatgccagtgaaaagggactgaagtggaggaggaacagagacagggaggccatgaggagctcctgcaacagtccatgcatgagaggacagaggcttgcactagtggcagcagtgcaggtggaacagagggacttgggagacctttgggaggcttggccaacaagacccactgacagatcaaacacagggaatgagagaagaggccaaagacggctgatggtgcagtttctggcctgagtcactggatgttttgcaactgaggccaacactgaccaccagacactgtccccttcttcctcactaacaagctactattttgttcaggatccctccataaaacctagtgttcaagcaggggcccctccccaggaccagaagttgagtctccattaatttcagccaatggtctctggggtggagccggtgtggagcactgctctagtttgacatggcaactgctagggaatggaggactgtggatttttttgtgtgcagggtccagggctgccaaatgtctgcaatgcataggacagtctgccaaatgagtaactaactgtcttcccctacagctagcatgccctgcagagtggctctggtcgaagtcaagaagggtggcccttctgctcctggccagcagttggttgaggcaaaggcatgtgatgcctcatggggggatctgtgcctgtgtggggtgtccagaactgtcttcctgcacccctggaggactgggccaccacgctgagcatgcaggagcttacagctggaagcgggtgtgcagcgcgcctcctgcatgacttctggtggcatgagataataacttgtaactttgagttgagagtatcagtgacctgatgaaggagggagattctacagccctctcctccccaccccattatttatttattcatatatttttcagacaaagtctcactctgtcacccaggctagagtgcagtggtgcaatctcagctcactgcaacctctgcttcccaagttcagccttctgggttcaaggagtcttcccatctcagcctcccaagtagctaggatcacaagtgtgcaccaccacacctggctaatttttgtatttttagtagagacagggttttgccatgttggccaggctggtctagaactctggacctcaagtgatccacctgcctgagcctcccaaagtgctgagattacaggtgtgggccaccatgaccagctatccccacccctattataaagccaagccaggcagagtgaacgcctggtcctagcagcccagcaccaactctgacccagaatggaatgtcacgcagccccaagacgggcagggccagggtgcaggccaggcacccagcagtcaccagcaagctgagaggccccttgaggcacagaggccagtggggaggaacaggggcagggagtaggagagtgggggagtcaggcagagtccagggtatggagggcggggtgggcttctggttttgcctgcccagcatccaggctgctgccagttggtaagagcaccgttttcctgaggtggaaactcagctcccagactctagactctctggaagtttagggatgcgtgactaacccttcacaacccagggaatgcacctgtgatctaagtctggctagtcaggatgttccatcaccctggccaatgaaaatctgccctgaggcttttgatctaaattattattagaataaattattagagcaaaagtctcagggcagattctcattgacaattgaggaaacactctctgctgagctcagtaagtcagggctgtaccaccttgacctcacgctcaggtacccgcctcagagtaaagccgacgcggaggagtggagagctgagacacggatggagacagatcttgatgagctcactggagcccctggattcagccacatccaaagccagtcctacccgcttggacttttcagttataaaacccaacaaatccccttttctgcctaggccagtttgagtctgacttctctaattcaccagtgaaaaacctccagctaacacagattttggagtcaacaagacggggctgcactgctggttctgccacgtgcttgctgtgtgacctggggtgagtcactccccctccaagtatcatggggacaacatctgcctaataagggtgccgtaaggatcaaacaaaaccagggatgtaaacatctacaaaagtgacacatgtacaaaggtggttgctgcttttctttttttttttttttttttgagacagagtcttgctctgtcgtccaggctggagtgcagtggcgcgatgtcggctcactgcaacctccacctcccgggttcaagcaattctcccacctcagcctcccaagttgctgggattaccagagaagagactgaagggcaaggagggaaaggaattggttcccaggtccatggacctcttgtgaagcccccattgctgtggggtctgaggaaacacagaggaggtgtcagctgctctgcctgcccccactcccctgccaacaacgtagtaacctctgtgcctaacctctgagccctggcctccaaccctgggagggaggtacttatgttatccgcattgtgcacgtggagctcagaggggcagccacttgccaggccagcaatccaggctgtctgtctccagagcccaggcccccagtcaacaacttgccaggtgcccctctccaggcctcggcttctccacctgtgggtcaagagcaccaggcttgttctagagctatcttctcagacctgatgtgggaaataccctggtgttgttaacatgcagatgctgctcccaagggcaggggtagggctgaacagtctgtgtttcccacaggctcccaggtggtgcccctgctgctgctacttgatccagcaaccacactggggttatggggctgctggccataccaggattgccattacgtatcaaagcttaggaaataactgaagcactgacttttttttttttttttttttgagacagagtctcgctttgtcacctaggctggagtgcaatggtgcgatcttgggtcactgcaacctccgcctcctggattcaagcgattctcccgcctcagcctcctgagtagctgggattacaggtgtgcaccaccacacccggctaatttttgtatttttagtagaaatggggtttcaccatgttggccaagctggtctcaaactcctgacctcagatgatccacccacttcagcctcccaaagtgctacgattacaggcatgagccactgcgcctggcccgcactgacttttagttaataggatgcacacttcctatgtgcagacatggtgctcagtgctttacacgtggtgacacacttaacaatggcatcgccttctaagggagagaggacaattactgtccccttatacagaggagaggagaggcagagaaggggtcagtcctcagccttctctacttagttctcttagactgatgctcccaagcactgacaaagaagtgggaggggttggtcagctcacgataggggcctaagggtggtgagaaggggtggtgagaaggggtggagcccaggggtgattctcagaggaggaattcctgcggtgcagagcaccctgggcaaccccaggcctcccaggaacagggaaactgggacagactgtttcttccacctgggaggagtctcccagactcacaacattccaggggcctctgcctccctccctcccacccag

SEQ ID NO: 1881266 - DNA, 4001 bp, Homo sapiens
atttttttgtttaagtttttattgagcttgttgtcatctatttggttctttacatattctggatgtaaatgccttatcagaaacatattgcaaatattttcttccagtctgtggattatcttttcattctgtcagctatttctttagaagtacccaagattctaattttgatgaccaatttgactatagtttatttattttaatggattgtggtctcaatgttatatttaagaaattattgactagccaaggtcaaaaagattttctcctgcattttcttctaaaagttttacagttttagctcttacatttagatctttgatccatattgagtcaatttgtgtgcatagtttgagataaaggcctaaatttatcctttctgcatgttggatattcaatagtcctaaaattagttgtggaaaagactgtcctttctcattgaattggcctggcaaattttttgaagaaaaagttgacacaattagaaggctttacttctggactctcagttccattaccttatttataggcctatctttatgtcagtaccacactattttgatttctatagctccatagtaattttatttgtttgtttgtttatttatttattgagacagggtttcgctctgtccctgggctggagtgcagtgatgtgatctaggctcactgcaacctctgtctgccaggctcaagccatcctcccacctcagcctcctgagtggctgagaccacagacatgtgccaccatacttggctaatttttgtattttttgtagagatggggttttgccatattgcccaggttggtcttgaactcctgagcttaagtaattcacctgcctaggcctcccaaattgctgggattacaggtgcgaactgctatgcctggcctacagtaattttaaaatcagaaagctctttttgtttaattaacgaaacttcttttaagacaacgataagctttaaacattttcttttttatattatctctctcctccagtttttgttttgttttgttttgttttcccagtacttttctttcacaaaagaagccttcttcaactgttaattcttgcttatcttctcacgtttaaagacggagattttaaaaactgtttgaagctctgaacgcataggtaagactggtatactttgagcttcattgcaggatgatgtttcaactatagtcactgtttgagcataagtcagggaataatttataaaatatttggcaacattaaaataatatgtcttctttactgggagaaatctgccactgattttctaagcgaagaagcagaaagcacatgggaaaaaatgatgtcactgccatcttgacacgtttgaaatcacaaattatagaaaagttgtattcctgatcgaagaatcactagtattacaggagttattaagaaattattttaggcagcaagagaggggaaaagagtccttggtaaggctttttcttttaataaaaaagcaagccccaaaacatttcttttctaacagaaagtggcctgaaaaaccagacctgcaagcattgatatgcaaatgctggtggctagaagccaggtccaaccaatatggtggttcccgtgactttttctttgttgccacgtatgcagaacatcatggtgaccagccaggtagccatatgtgcatatttaaaggctagggtgggagagctggcttttttgcaggctatgtgaatgacacacctggtcaaaccaatcccctggctcctatgcaaaccaaacaccacgtcgtccagcctcccaatataaccgactgctttctgctacatgtggggttttccatttggagccctcctccctctgtatgagggagctgttttcttctttcttgcctattaaacattccactccttaaaccactccacgtgtatccgtgtcgctaattttctccgtgcgagaacaaggaccttgggtgtttctccagacaacagacccatatcatttttggtgcgttggctgggaaaccaaggtacaatatccattggggttggtgagcagaagagcaaactcaaaacctgtcctttcattccgaggctcttggcttccattttaaaatcaaatcaaatcaataacagcatctgtcaaccatctagatatgcttagtgtggctgccattcttaaagactcgcatgtcagccttgctggggagaacatgaagacccccctccctccaataccctgggtcattgggaatgttggccgtgcttcaaaccagcttttctgttcatggggaaaattagccattgcataaggcggggaaaagttctgaagcaactgagaatttctggccagggcatttcctagtgttattcaaaagcttctggaccggactcagcctccagcagcctgcccaggtgttggtaaaagatccccagttatcctgtcgcaaaactttttttctgtttctatccacggtcgctatgcctcttattctctttgtgtgtcgaatgtgtgggaatttttacagcctagggaagtaatcctgttaggcaagatcaggaaatgctgtaataaccggggctatagctcaggaaaatgctgttgcaatcttctaggaacagaggtctctgaaaccccggttgtgagatgagtccctactatgctgctggtggcacatagtattcctaagccaacagcgccacctagtggaaatagacaccctcttcataagacgcattgcttgtccgctacagtccaccgcagcttcctaatttttcctttttgccccttcctactggaaaccaggctttatgctgcttctgtgaacaggaaaattctgccttcaacaattaggagtaaattgtcctctgcagccaaatttgagtcctgatcctgtcccatcaacaggaaagtcacgattaggcccccacatccctttaaggaaactattctgtctccaataagacagtccttaattagtaaggggattttaagtctgaaagttaaccagaaccatttttctaagggttaaggctttaacacgggccatagtagcaggcaatctagcacattccctccattaaaggacacttgccttttatataatctttcccaaggtcaattttttttaagggaggcacacaggtcacacaagtctaggaagtcaaagggaaatcacaggcagaggactagagctacttgaatgagcatgactagccccagttgcttggtttctttggtgccatggcttggagggtcacacatacaaccatgggcagcacatttaacagggtgctgggacccaggaaccaaggaaggaaaacagttggggggacgctcccactgtcttcttctccactctgggttatacagagagaggaaggagacaaaagagacacctttttctcacttctctttctagatgggtaacagatcatgttcagcatgtactcccctggagtatattctaaagcactgggactgcttcaaccctgagactttgtagaaagagcacctcatattctatggcataagggcatggccttcttaccatctttaagacagacaaacctggcctgctggggggagccttcattttaatactgtccaacaattagatattttctgcagatggaaggacaaatggtctgagatacccaatgtacaggctttctttgccctgcgagacgacccagacctttacaagctttgtacaattgacccagttcttttagcagcatgacaggcaagcccacaaggaatagtcccccagagctaaagcagattccagaggagcaatctgagacagctattgaatgtctcaactcagttcccctcatccagaagcccctccaatcataccatcaggtcctccaggtccaccatctccagtattacccactttccccacttcattcttatctctgcaggaagtgcctgatgaaaatcgtgccatgagggttcacgttcccttctcattacaggaccttaagcaattaaagggagacttaagcagattttctg

SEQ ID NO: 1881267 - DNA, 4001 bp, Homo sapiens
caagttttaaaagctcagttttcttgagaggttggtttaataaacaccaccaaagatatctaaaggaattataaatattcttttgggaagacagttaccttgttttgggttatgcaacaaatcatttgtaacatgttattaagaagtgtgatttcattgttgtctatttggaagttaaccatgttttaaaaagtatgtagatggcatgttgaaagagtgtgaactgtggcgggcttggaatgcatcaatgtaatgtcaggataatgtatatacattggtttttgtccactgttcctggaatcccacagcctttgttagagtctttattataatgtcagtgtgatttggcctcaagatcagaccgcaggaaacaaaatttctctctctgaaattctcctgtccttttatttggccaagataggactctaatctttttttggtttaaaagatccttattccagagcagtcctgccccatacatataggatgaaatcatagtaatagccatgtgcccttttgatgcaatcacacagctacatgtggacacctctatatgtgattggacaaaaaggctgcatggttgtcagtcacacctatttaagcctccataaaacccccaaaggacagggtttgaagaacttctggagagctgaacaagtggaggttcctggaggatgacttgccaaaggaggtttagggaacctaggtgccccttccctcatactttgtcctgtgcatcttttcacctgtatcttttgtaatatcttttaaaataaactggtaaacaaaagtaagagtttttctgggttctttgaactgcttcagaaaattaatgaaagccaaagatggagtcatggaaactttgacttgaagacggttggtcagaagttctggagtctaggactcgtaatagatctctagtggggggcatacatcaggactgaactctcaatctgagggatctgatcctatctctagctagtgttggaactgaattgtagaacacccagttaatgtccgctgcagaatttattgcttgcttggtggtgaggagaaccccacccacctacattttataacagcagtcttctgtgttgatgattgctgtggtctgaaagcagaccaaaaaccaaaagattaaaaaaaaaaagtcaacttagttaaattagtagtgaaatgttctaggcataagctttgctgcatagctccaatacagtattagccacagaacaaattgtgtgcataatttgaaatgtgcatgtaaagggcagccatatttttgtatactgggaatgttggaacagggtgctgtgaagcttctactgcttgtgcacattgtcactgatctgctggcttattggttgttgtgaaaaagcagctcaccttagagttcttccagttctcactgattatactccttcagcttttctaagtccttggccagagcatgcaacactgcagcattagtagccaggctctcaatttctccgtgttttgttgcatcccttccttgagtttctttggatcctggttcaagtctgtgcttatctctgtgaggaaagcttctcctgaagttcatctgcaacatagggatgaaggcaaggaggcaatgagaggctgacccaattttcggctcctccttgaaggttccatttctctttgctccccctgcctcactttacgttcaccattccttcacaaccattggctttgccaacctcaagcccagtagctgaggaagaagcaatgattgtatataatctgcgcacctagccccaacatttttttaaggtaacatctccatagttaatttattttgtattatttatcattattccatttcagtaatcaaattctcacgggtaaactatgaatttcgaatatgaggttacctagtcacacatgtatttctagtggccgtatgagctttttcctgtcctcctacccactgcttcatgggatatctgaccagaatagtaagtgggaaaaacaggatttaaacctatgctatattgatttatatgcacttatgcttttatttttacttttattttactttttcaaacttttattttagattcaggggtaccatacaggtttgttttataggtaaactgtgtcacaggggtttgttgtacacattatttcattaccaggtacgaagcctagtactcaatagttattttctctgttcctctccttgctcccaccttccaccctctggcaggtctctgttgttcctctctttgtgttcatgctcattatttagctcctacttgtaaataagaaatgtgatatttggttttctgttcctgcattaatttgctcaggataatggcctctagctccatccatgttcctgcaaaggacatgatctcattctttttatggctacatagtattccatggtatatatgtacaacattttatttatccagtctaccattgataggcatttaggttgattccatgtcattgctattctgaacagtgctgcaatgaacatacacgtatgtgtgtgtctttatacagaacaatttatattactttgggcatatatacagtaacaagtttgctgtcaattcttagtcccttttttggctctttgacgaattgccttactgctttccacaatgactgaactaatttgcactccttccaaaaatgtatgagcattcccttttctccacaatcttgccagcatctgttattttttgacttttgggtaatagccattttgactagtgtgggatggtatctcacagtttttatttgcatttctctaatgatcagtgatattgagaactttttcacaggcttggttggctgcatttgtgtctttggaaaatgtctgttcatgtctctcgcccactttttaatggggttgtttgctttttttcttgtaaatttctttaaattccttacagatgttggatattagacctttgtcaaatgcgtagtttgcagttatttctctcattctgtaggttttctgtttattctgttgatagttgcttttgatgtgcagaagctctttagtttaattagggcccatctgtcaatctttgtttttattgcaattgcttttagcatcatcatcctaatatttttgttggagcttttgtcaagaatgatatttcctaggttatcttccaatgtttttataattttaggatttacatttaagtctttaatccttcttaagttgatttttgcttatagtgtgaggaagggatccagtttcaatcttctgcatatggctagccagttctcccagcaccatttattgaatagggaattcttgccttattgcttgttttttatcaggtttgttgaagatcaggtagtctaggttttgagggaaactacctcaaaataataagagctatctttgacaaatccaacatcatactaaatggacaaaagctggaagcattccgcttgaacatgggcacaagacaaggatgtcctcccacctcattcctattcaacatagtattggaagttctggacacaacagttaggcaagagaaagaaataaaggggtatctaaataagataagaggaagtcaaagtatccctgtttgcagacaacagaattctatatctaggaaactctatagtattggtccaaaagcttcttcaactgataaacaacttcatcaaatttcaggatacaaaatcaacatataaaaatcactagcattactatacaccaacaacagtcaagccaaaagccaaatctggaatgcaattccattcacaaatgccacaaaaataatcaaatctacaatgagaattacaaaacactgctcaaagaaatcagagatgacacaaacaaatggaaaaacattccatgctcatgggttggaataatcaatattgttgaaatggccatactgcccaaagcaatttatagatttaatgctattcctatcaaattaccaataatgttctttacagagctagtaaaaaactattttaaaatttgtatggaacaa

SEQ ID NO: 1881268 - DNA, 4001 bp, Homo sapiens
aaaaaccaccatcagatggtagcaagccgagggcagggactgtatttcattagttttatacatcccaaggcttcatctagaacagacatttaaagtggatggatgctaagaattgacaagctctttggagtagttgccacatcagaccaaatgcaggacacattcatagagttaaaacaagtttggttttcctagagttggcgtatgtgggtgatggggaggaagtgctgcttgctcagcgtggcaaggagctgctcatgcagggacgaagcaaacctttttccactgaagtattaggaggacgatgaagacgacagacttttcaaaaatcatgatcacgatgtaaagagcgcactgcccgacccaggctccacactgcagagggtctcctgcagggacaggcgggtgcttagtcacatggggcccaggcatctgagtgagatgatgtccccaccccactcccccacacgcaccccagaacactggctctaaagctctaaaggtacttaatgagcccccccaaaagtccaaaggattacctcatccttaacagacaaatgcagtattttaaataaaatcagagaattccttatttgaagatactaaaatggcctttcttttaagagattctaagataggattaaaaagcactaaagttaggaagtgctcattgctggagctcagaaaagctgttctttctgccggctggcagcagaagctgtatgaagcaagactgctattcttatccgttgttgatttttccagtgacagcggggctgcccctcccttctctgtccatgagtggactgatgtttgtggatgatgaagcaggacccagtcgctttgtttgtctcccacctccccacctcccatcccttacccaactccccgggccatccctgatacctcagcctcttgagagcagaaacgtgactctggaggaatttggactctacctgtccagcatgggtcaccccaaacaccttggccagggacaaggaagtgaagagagaagtccttggggcaaggaggtgggagggatgggccggggcccagggctgtgacaaaggtccatctgggaccccttcagtcaccatgcttgagaaaccgagggacctagtagtacaagctggaggatgtgcaggccttggaatgcctccaggacattttgaacggagagaagaccagcccctccagggaatgatcctgtgatatgaagaaccctagggtggctcctgggagccacataggcctccccaaagtgggagacccaggggagagtgggatgtgggaaggttgcctggggctcaccctggaagttctgccagagctgccttaccacagctggccagaagagggggtacagggtagcattttgggggtggcgggggggcgggaggctggggggtaaaggccgtaatccaggctatgagaagataatttggtccaaagagatatctccagcttctcacttggctttattgtttctgcagcaatccctgtttgggcacccatgctggaggcccatgccctgcccaagcctgtcagctgtacacaagggaatgactttatgcagctgcaatggacaaaacaccaggccattcccttttctggaaaaccctgggagaagtgtggcagaaacacatcagtcgcctcttctgaggtcttcctttctactttcacttaagggataggagacatttgagccaaaaaacccatttcataagcataatccctccttgctaggttgttaatgagttttgcaatccttttcctttcggtaagtcacctaaccttatcgagaacagttctcaaaacaacagatgaacttatttgtgagaaaccattaagtaattaagtaggtttgaggacagttggacagaaagcgccactaggaaatctctctgtgaggactggagtgtttgggagccagcggagcgcgcggcaccgcttatttactatggaaggatgtccgctcgctcagtgtgctcactccatctgctcttcagttttaagtgactgacaaggaggaaaatgcttttcctcccatacgcctcacattgccccagtgttctaggtttctgctacacaacttagctacagctgcctctttagatgctaaaataagaaagttcagaaacgtgagaaaagagaaaaagcacctgtgaccccgtctggcacaccatttcctctgggaacccagatctcacgcagccaccgttgggagaagcacacgtggctgctgtgtttcctgattcctgtttcacttgcgagtctttcagatgtcccccacagtctcctctttaaaggacagacatgccaggcagtgttgcatgtcctgctttgtcattgctgttattgttttcttagagatggggtctcactctgtcattcagactagagtgcaggggcatgaacacggcttattgtatcctcaaactcctaggcttgagtgatcctcctgcctcagcctcccaagtacctgggactaagaatgcatgtcatgtgcctggctaattaaaaaaaatttttttttttgtagagacgggatcttgctttgtttccaaggctggtcttaagctcctgggctcaagcgatcctccccgcttaagcctcccaaagtgctgggaatgacaggtgtgagccactgcacctggaccttgtgtgtcttgctttttactgcaatgaacaacctcaggcatgtgggtgttttgtttgggtttaattatttcctcagtagaagtcacagcaataggggccaaaaggagggaacacatctgtggcgagaggctttcaaaagggagagtttggccagggatgggcagcaagacccatgaagcaccgtgacccagatgtcagggcttccacatgggaaagagtggcctggtaatcagagtgcagacaccatgcgtcacctggatctggtctcaaccgccggggctgtgtggcttatttccctgagtcccgcattctcatcagcaaactcttggccttctcttctaggaacaaaagacacatcctagaaaaataagcccctcttcttcatttacatgagaagagagctgtggtacctcttcctcaaatggatgggcaggataacaggtgtgggaggtggaataacagccccacacagttgcctacatccaaatccctggaacctgtgagtgtgtagcatcacatagcaaaggggaattgaggctgcaaatggaattaaggctgctagtcagctgactttaagacagggagagtgttctgagtgtccaggtggggccaatgtaatcacaaggacactttaaagtagaaggctgcaggaagtcagggcaactcgatgtgggataaacccagcgactcttgttggcttggacgacggaaggaggggccgcgagccaaggcttacaggcagactctagaggctggaaagggcgagaaaacaatcttcccagaggctccagaagccagccccattgacactgggactttagcccagtgagacccatgacagacttctgaacaaaaaaagataatcaacttgtgttgtttcaatttgtgccatgaagtttgtggaaatctgttacagtagcaatagaaaacaacagaaattgatggaaatagaaaacaacaggtaactgagcagacaagctatccttcctcagcctggggaagactcaggatggtccccacagctttatttggagacattctggcttgaagactctggctcccaaaggcagtggtgggatgacccaggggcaggggctgaggcaggccaagagattgagaaagaggctgaaacaatatcactgccttcttcctttccatccacccttggggatgaagacaaaatgtgagggaacagctggtagcgttaatgcttgatgtatccgaaccagacctgatcttcactcccaggtcactgagtggcacctgacagactagtggtgaccagtggattcaccttagcactggtcagctatagtagagctgggagccacaccttctag

SEQ ID NO: 1881269 - DNA, 4001 bp, Homo sapiens
attaaattacacaataaaaataatgcatgggtcaaagggaaatcaacaaagaaattagaaaagttttcaaattaaaatttattaaaatacaacatattaaaattgagatatagctaaagcagtccttggaaggaaatttatagctttcaatacatatgtaagaaaagaacaaaagtcaaaaaaaatcaatgacctaaagttccacctcaagaagctggaaaaataaatgaaaaaaaaaaaaaaaacaaagtaaattagcaaagccaaaatcagtctttgaaaagatcaacaacattgataagctcctagctacaccaatgaagaaataaaagagaaacaacataaatctgcaacatcaagaatgaaaacagatcctacaaagttatgtcaacaaatttgacaattgagaagagaagtgggcaaattgcatgaaagatacgaacttgcaaaacttagtaaagaagaaatagagagccctctatttaaaaaactgaattcatggttaaaattttcccactcatcaagaaaattccaggcccagacagctttactggtaaattctaccaagcatttaaggaagaaataataccaattctacacaaaatatttttgaaaatagaaaagaacaaaatacctcccaaaattattaaataaggtctgcaataatttagtcctttgataagcataagaaatcaatgccttagtaactaacagtccttcaccatcgtgagaaatgatggatggtttagctggtacactcgacctaaatttcttaatagaactcagagatagcagaaacctcttgttaagtatgggaaaaagtctactccaacttctctgcttgggtggaatacaaggacttttattcattctacatgagaatcccagagtaaaaacttgctggatgtgctaacaagcctgagagcaaagcaaggttttcaggggtggggggaatgcagctatgatcaggtatgaggctgagccaggaggaagagacctcttcacgcagcaacaaggtacaggatgttcagaatgccagaaaattatttcacattatcatttgggagtctaagacatatgatatgtgaactaattaatgagctgagcactgggccaggtcacacttgaaaaggtctgcgcctaacagcatctgacataaggaaggcaggtcctgaaggcaatgctagacaaagggtcattatcattaaatccatcaagggaaagttgagagtagcatccaggaaaacactgccgaggactggaaaccaacacacagacaatcctgtgtcagaaatgtagggagtacagaaacatgaaaaaggaaaaactaggggggaacaaactaaagtttctgaagtaagcgatataatgatactttttggaaagaactctagtggtggtgtggagggagatctggacaggaagactgaggtagaaatccatgttgcaagagtctaaaccagagaagacaaatgcctaaaataaaatataatgtggagaaactgtggatttacaagacatgtctgcgatagattaaaagaatttaatgcaaattttgcatgtgtattgattttcccaggacctgatcttctctaggtgaacagtcaaaattaaatttctcaaatcatatttaggattagaaccttaaatagtcaagattccactaagatacctaacatcgtgatagtcagtcagaaagagccagccatctttcaaaaatcctagttataaaattcctccttttttcttccattgcagcctatgaagtccttccacatgttatgcaatttaattcccaaatgactcataattgttttaatgggtgagaaaattgaggctcagaaagatgtggtaatgtttccaagatcaagcatctctaaatggtagatccaggactcaaaaccaaagtccaggtctctttccactacattgtatcagaaaagtccatataagacttagtagctctcacaggagaactctagaccagacgtgtggataggttattatcaacttgtgtgccaggagctgtgataaataagtaaaacacagacagctcttaaggaacttagagctttgtaagggagttgaacaagtaaaccatttctgttctataaacccagatatgcactatttaaaaattattttgcccatttttttgacttttagaaaattatttttagttttgttgaagtacatgcccataacttaaaaagtcaagtaatgctaaaagacttgtcttttaaaatactcaacttttccctgcttaacagccttctctatctctccagaagaatcacttttagcttttaatcttttttcttctgatatttacctccatatatctaaacaatatggatatactgctctctctagctacttttagacagtgtttattatgggaagatgaagaatgttaaatctctatcaccacttgctatctctccgcccttgcaatataatcaaagcacaaaaaaactatagtgaagtccatgcttactatttttagtatactgccttaataacactcattcctgagttaagaatgtattattttatttccttcttgaacaactcgcttttctaaaactaatacctcatttattttcactttttaactttctggaatctcctgataaatattcccacatcttgtcatagttctataaattccactcagttcaattttctacatgcatctatcagataatctattatttaacatttttaactttcttggaggtgaaaattctcctttccttgcttcagtataattgttctctgcatggctgcccaagtgtcatcctaggcattacctttaccttatttctattttgaatctcctatttcctggaccatatgtagtcctttttctttgctaactccatcatttttatggagcccaccttcctacagctttctgggaacagggagtataagatctattttggcccagcatggtggctcatgcctgtaatcccagcactttgggaggcagaggcaggtggatcacctgaggtcaggagttcgagaccagcctgaccaatatgatgaaaccccatctctactaaaaatacaaaaattggctgggtgtggtagcaggcacctgtaatcccagctactcaggaggctgaggcaggagaatcacttgaacccagaagacggaggttatagtaagccaagatcgtaccattgcactatagcctgggcaacaagagcaaaactccatctcaaaaaaaaaaaaaaaaaaaaaaaaaaagatctattttataacatcctgctctttccattctactataaaaattaattatttaaatgtttacctaagtttaatacttttaaaagtatacatattatctttacttacatcttgattctgatttagaagacctcagagacttcttcccatcactctttgatgtaactgatttctccccatcagtatcctgatcatctggttccttcatttcctctgtaagtacaaaatggggatgagatatggataaagctgtaaaattgaaactaacagatttccccctaacatatttcattagcaccaaacaccatgtgtgtcaataatccttgtttgcacaggatccaggatgacccaccagtaggagggtgcaactaccaccagagacctctgacctctgcaagacagctaattataatcacagattctctttctctaggtaaattgtcattgtggtgcactttggttttccagaggtccactaccaaagttcatcttttccccagatgcttcaccattaaaattaactttctgccatcctacctttggtccatccctccctctttctctattttcaaattcccttggagttactaatcaatttcagtttttaaaatattttttgagcacacctgcagtgtatcaagtcttatgttgggtactaaattacaaacctggagaagagaaatatggtccctaactttatggagcttgtttataaagatagatattaaacaagcaattaaaaata

SEQ ID NO: 1881270 - DNA, 4001 bp, Homo sapiens
gaggtgggaacctcttggggatggaggccctgatagggccttgtgggacctcactgtccacagtcccttgggcagcactctgtagcccccacctcctctaactgcccacagagcccttcagaatacaagcacggggaggggtagagagagagccctggacccagaagagggcacctgggacatggtgtctaattctgattgctatgtgaccttggggccagcccctctcctctctggacctcagttttgtcatctgtagagtggggagggagctggcttaggccccatatctcagcaatagtgtcttgacactgtctaagggagaccagcctagggcatgtcctgggtagggtggacagctacatctcgggaagaagagggtgtggagaggccggcagaggcccgtgtggacagaatgaccagatggcgccccccttccccagctccacagtccttcacttgacggacagacatggtggggtgtcaactccatgccaggctctcgggtctgagagaggtccccctgtggtccctgccctccaggagctcacagtctagctggggtcaaggagagcagataggcacacagatccagagcaatgcaagacaaaaccaagccaaggacatggcgggccggaagggacacagccaggcaaaggtgggaggtggtccagtgtgatggtagcgggcgggccgggccaaagctcagcgcccacgaagggagaaggtgcctgagtggagggtgacagagtggagtctttgcttggtgttcaataggaagccgctgagagtatttttgggtggagggggaggaaggaagagaatatcttttgagcattcatgatgtgccaagttccatctgagccacttttcgctcagctgtcacagtctgtgaggtggtcagcctcaccccatttcacagatagggcatcagctcagggggtcacctctgcattcagcccaggaaggcagagctgggatgggagctggtctgtggctccaatcttgtgctttttccaccttgtggacaaagttggtgggagagctgtctggggcagccccaaggagagaaaggggggccagagcgtggtggggagctgccagctatcccatgagtgggaggaaatgggagcccaggctcagggaacactgtggtttccgtggatggtactgtctgtcctgtcctgcccaagcttctgtcctgtcctggtcctgtggaggggatgttccttggtctctgacctggcagcagagagtggccaggaccttcccagctgcaggctcaaagcccatcctggccttgggcctgtcctgaacagcaggaggtggctttcccttgccctgagctggtctagatggtggcagtctcggagtcaaagccttctgctgtggcttgtggggtatgctgagccataggtagcagaactgggaagcctccttttacaaaatggggtttctgagcccagataaggcgaatgactgaagttgcagagggtgtaggacagtaggggctggacctagggttccttgatctcttgcgtgtgaccttttaggcctctccctggatagggagaggggagagttcatctcttctaaaagggttccttcagtggggagaggctgtgaagaagggatggaggctatttctgggggctattatctgcctccaggcacaagcactaaacaaagccaaaacgattcccagcccagacacagtccttccattattattgttattaatgcagttaataacacacgctcacagagcacgaggcagtaggcaaagtgtccccctcacaacagccccctgaggtaggttttggcgcaagttcaatccccagcccctccacccaccactttctggctcagagagcttgagtgatggcccagggtcacacagctgtgagtggtggagccgggacttgaacccgtgctctatccactacaccccgctgcctctcatggagaagaggcagggtagtgtaatggagagagtgcgggccgagtagcagactgggccttctgcagtcacggtgtcgtcctaggctccctggagacggtggcagtggtggcaggtccggctctcccatgcctggccttctgcttggtggggtgggcagcaggtcctgggatgtgggcagagtcccaagagggtttaccgatgtcctgcatgacctcatgctgttagtgctctggctggcagggggaagggaggagggtgtgtcggggtctcgcgggggttgagccatcgggcctgctggagccaggccttgctgttttttgaagacagccccgccatcctggccccctggctccagccccttccactgccacattgatggcatctagtctagtcctgcatttcccagtggaagttactacaaggaggcaggctcctgcatgggggctacaggaagagcccagagctggggtctggcttccgccctgcccctgccctctgtggggccttacacttctgctctgggtctcagtttccccagctgcaaattgggataggaccagggtcctctagggatcattgaatcccctgaaatgttgcaagatgaggagtctgggcatctgttccttataagaggggtcactgctttagtggaactctcacggaagttcatgacctaggagggtttaaaaaacactggctttccatgaagacaatgaaaagatgaggcgctgctccatgcaggagaccaaagaggcaggacatccaagtggcatgcaggaccccacatggatcctggcctggagaacgctgcaggcacaattggcagaatgtgaatatggatggcacagcaggtaacagtaccgaatcaatgtcaagtttcctgaattgatggctgtgttgtggttatgcatgagaatacccttgctcttgggagacacacctgcagtgtctagcgggagaaggccatcacatctgcatgatgaggaggagagtgagatttgtcagagagcaaagacggcaaaaggttagcaacagccgaatcagagtgaagggcatgcccgtattctttgtgccatccttgcaacttttctgaaagtttgaaattatcttaaaatacaaagctaaaaaataggcctaggtcagagtttgcactctaggtcccacccatatgtggcttgacccatagggaccttaaaatgtgggaatttcttgccaatacttaaacattgagagctggtacagggaaatctggatttctggctcctcttgcaaagtgagcactgaggtcagattgggctggcgcttctgcaggcagcaacaggaagcagctgtggtttgggtttggcacctgtgctctccctacctggccctgcagacatatgagtttgcaatttctgaatatttttactctgtcccgtttgaagatacaccagacatgggctcgtgtctgcctgtccgtccctggagggtaggaaggtaggggaaacctgcctggttttgatgatttccttggtgccctgagtgttgaggtcatttgagtctttctgaaggctggtctgccctcacttgtcagatggggaaactgaggttctgaggggcagaggccacagtgggagctgttggagggctggaacctgggcattctgcctccagatgccacattccttccacaccatacagcacctcacaaccgcagggtttgtttgcaaaggacagtcacacgtgtgcatgcctgtggtccccacaacagccctgtggggcaggcagtggaggcctcaccagcttccccattgcactgacacagacacagaggctcagagaggtgaagggacctgtccagggtcacaggccaagcatggttggaccaactgaccagagcggagtgtttcctgccctcttctaagctgaaacagtgcatgagatgacactagggctttctcaaccaccataacgacaccacaaatgcccccagcctggtctctctgtgttgttcctcaaggatcatcagactggaaggcccagcaaggcctccccgctg

SEQ ID NO: 1881271 - DNA, 4001 bp, Homo sapiens
tcggcttcagaagctgtcagcattgtcatcctttgatcctatgctgatgtgaaacaggcaggacaagacggcacatctgtcctccagcgcagtgacctggagaaagagctggatgtgtcacctttttgttttttgagacggagtctcactctgtcacccaggctggagtgcggtggcgcaatctcggctcactgcaacctctgcctcccaggttcaagcgattctcctgcctcagcctcccaagtagctgggattacaggcgtgtgccaccacgcccagctaatttttgtatttttggaagagacagggtttcaccacattggccaggctggtctcaaactcctgacctcatgatccgcccgcactggcctcccaaagtgctgggattacaggtgtgagccactgtgcctggcctggatgtgtaatttaaaccaaaactggaagtagagctcatttttataaactcctgggtctgaatctgggacctaacccctagttaaacttgagttctgtggggtcattcttaaagctccctgaaggacctgggcacttctagtcacagcccttcagaacttctgggacttggctttttgagtctcactatgaacagaagggagaacagcctcagggtcttctagccctacatggctttcagatcccaactttgaggcagaggaatcaagggcaggggccagttcccacatgttccctctcacgctggtggagcctcagccctggccatcaccttaatgcctctcccacttccctgggagactccttcttaccgccagctcaagctctcatcagcttccaccaaccacaggcaactttccgctcagcttccagggcagcacccacgcccatttctttcctaccagcaagcaactatgagaagacatgcccatgggcagaattcaatcccagaacaaaaatgatgcaggctttagttcacagagctgccagctcttggagaagccactctgaccagtgttttcacagaggttagaagctgcatcaacttaaggaacatcacaaacacacacatggccccacccaaggacttcactgtcaacacacacattaacgggggggaagggggaggcagcacaccaaaatcagcattatcaaaaggacttcaccatcaacacacattaacggggggaggggggcagcacactaaaatcagcattatcaaatgaacagataaacattaccaggctacacagagttaagtgcataattggcataaaggctcttgttatcccaagaacacagggacattcacactcacatccacaaaccgtcaagttctgtaacagcactaatagcaggaagcttttctccaactttgaccaaagaagctaaggcaagagagactcggccaccagggaaggacccagctctgctgcaggaaggggagagaacggagtcgggttgtacttttactcagaagcacaacgaccatctaacagaggacagagtcatcagggacacgctaagaagatggtgggtgaggttcctgtcctcaccttaggatggcatcagggacctgcctgagcttcaaagatcacacctgcaccaaaaagccaggttaactaagagaccttaacaccaagagggggccgaccgctcctctgagtaagcgctccttcagcgacagagctggcgcctcacgtatgcttgcggcgtaaggctacaggtgagcctggcctgagcatcagttctgttctttgcttcaagatcaccaaggtagatgaagaaagtcagcttgtggcatcctctatgcttcaaatatttcaaacaggaactcccggcaacatagggacattcacagctgcctctgaggtctctgaggagtctaggatagtcaggattgttctgtggcccccaaaatacccaaataagtggacgaaatgcccatgacgtagtcctattctctgctgcttctcctcggggcacagtctgaccccagtccaggacagggagagggaaaacgccatccccgtttcagcagcaggagaggtggttgagaaaggcctggctcagaagctccagaactgaaacaaaggaaaattggaaatgatacctgacatgcaggtgaaacctagaggagaaggccacagacgctggaagaacttggtcttgctgtctcttccactgacagaggcactagaagcttcactgaaggacccgcatgtcagttctgatggaaacacctggtgtttacaaattatctgtcaccacagactctggacccatcaacctgccgacggctgactgcacacagacgtcagacaagtcagtaaaaaaaaaaaaaaagatgatgataattaaaaaaaaaaaaaaaaaaagaagccccaggtggggcgagtccttcaaagagtggctcagttctgcaacaggtgtgacccggcccggagggagggctgcacgtgctttcttcaggtggcctccaggacggcggcttccagggccagcgcttccgcgggctcctcctcgtagtctgacaggtaagactccaggctctgcctggccagtgcctcccgccgggcctgcagccgctcgcagcgcggacagcttccagacttgaagcaggctttatggtaacacgctttacactctactcaggttgggaaggtgggggagagaagaaaacaatttgtattatctccagctagaggtcagttgctgccacagccccttctcgccaccaaggcgtggtgtcccctggggaggccccgcgaggtgctgagtggcaccgaactcttgctaacaggggtggctctggggaatcaaggagccctgtgttcaggctcacttgcccgatgcctgcacctgccctcaccttcacaggtccggcacttatggagctcaaagggaaagatgatgtcatcctcattctgacagaactcacagatgaagcctttggcttggcagagctggggaggaaaaacacagatggcaaaatgaggagcggcacatcaggaactggcacgggagggtgaacaccgaggaggggagtggtctacagggttctgctgcccacagggaggaggcctgggctggactcagaagcatgaaagctaaactaggaccagggccgggcagcgttagacaaagctttaggcagaagatcagacaggcaccagccggagaagctccgacccccagcgcggctctccatgaagagaggagaaggaggaaatggcaccacaaagggcttcctaagccgacagtcccatctgggtcatgattttatttcagaataggaaccacaagcaattaagataaaatgtggagacgaggctgttcctcaaacacagctccaagcctggagtcaggttgtagtgaaggatttccagttcctcccagacacacagggtttcctacctgtgcccagctcgaattatgggacggtcacaggaacataaactgggcataggctaagacaggaagttctaaaagtgtaatttctgcattttcaacatgttgagtagatgacgacaataacgacgtgcgtttgaggaatacataaagtatacaaaacgctgtcatacaaattaccccatcaaccctcaaaaatactgagaagaaagtaaattattctcttcatcttagagccaagaaaatcgaggcctcagaggggacaaagtatttattttggtcataatgactgagaacaacaaatgacggccgagggtagactccctctcgattccaatccagagctctcctctcacatcatgacaactgccttttttttttccactcttgtcgctcaggctggagtgcagtggcatgatctcggctcactgcaacctccgcctcctggattcaagcaattctcctgcctcagcctcccgagtagctgggattacaggcacccgccatcatgcccggctaatttctgtattttagtagagatggggtttcatcatgttcgtcaggctggtcttgaactcctgacctcaggtgacccgcccacctcggcctcccaaatt

SEQ ID NO: 1881272 - DNA, 4001 bp, Homo sapiens
gaggcggaggttgcagtgagccgagatatcacgccaccgccctccagcctgggtgacagagtgagactccgtctcaaaaaaaaaaaaaaaaaaaaaaaaaaaaagagcataatagctttcatggcacatcaagttctgggacaaaaattacactgccagctctatgtgttataaatcaaaacctactacttatcagccaaataccactttaattacagtgttctcgtattagagaaagaagattaggaagggtaggagctcaaacggtgcagaatgggaagagcttcatgctgctatcatcaaatgagcacctggccagaaaatcagagtctgaactccaccatctagtagcctaaagactggggtttgtcactttacctgtgagcttccgtgtcctcatcctcaacatgaagatgaagataacaacactgaacttggagtgtggttgtgaagctcgaatgatatcatggaaatgaaaatgacctgtgcatataaatgtataaataaaatcagtatttaaaaagtaaattaagaaataccctcacagcaaattagaaaactgtctgcctatttaatctgccctctgcaatagatttataaagtcaatcgattagacggaaaataaataaggatcaataaccaactcaagtagaaatatttaagaaagaatgcaggacccaaggaacctcaaacagcagatttcaattaggatcctccacatcaaaattataagtgcttttgttgttgtcacagatagtgcaagtctgttctcacctcatgagactctgaacccctatgggtttttatttgaggggaagttggcagcattggcactgggaagataaaccacaccaacaacagaaatacaggctgccctcgcagttactacttctggcccatctcatccagcaaaagctggtagaggaactttggtgtttttccatttccctagtattgtagtgagataattttacacatttgcaaaccttaaataatcctacacaactcctttgtgtttaaattgccctagaccttataggtgaggtttattctccctttacatattcattcccttcttcaaacaatatttactaagtgtctatatgctcccttcctccttcaaagtcccaaagaaatttaatagtatctttattttttcttgcgtcacatattaatttttctgttatgataattatgggcctttatttgtcttccctgccaagagactatacatttctaaatggagaccttaccttatccatcttttactcaagtgacaggcataataaaacaacagcagcagcaacaaaattgcgtgttatgtaaacagaaatgatacttgtgtaaaacaagtaaatgaatatatttgagataagcatatcattgtggtttgtgatgaaaactcactatgatgaaaggaaaagtgatgactttcaactcctgttagtaaactggaggtttttcagtccaataaaattaatgctgatatccaatttccaatggtttcaggatatacattttttttcaaattttatagaatgaattttgtctctatcccttgccatgaaaatcagagttgcagtaagtcaaattgaaggtagatgtgttttgttttgttttgtttttcaaacacacaaattatcaatcttttgtatcaggaactctggcagactgttacaacggtagctcctgactacaatttgtaaaggtctagcttttttcactagacagattctcctagtcagatctcaaatctgaactccagatatacttgaactgtgtttctataaccaacagtccaatgctctctcaccaaagccccattccccatcctattccaaccctactaaatgaccgttggcctttctttccagtgttcaagaaaatgaaggttacagtggagctaatacttaatcccagacacagctcatccgatgtacaataatttctctttatacaatttaagaaaatattgtatatcagatgagatgtgtctggaacataaatacaaatttactgcagaaaaattgtttatcttggttgaaaaaaattaaggttatattggtctggtaatgaaataattaaaagggctaatatttgaaaaaaactgtcagcagtatagaaatctttgaaactgaatttgttagttggtgaaaaagtaatggcaaaacctgcaattatttttgcaccaaccaaatagttagaagtgaagtaaatttttatttttctttaagagctccaaactttccagaatctttttctcttctaagtcctcgccagactctaggcttttagtaccctgctcctccaaatctagtctctgcccattccttagttccaaagctgtttccacattttcagtgaaataaactttcatagaagccattccaaatacttccagttataactctaaaataacacgtgctgttctccagctcttccacttcctcccctaagatctgagacaaataatccagtagacatatagggaaagtagattttctaagaattgatagttggatgctaacttgtttacatgggtctagttttcagaataaatgcttaaaactcatatttagtgtcaattagggcaatctctgtagtgtattgctcagaaacagcatgttcaaggcatgaaagcaggaagaaacatttaaatgatttcctgaatcctcttttaagatggttgggtcttgggtctgtagacaggtgatttacagagtcttctctcttggtccagctcctatagttagatttggtaatatggtatctgccaagatttttgaatccttctttgggtaccagtaaaaataaaagtactttattatcagtaaatatcatctgtaataaatttatggtctttagtactcagcaaaaaagaacaaagagattttataattctattcactgaacattcactgaggaccaaccacgagtcaaaggccaaatacattttcctagcttctgattttgtaaaatggtactgctatttataataatagcattcatttcattacgctcaaaacactgaagtgaaagatgcttccgttttctttaagctactattagattattttcattcagtaaaaggacgaaagtgttaacttccataccacgttaagaaataggaaaaagatatcaagatttagctcaatatgtttcttttacagataagaaaactgaagctcaaagcagcaaaacggcctagccaaagccatcaagccaatcattggctatttgggcacatttcttccttcttaaaccaataaattttttacccaaacatttctagtgcaaggcagagacatagagaatataaaatgttcttttgtctgaccaattacaggtatgtggttcttctcatagtcaaagcagaaggataaatagccaagactaatcctaactaaagaaagcaaagcatggcaccaaaaaggccccaaaccttgaggaatatatcattcaactagtttcttggtacagtccttataagaagtacctctaaaaccaatgtctagaaaatgttacaatggtaggagtcaaaataatcccaattacggaaaataggtttctatctctaaaatatatactgcaaaaccaccccaaaccccacactcacctcctttcccctttgcctgcccatatctccgtatctctctctcttttttttttttttgcttgttttgagatggagtctcgctctgttgcccaggctggagcacagcggcacgatctcagctcactgcaacctctgcctcctgggttcaagcaattatcctgcctcggcttcccgagtagctgggactacaggcgcccaccacctagcccagctaatttttgtatttttagtagagaaagggtttcatcatatcagccaggctggtcttgaactccagacctcaggtgatccaccagcctcggcctcccaaagtgctgggattacaggcatgagccattgcacctggcccccatatctcttatctaaaatattgcaacacctttcc

SEQ ID NO: 1881273 - DNA, 4001 bp, Homo sapiens
gttttatatgtatatataaaactagaaatatatatatctaactagaaatagatatacctataactagaaaaaatatatatacatatatatctttgagacggagtctcactctgtcgcccaagctggagtgcagtggcgcgatctcggctcattgcaacctctgcctcctgggttcaagcgattctcctgcctcagcctcccgagtagctgggattgcaggtgtccaccaccatacctggctaatttttgtatttttagtagagatggggttttgacacgttggcctggctggtttcaaactcccggcctcaagtgatccgcccgccgcggcctcccaaagtgctgggattacaggtgtgagccactgcactgggcctagttatattttaactgaggtatctctgaacacctacctctgcacctctataacctcagtaaatcaagagttgactatttaagagaagatgaagaatgccaagcagtagtgaggaagtagcttcagttcactaataagctctctctagccttctattctctgggtaacctcagggataaaagaactatctgcttctataatacgtgggtcttaccttttgctatgtccaggaaagtatctgatgtatttgttgtcatgcaaggacaagtaacgaatagtatctgtaaaaagacaaacaaggtatgatgatatcatactatttaaaagaaatttactttacattttcatcttaaaaagacaaggtcaaataatccattgtattctatatcccaagcaaggcatgaataaataatggtgaataattctactctgcagctgaagagtgggtatgtagatttcacctaactcaaaagcagagttcttaagttgacagcatagaaagcaatgtttgaaatgaccttttattaccaatttggtttcttcataattacaatgcaactcccaccctgcaaatataccctggtcaaaaaacaaaaacaagtaaagcacacataataattttagatactggtctagtgtccacagaatggcaaaccttaaagaaaaatatgtggctgttgagctaacagacttaaagaggtgagcagccatggcagttaaactgaagatcaggttgaaccctggcagcaatttttgtctagagttctccatcagtatgttgacccaccctcaactcatttgaacattcttcaattggacacacaaattacaatgaaaataaacaaaacgtcagagaagtgatgtcaagatctgggttaaaaagatcttaagacattaaaaaaatcaaattcttataccaatgagtaatagcagtgagattttgacaatattaaagaaaggaacaatcagagatttgtgcttgtggaaaaataagacactcttaaccaaatgattctatctgaaagagtaaacaaacaaaaaacatggtggcggtagagaaatgaagtgccataaagaataaaactgcaaaatagaaaagtattatccccttaaaaagactaggaataaggaaaaattgttgagaaacagctaagggaaaatggtaccaaaatgcagaaagaaaaccatagaaagaacattctgaaggcaaacagaacataggaataaaggggttgaaagcatcgagtcatcccaggggttcacaggggtgctttctaataagagggcatttaacttgggagggggaataggggaatagggatatttgtatattccataacttgaacactacacaattttccttgaaaacatcttcaaacttcttgaatgacaactacgaagtatttctagttattctactgctaacaatgactcacctgccctaagaagaaaaagacttcctccccattacctggtttcccagagatgagcagggtgacgccatcctctcagccccacttggcagctggcgcgctgttcctggcaaggcagtggcctgtacagttatctcctgtaccgggtggtatcatagaccctcaaactgtacaaactactacctcagcctggaatcaggcaaaaggaaacggagcgctggaggaactcttcaggatgcacttgagacaggaaagggaacatcctcacagcagaggcttggcagcaaagctacaagtgccacacatttgcctcatcttgcaccacatttggagaatcctcatttaatcactcagaaaaacatcccaacagaagaaataaaccagtcattcggatgatcacatagacatgtttcctcaggatcctaaggttttacattcttttccaaaatcattaactacactgcttccttagaaaaccacttctgaaatacaggcatgaaaagtagaaatgacatacttaactaaaaatcaatacaggcagaagagtctcattaaaaaaaaaaaaaaatggaaaaaaggacttccgcccattctgctctgagataggcacagccaaaatagcagtataagctatccttgtggaatgacattagaaaaatcttttttgtttttttgagatggagcctcgctctgtcacccaggttggagtgcagtggtgtgatcaccctagacctccagggctcaagcaatcctcccacctcagccttacaagtggctgggactacaggcgcgtcccatcacacctggctaatttttgtattttttgtagagacggggttttcccaagttgcccaggctaatctcgaacttctgtgctcaagtgatccactctcctaggcctccctaagtgctgggattacaggcatgagccactatgtagccaccggcctaaaaaaaaccttactgcaaaatgtgagatgatcatcaataatccactgaaataagtttaaaaacagaatcctggccgggcgtggtggttcacacctgtaatcccagcactttgggaggatgaggcaggcagatcacttgaggtcaggagttcgagaccagcctgactaacatggtgaagtcccaactctactaaaaatacaaaaattagccgggcgtgttggtgggcacctgtaataccagctacttgggaggctgaggcaagagcatcgcttgaacccaggaggctgagattgcagtgagccgagattgcaccattgcactccagcctgggcaacaagagcaggactctgtctcaaaagaataaagaataggccgggcacggtggcttacaaggtcaggagatcaagacccatcctggctaacatggtgaaaccctgtctctactaaaaatacaaaaaattagccaggcatggtggcatgcacctgtagtcccagctacctgggaggctgaggcaggagaattacttgaacccgggaggcggaggttgcagcgagctgagatcgcgccactgcactccagcctaggcaacagagtgagactctgtctcaaaaaataaaaacagacaaacaaaagaaaataaacaaaattaaaaaattaaagaattctaacatgaaaataagtgttacagttcagttaccaagacaatctgttaacttaggatttatctcgagacatgcaggcaaaaacagagattgtttattatagaaagaaactcacaagttcaatttctaaaagtaactctactctttagatcaaaaaacgttcctggaatcagaagtgactaaggttgggaaaacaccaaaactgttctaacttcccttaaactatcatagttcaagcatttgtgaaacttttctcaaatctctatcattttaaaagaaaaagtcctgttgtttatcacttgctgtgtatcaagtgttctttccttttatttgttctaaaagtgttctttttggagatggagtctcactctgtcgcccaggctggagtgcaatggcgtgatcttggctcaccacaacctctgcctcccgggttcaagagattctcctgcctcagcctcctgtgtagctgggattataggcgtgcaccactgtgcccagctaacttctgtatttttagtagagacaaggtttcaccatatcggccaggctggtcttgaactcctgacctcagtgatccg

SEQ ID NO: 1881274 - DNA, 4001 bp, Homo sapiens; identical to SEQ ID NO: 315963

SEQ ID NO: 1881275 - DNA, 4001 bp, Homo sapiens
ttgggaggctgaggcaggagaatggccggaacccaggaggcagagcttgcagtgagttgagattacgccactgcactccagcctgggggacagagcaaggctctgtctcaaaaaaaaaaaaaaaaaaaaaaaaaagaaaaaaaatttacctctataaataaaaatatttattcccataggctcttggacttttaatttagtgacccttgatttttatgtaaaattgcaataaaatatttcaatagaatataaacttatacttactctataagaagaaaagacaatttactgaaacaggacaaaaagagaaaaaataaattaaaaaaagttgagagtgtataagatattttacagtattctgtgaatcacaagaagttttacctattaaattatctccagaattaaacataagaatcttataagtgctatagatttataagattataagtgctatagggtttatgagattcaatttgttacaaatgattttctgatgaaatatttgaagaaatattatttcagataaatttaagaaaatgtggtaattaaacattcattgcataaactttcttataatagtcagttttacgaagttacattttgaacaaaattccacatctaaagcaataattaaataaaacatattaaatacttaatgatttaaaataaaaattaaccatgaatattcattcttaaataatttatattctaagatatttgctgtgttcatattatttcatatgtccagggaatctagatgcaaagtaatttcttgctttcacagggattgaaaaaataaatctgataacatagaggagcttctttaaggtaattatgagaaatcaaaattgaaatgtaaagtaagaaagactgatattaacattcggatactttttgtaaataatcctgttactcaatctttagttcctctttcttctcctcctttttcttctttacttggcataactttttaatttatgaattagaaaaaaaaattacactttttatgacaatgtaaacaatttaatctccataattggtaaattaactgaaataaaaccaaaagatatttttagatgctacaggaaatacagacatctatctactgtttaaaaggtattctgcattgtaaccaaaaaatttatttttgttttccgaactttacagtttgtttggctcaaaaatgcacaattttggggggaaaaggaaaagtaagttgaaaacaaatgacagtgtcactaatcaaagtaaaatatatttaaaatctggaagtacatacaattttttataaaaatgaaattccttaaaaggcttgatatttattcaggctttatgcatcagcaggtacctgtaagaaaaactctattagggtagtgatgacaaacaggtatatacttatgtacttacataatatccaggaaattggagttgttccaccacaatgaagaaatgaattttcagaaggtttcttgaatgagaaggaagagagcaagcaattccatccaagtgagcttgcttcatccacgattgggtgaggggagagggaaaagcctatttgtagtttgagaatagattagaataaatacttttcttgaatgtcacaaaaagctaactgagatggttttccagtttccaagactataaaatgtatagaccaatccatggtaaaacatggctactgaactcagaggaaatgaaaaacatgacacatctgaccataattattgaaaggtgagatactctaatagtaacatcagacgaggtaaataaaagaggacagcaagactgctgttcctcaatgaaatatttccaaatgtttcttaagacccagtgaatatttcagagatagcatttctggacacatgagtctcattaaaagcagaagacataaacatgatagctgtaactttcatcgctggattagtctatgggttgagccaaaagcatcatcatgaaaactgtcattaaagatgtactatcatgacttacatcaaagacatatgttctttccaaacaaatgaagtatccccacatgaatgggaggagagtttttacaaaataactctgtcattccttggcatttttcttaaattatgagtaaaattgcaccttacagtcgattgcattaatgctatgaaactgaatgttttaggatatataacaaaaaaattactggtaattgctcatcgctgaggcttccccaaatgtagaaaagttgtggagctctttttcaagatattttaaatcccctcccacacttagaataaagagaggcacttatccaacatccagatctcttcttggcacacatattggaataaaacatcagggttgaattgggctttgatgaataatggcatggttcttcaaagggagtgaaacaaaaaaggcatttgacatcattcatcaaagaaggctcaaaatggcacagatcaaaagcaactgtggttccaaacatctctagatagttcttcagaaatgggagaagcctcctggatttccttgattagtttttcatctagcattccaattaaaattaaaagtgtcaagtcacaattatgttcacttccgtatgtgttcccattcaagatttaaatgacgaaaaaaaaagttggaatcaaagtttttgcaggcacttcagaccacattgagttaggtgaaggtcctttttctaaaagaagatcatggagattttttcaacagcaggagtgacagagacactactcttaagaatcttcaccctattcttcaagagaaatggaagattttttgagatttcagtgtcagctttttcattattcataaattattcactaaacacttgcttttgaatgtttctttcagacagaaatctcttatatgatctggatgctttttcatctccagcaagattttttctgatttaattggaaccttactcttttaaaataaattatcacaattgactagatgtcattacttatgacataatgatattccatacactgcgcatgtcaacaatgtttttaatcaaatatacatatttcattattacattaattgaattttttcattctgttcttataactgagaatagaacattatacttttgaatgtgtagaaccatcgattactacatcctttggtacttcaaattatccacttcagtaaggcatggtggcacacacctgtagttccagctactccagaggctgaggtgggaggattacttgaacccagcagtttgagaccaatctgggaaatataacaagacctagtctctaaagtaataatgaaaaaagaataagaaaatgcccagatcacagacctttggtcttcacacaatgtataaacagatagactagcatattgcttcatagattttggctaaaagaaaataccacttgctatgccatttggtaagacttactggcttttatcagcattttacaatataccttctgagtttccgggctcctttcttcaaatgcattcaaatgaccagtctctgccaaccatgaggaatattgagcacactagtgttttgaacttttccattctccagcagacttacttcttcctctgatgtaaaatggtctatattctcttcaactattgctatattaaatttctggcaccttttgtgttttgtttgttttatgtcagtaaataccacagaggttccataacggtaattgtcattgaaaataattttttaactgcatccatgttggtagcctcttgtctactttatttagcctcataggaatatagcgtattttgcccataacaattattattgtgatttgaagagaacaacaataagacccacatttttctcacgttattgatcattgctggcctttcaccctaatctaagctttgaagactggcatgcatcgtggcagcatcatgctaagaatgctatgtctccatagactcaactgctctgcattccgctcctcatcaaagaagctcttcatgacaatcaccaccggcacaggtccaggtccatgtgtgtg

SEQ ID NO: 1881276 - DNA, 4001 bp, Homo sapiens
gttggggggggggtgggtgttttgttttgttttgttttgactatagctctcagatcttagccaaactattcttgaaaaaccctaccctctgaattttgggggagatttggagtaataactccatctccaagacctatctcatgtcaattaaattctttattgcaatgccatggtctctatgaattgattttgtctgtgcagtgggaaggaagaacgtattgggtgattacagtgtcatggatttaaataccaccaccaccctcagaactctgagaaaagataatacctcaaacagctctgagctgtctgagctatgtgaagtatgcaaaaatttatcaggcccagagacaagagtttgcctgggggcaactgtttagacattttgttcctgactagcagcctcacccattatcttcatgttcctggaatctgtgatacaaagaatagtttatagccaatcaatagctaatgtaattttaatgtaaattcttagtaaacaacttagaagctgcctctttttcctttaaaaacccactcataaccgctgctaatcagagtgtatatttagggtaacttgaatctatgctcccaggtagccatcttcaacctttatgcttgaataaacttcctttaaactagattcttaccttttttattattttaggttgacaactctcaaatttatatctctagcccattggacttccttcccgaacctcagggtctaaatttaattgtctatccagcctctccacttggatgtttaataaggatttcaaattcaacatataaaaaacaaaattcccgacttccgccttaaaaatggtttcttacaagttgctcaaaacgcctttgacctcacactccaaaactaacatatccacaaatcttataattctacttctaaaatacgcacagaattcattgttgttttcatcacctcgatttccaccactctggcccacaccactatcaccatggctggattattgtaataacttcctgataccacttttcaccaactaatacgagcattttcgtctggttccctcaggggtccttaagccccaggctgcggatagaaccaatccctggcctgttaggaaccaggaggcacagcaggaggtgagcagcaagcaagggagcattacctcctgagctccgcctccctcagatcagcggtggcatcagattctcataggagcggggaacctattgtgaactgcgcattggagggatctaagttgtgtgctccttatgagaatctaatgataaatgtaatgcctttgaatcatcctgaaaccatcatccacccccccaccacgaaaccggtccctgttgaccaaaaggttgggggccgctgctctatataatccctgggagactgacgactttgtctctttcacttagtgccatgaactccagggcaactttgtggacgctccataaacacttgctggaatgaacccataaatattttatactaccacatatacagtaatacatttaaggagctgcttgggtgtgtaaaaaattgcaggggacgtttacaaataaagaacctcctgaaacaaagcaatgaatggaaagtgggatcagctggttgaagcaatgcccacaagctgctccagcttcccaaagcagagaggttttccacctaagccaacatccttttatttttagtcactatagctataaatctactcccttaccccgcacctcactctcagccgacagcccaatgggcttatcctcctctcgccctcacgatgagcgagtccacgcggtctcaggctggaagatgcacttgaacaccagccaagcactcacggacgacactggattctaggccgcctgggcttctccactgtactaggaatgtaaaatcaaaagtcagaaagaaaacttcggaggtggaatctccaacccggcaacgggttaggaagcaaagcgcacctaccaaagggctggtccctgcagcctcaagggctgatgggaagtgaatccaccgtcaaccgccctgatccaaaatggcaggataccggagcaatagtgttcaggtgtgaagatagggcaattgaagaagggagaacgaaagcataattgttttgattcaacatggaagcagtgattataggagggcgaatagcgagggacgacgcaacatccagctggcagaagcagcgggcctggagagggtggctacattgaactaatccaagatggcgccgaggttgtaaccgggagcgcccaagaggcgggaattaccctgatccaagatggcagtggcaactgaggcaagccgaaagacgggagcgccaggagcgtctttgccctcagccaagatggcggctgccgtggaccctgtcccggctccgccccgcggccctggccccgcctgcccctcgtcccttcctccgccccctctcctcgcgtagtccggcccgagccgctcgcgctaggagagcgggcttcgggcacttgacatggcggcagtggcggcgactgcagcagcgaaggggaatgggggcggcggtggcagggccggggccggggacgccagcggcacgcggaagaagaagggcccggggcccctggccacggcgtacctggtcatctacaatgtggtgatgacagccgggtgaggctggggctcggggaggcggggagccagcgcggccggggagggagccctgcggccagcggcggggcggataggatcggcgcggcccgccgcaggcagtgcattcccggcggggggtgcccgggacccggtacctgggcgctgagggcggccgagcgctgaatcggccccggtggctgcccgcgagctccctcctgcgctgggggtcgagccaagttcccaggcactggggcgcggggacggctgccgggcgctggctcgcgagggccgcgggaggaaaggtggggctggccacaggtgcggggccgggggcagcggccggactacctgcggcgcggagcccgtcctgggcggccagattcggatgttgaacggcgccagcatggggagtggaggagctgtggctgcagagtgaccattcatttgggcggctgttttcaaaatctgggctgcgctttaatctgaaaggtattgggaaagcgttcaaagtttttggccagcgacatgagcagagctaggctttagatgagtttagacttttaggatgggttggggtggggaagaaactggggagtagaaggcagagttactggaaagggggagaatggaccctcgaaacggttttacccatcttctgtctctttcatttcagtgcatcccttatcccggcgggtttttagttcaagctctgccactaactagctgtgtgactttggataaatcatcttatttctctagcctccgttttttcatttgtaaaactaaagggttggtctgggtgatgaaggttccttcagctctgcaattctttatcttgtcattttggtgaggaggatcacagcatcagacagttatatatttttaagttatcttcatttgtaattttttaagaagtcctaacattttattatgaaaaatttcaaacatacagaagagttgaaagaattgtatagtgaacatccatttttatttaaagtaggtgatacattgttagggttaaaaatgaaaaacatgagggaatacagtgaaaatctttcctcccacctttcccttctacccagctcccctccctcgaggcagttaattttgtgtatccttaagatgctgatgcaagcaaatatgtttatacatccccctatccctttttaaaataagacaaatgccaatatattaatatttttacagttcagcaccttgcttttttttcacgaagaagaaaatatatcgtgggaggatcatatatgtattgctagtattagaaatggtaggtgttggaacctaggctcagagaagttgtgacttgcatgagatcatagaacttgttagtagaagttccagatctagaaatcatttctct

SEQ ID NO: 1881277 - DNA, 4001 bp, Homo sapiens
cacaccatgtagagcccgtgtcctcattctggactttacaattggtttcctgatcacagagctgagctctatggaacatgatgaatgggagagaggtggaaaagaaagtcttttttataaaaacacaatggcagcacgaattaattgttaatagccgaaaggtaagctgaactcatctaatactgtgtacttctccttggagatcgtgcgtatatgtgctataggggctctgagtctaaggaagcggacttgatgtgtccaagtttatgctcaattcagagggggcatgggacacattttgaggttctgcacagtggatgctgtggctgatgactcctgtgtgggagtctctcctcacccaggctgtcacccacccagatcacagtcctgcttctttctatacaggtgctgcactgtaaagtatagcgtttctgaaaacatgatccttgaagcccacgtctaacacccctctgctcgtttgggactcacactggttcccgagctagtgaaggaggttatcggctttcggagcctctttaggtcctgtttacatggctagctgaaggcaggagagcaattcattctccctatctgtaaaatgtcagcaccttttctagatttgttttcaagatgaaatttccttttcccctactgaatacacttggggattttttttttaaggtttggggaattcattctgcaacttaaaaggctttgtttgcccagagtctgctggcagattcccttgtcctctccactaatcttgatgaccatcattatttatccctaattccttcaaatgcagagttaggcctccagctgcaaattgggagctgggtcttggaagaagagctagaaaagtgataggagggagcccagctgagataacaggactgactctcagtccattgggtttggttttgttgacagaaaggataagggtggcctcttccccctgcttttctttccctgttgctatacttacagatatattagcatcctgtttgcccacatttagctttattttttcatcaagagcctctctaggaaagtagtaaaggactgttgtcactttgacagctcccctgtcgcctttctatcgtctggtgctccaccccactggctaggctacatctcctgccctcattctgtcccctcatcccctcagctctccctactccccaaggcatcatacttgacttggggatcccagtgggtttgtgcctcccctgaaattacaggcaaaatgttgcattatgtgggttggagcatctttctgaagagaggggtccatagtttttagtcaaattctcaaaaggagtcatgaatcagaatacgttgaagaactacttgccgtaagcagcaacaatgactgaattttcaagcccagccattgtgtgggctcttccagcctgtctccagctgcaactgcccacccaacctctgcatagaaccaggccttcatccctcttatggggcaatgaggtccatctccactaggcgatgggactacagctggtgctgacttcagactggcttccccagccactcagcagggctggcctggcccctgaaagtcgctatcattcactcatcctgtgccaaacaccatcgagaccatacatctgaggccaacatatctttcaaaatctcataaaaatgaggcaaatggggctaaaatagcattacccacactactgattccctcatatcataaagataagggatgtaacctttataacacagcacagctggctattttaatcatgtgtttgggtctttttcctaagaaaaggggtgtttatgaacttgcttgattatggtcatatcacccttccttctgaactcagcagaagacaagggttaacttgtgccacatagaagggagctaaaacctagagtaaacgtggacttgcccgaaaactcacccaggaggagaacaagctgaccttcaatgcctgtcctggccagagactcttgtgcactttgcattttcagtctatgcaacagttgggcagggtgtctttctcagtgagcaaactgaggctcaccaagggtcagctgccttccaggccccacagacagtaggtgtagatctggtgttggggctccaccctgcacagtgaattacaacatgaaatatcctggcaggactcagtggtctggctctgaaacctgttcctttccacagcctgacacagcctccccgggcagtgaattaccatggtggggcccgctcccagagtgatccagacctccctgagtaacagtcctccctgtggggaggtccttctgcacgtgggactcagtaacccctttcctctcattccaacccagatgagcagtgaggaaactaagtccttcctaggccagaatcccatgagaggactcaaaaaacaccttagcccctcactggctcatccagtcattctcaactcaggcctcctgtccccagccaccctggccagggcatccagcttttggtaccagtgagaccagggctttgtgaccacagagggtcatgcatgattgtgatgggaagggacactccagtgggtactcatgccatcactcagtcattcaactaatatctgagtgcccactctgtgccaggcactgccataggagctggttttaaaacagtaaatgaagtaggaaaagttccagcttttgggacttttctagtgggaaagaggcagtaatgcaggtgaacagctgtgtcatatcctcaggtaatgtcaccagctatgaagaaagcaaagcagggtaatgggggagagaataccatttttggagggggtggtcactgaggcccctctgaggaaggaacatttgaacagagactgaaggaagcagggaaggaagagggacaaggtgacaacaagagcatagccctgagctgaggacactgtgcttaaggcgtttcaggaggcaggaggccagggtggtggagccatgagcaaggggcaggatggtaggaagtgaggttgaggaggaccgtggaccagatccaggcagtgttggctaggacaaaaaaaatgagattttattctaagtgttatgggccaacactggacatttatgaaggatcactcatgtccatgtgatgaccagacccaggatgagtcagagggaaagcagggagcacaatggggggttgccacaatagggacaggaagtgatcagattcataacctctttggctgtagagctgatatgagttgctggtgagctgggtatggagagagagagaagttaaagatgactcagttttcatgggggagtgaagaccaatggtggggctggggggcacgatcaagagtttagtgcatgtgaagtttaagattgctatttgacctctcaagcggtcctgtcacataggcaggtgtttaggtgaacctggagttgagggggaggtcagagttggaggtgggatacagggagccatccacacacagaggccattcactgccctggggttgaatgaggtccctggagagtacagaggtggctataagaagagggagagagagagaggcaggggcaggacaggggcctgcgaagaagactaagaaggaagtactccagtgagatgggaagaaacccaggagatgggggtgtcccagaaaccaaatgctaagaacttcaaaaaggaaggaatgatcaagattagtgtgccaggccaggtgtggtggctcacacctgtaataccaacactttgagaagcaggtgaattgcttgagccaggagttcaatatcagcctgggctacatggtgaaaccctgtctctacaaaaaatacaaaagttgcctggatgctgtggggcatgcctgtagtcccagctactcaggaggatgagccaggaggacagcttgagcatgggaggttgaggctacagtgagccaagattgtaccacggtactccagcctgtgggacagagggagaccctgtcaaaaaaaaagaagaaaggaagaaaaggaagaaagggaaggaaggaagg

SEQ ID NO: 1881278 - DNA, 4001 bp, Homo sapiens; identical to SEQ ID NO: 315989

SEQ ID NO: 1881279 - DNA, 4001 bp, Homo sapiens; identical to SEQ ID NO: 315992

SEQ ID NO: 1881280 - DNA, 4001 bp, Homo sapiens
atgtttgacttatatgaatgttaagaaatacattgttatttcagacttccatttcattacctatattcattttaaaagaaaaagttaaacaaaaattttttaaatccttattttttaaaaatacctggcttattcctactactcccttatgagatgtctataaagagtatacagagcctaacaacatagtaaagtagatataagtagttataagcctgactcattggtttgtttgcagaaaaaaaaaataattctaaataatttttttaaggaactcaattagctgttagttaaaaaataccctgtggttgtgtgatctggacctatatagatctatgctgctcaatgtggtagccactagcaatgtgtggctactgataatatgaaatgtagttagtgaaaattaagatgttaagtataaagtgtgcatttgattttaagacatactaccgaaaagtaaaaataaagtgaaaatataacattaataatttttatattgattcatgttgaaattataatattcagcaaataataaaatgacttcattgatttcttttttatgtagtttaatgtactactagaaaatgtaaaattatacatgcaacttaccttatagttctactttatagtgtttctgtagatgttcccaaatatcccacatttttcttatagatgatataccccattgacttgagttgactcaaagtaggatgtttggcttatgacatatctaagatatgatcagaaagtagtaaggcctttttttttttttttttagaaattctccattaccccaactgtggttggtgatgttgttacaggtatctgtgatagtggatggcaaatatagaagcgggaagatgtaaaaaggaaaagtaaatatgggagtccataggagtgagtgtctgagacattaagtaaaacaaaacaaaacaaaattcaaacataaaatatttgttgaatgtaaattcgttcatctgtcatacttaatatagaaagggaatattttctttatccttgaataatattattttcagatgaaattacttgtaataatagtagttattactcaaaattcaccttatagctactaaacttctgcaactataatctgatttctctaaagcctcattaaaacaaacaaatgaacaaacaaactgctatttgcttcattcataaattcattaattcagcaaacatttatgtgcctattctattctaggcattatgcttgaaactagatgatcaaaaggtaaagtacttcctctttcaagtctcattagatgtttccttagcattcttttgccaatttgcgaagtctgttcgcctgaattcatctaagtctgtgatcatggatgaaattgctttgggcaccccatcagaaagaatcactgaaccctaaccccaatgtgttatcatatacagataccacaagagtcaacggagaagcaataatgtgttaacatcacaggagtcctcctgggctagaagagttgtagcagtggttaggcaggacactgccacacttgtagtattagtggaaaatagcaaataaattctattaatagaattgagtcataaagtattttaactgagccagctacaggagctttctgtcttttttcatccctttatgtcttaccgtctgtatccttttctccctcacttccgtctaagagtaaaagcgattttttccaaagctaagttggtcacctctattcttgcctccttcttctcctaccttatggccttgctctgtcaattttcagaactcttctcaccttcatttctacacattatcaatcgttttggttgctgcagtgatttctgccctctgatttgaaaacatacttccaaggcctatgttaaaacaaatcagacattctcccctcaactctttcatattactgtcctctcctccatttgacatacctccccagtagcctgttcccttgctgtctttcatcctgtgtcgctcattcattctttcaacctgtaacattggctctccttcccccatccaacattctaattctcttattgttcttacattctaattctcttattgttccaacaactgccattcagaaaacagagtctttttttccccccagtgcttatttgtttggacctctctgaccaattcttttatggaaactatcgagtcccattcttagtaaagtgaatacaacttaaaatctgtcttcaactgcttaattttattttagcagatttcccctttcatttacctgttgcagtccctttacattaagaaacagttatcccaaagtctgcatctcgaagactggactctgatcccaattttgcttaataaaaattcttcaagaaattttgtagaaagtctgtcaatgattaaatctcaattcatgatttttttccctctatcaaaaggggcagacatttaacagagatacagtggataagaagggaatagagtcggagtttatgaggcacatatctgaaggttatattctttatttttatatttttgcttttggaacaatgtctttattatgctcagaaaatacctgctggttcaaccctaaattgttacattaaaagagatacagatttaaatgtttagggtgggtggatgagtgcttaatatctataataaactgactacattgttagaaaacattctcaggcaactatctcatactatctaacttgactttgaaagggaaccagtgtcatggagtaaggaggaaaatttatttgccgtcttctgattgatgaagctgtgaatttttgtcagtttggggattgctacactctggcaagttggaaaaggtctattttgttgtttctttcagaagctttttttctgtcatctgtgagtttcaaatttagctcctgttggaatattgttttaaaataaatccaaaagcagttaagatattgaaattaaaaccctttcgataatgtacttttctaaatcctgactctactactcaagggctatgtgatgttaagctaacctctctgtgccccgtttccttctctataaaatggaaataataatagtacctatgacattaagttattttgaggattatatgcattaaaatatgcaaaatgcttggaatatggggaagcctatactaaatgttcaagtattagcagttattacttttatcactgttaatttatgcaatcaaatttatttagtatctactgtttggaaacctggagaaatacacaatgaacgagaaactcgtgttcttcaagagctttgccaagaagagataagtatctgtcagagttacaagggtatgtgactagtgctatgataaaaccatcagcctctgtggttgcagtcagaataaatcaacaaactctgcctagggttgttggcaaaacatgagttgttggactctgaactgtgttaaattagtactgtagtttatccagaccacaaaagtctttcatcagtatctctgagagtcagtagctggatctcctcccatactccaagtcagaaaatgtagaactttttctcaatgtggaactttttctcaataatttaccgtgatcctttaaaaattacaaagaatttgcttctctcaacctactgatgaacttcaagacacattttctctaatagttaaaatacgtttagcataatgttttcatacgcagtctgtgtgtctgtgtgtataccactactattggctgtctgattattctgacctgcatacaccttttaaaataatctttcttctttgtgactaacatatgtctggctagaaaaccaacaccttcctatctaaagcaatataaaatctaaagttatttggtggggttgaattactagggatgtggaggaagggagttgttccctgtgaagcacagtccagagtgccagatagatttttcctggtttgaccataagaatatatacagaaaaaaagtagcactaggaaagtagagtagttacagaaaagggaatgggtggcattttcaattagttaatggcg

SEQ ID NO: 1881281 - DNA, 4001 bp, Homo sapiens
cctgactaatatttgtattttcagtagagacgggatttcaccatgttgaccgggctggtcttgaactcctagcctcaagtgatccattcccctcagcctcccaaaatgctgagattacaggtgtgagccacagcacctgaccaaaatttattttatatataagtaggagaagtacactctaaaatagcaaaaatatacatagtatagtaaatacacaaaccactaatatagttgattattatcaagtgtgtacataattgcatgtgctatacttttatacaattggcagggcagtaagtttgttgacagcagcatcaccacaaacatgtaagtaatatgttgcactacaacgttaggacactctgatgtcacttgctgataggaaaatttcagctccgttataatcttacgtgaccgctgttgtgtacgggatcattccttgaccaaaatgacctgtgcggagccacgactttgtctgtatgacgctagtttactttcagatacacactctcaggtaaacactccttatcttcctaaaaattcctgtataagtaggatggtcactgctgtatggtaagtaactgcttctcagggagtttgaatgtcttatccaatgttgtacatttatttttcagagagctagtgctgttattccaaacctagggctctttatgatcctcgcagtttgtttatttatttgtgtttatgaataaatatttaagatagcttctctcagtattagcaccattgtgccttcaatcatggttctttactaccaaacaaatatgttttcagattactttcacatggttcagaatgagagagatacacagagaaagataaaggaaatgtaagaaaattaataactggtgaagtcaggtaataaatatgtgagaatttatcatactatatttttcatttctattaaaatccttaaaataaaaattttcaaaataaataaatgtggggggaaaagcagccaggattcccaacaactgcctgaaaatgcctctaaccattttagcattaatttagcttatttgcttcccccatgggagctgattgagtggttacaatacatgctttcaatttggacaagatttctcatttatgtggagagtgtttcagtccacttctgcccttagtcaatcaagcatactaatcagaggattcagactcaccaatttagctgtccaaagcccaacttgacttaaggggtgaaaaatatcacttgatattctccctgcagagtatggtaaaaatcaactagtaggttggatatggtcattacggttaaatcactcttcatccaaactgactgattttttatatttttatcagattactgacagccagggagacatagcctcaggcacctaaacaaaagaatgctgaatgtgaattgctgttgaatttgttcccaaccagagtgctggtgaaaccacagggcaattgtatatcggagctcatttattatgagcaaagagttctcattaacttctccgggaaaatgttgccattaaatcttatcttgaatgagaagaatttgtaacttgaaaatgtttatgaatatttcataagaatcgtcttagggtgcgtgcttgtgtgtgatagcctggcaaaggttgacagatatgtggaatactgtaatgacttgatggatgcatatggaatgtttaatggaaaaagtgaaaagtgcctgctgggcctctgtaaacctcttccagtatagtactgattttactgtgctgtcaacaaaatcctcacaaaaagaaatagtttgtgagtaaatgaattgaaaatgacaggattattttattgcactaaataggcctataagaaatatgtttgggattaagggttagtttttcattctgtatttatttttattaaaacacattttaaaaattcatatatgtataaaggagttcttaatgaataggcatgcacatttacttactgctttgatgtctcaaaatccctgaggaatttcaccaagtttcacagtaacagggggatatgagtagtttggcaatagagcagcaaagtctatgagaatcataaggatatcaaagaagaaaacaaaagttactgatttaatcttagagaaagaaaaagatatacaaaagtggaaaaataattttttcccaagcattgtttattggtagattatcaagtttggtttggtttgctctattttaaaatgatagaataaatttagaaatagatttaaaaaaaattgatggattaggaaaacgtgaattatttaattgagagtttttaaatctgttacaaaaaaagcctgagaagaaagtcaagcacagtcttcatgcacatgaaagagtatttgtgggttataaaattaggaccttttccaatttttgcaaaagttaaagctataaaataggcacttaggccggtgtggtggctcacatctgtaatcccagcactttggcaggccgaggtgggtggatcacctgaggtcaggagctcgagaccagcctggccaagatggtgaaaccccatttctactaaaaatacaaaaattcgccgggtgtggtggcgcacgcctgtaatcccagctactcaggaggctgagacagggcaatcatttgaacaaggggggaggcagaggttgcagtgagccgaggtcgtgccactgcactcctgcctgggtgacagagtgagacttcgtctcaaagtaaattaaattaaattaaaaagccgccacttaaattgtgcaaagtatattaagattacccataaataatcttataaaataagactgattaaatactggaaaaacttccaaagatggctgtccctgtctgtttttagaaattctagaatatctaatgaattatataatatttcctgattccttttaaaattaattaggtatatttagtatatgttgcatactagccatccacccttctctttagatcacgttagcccctggtaagaagaaaacttccaaacaaaaagtaagaagcccagaacgttaccacatattagtgatggttttgtgacctaagagactaaggagtttgtcatttttagacatcgatggactaattcaattcattccagtaagagagaagatgttagacattttcatttaacttatggcaaattctatactttttaaaaaatctgctccagaaatgcatctgtctaacaagcatctttatttaaaagaaacaaagaaaattttgttggtattttgttaagaaaatgagtttatcatattaaactcccaagaaaattatgtgaagtgagtattattctttattttaaaaatgaggactgtgtaggtctcaaggaatctttgtgacagagttaagattaattggtttagtggaactgattaccatagaccctgatttctgttaatagccatgtttatcatcttaatgtgaaatttgctttaagcaatttattcaatcacacaaatgtatgatgcattgaaccggctacatttgacatcagataaatattgaggtttgagaggctcacttatgctataatatgtcaccccaggtacagccctctctatcccacaaaatagtttaaattattattttttaatgtagacaataaatttgaaaagatttgaaaatcatataatatacttcccatttctcatatcaaatgagataattctgggtctacaaaaacctgaagctgtaggttatttaatctgttatcttgggttatttatctgacttaaggtaaggaacctgatattttacttttaagtataaccttttctaatagaagggaaaatcaaagattaaaatagttgtagcaaaaataaatataattatggcaatatagcaataacatattaatggcaataataacatgcagataaactacaaatcaagataaaaggaacaaaatccgatttatatttaatcttgagtatttttcattgatgtactaaatatttagtccatttaaaatcaagtttatgtaattttagagtcctatttaat

SEQ ID NO: 1881282 - DNA, 4001 bp, Homo sapiens
ttacaggtgtccctttcgtagtagccacttcataaatattcatcaaatgtatggtcagtgaggtatgtgctggtagagcatctgtgcagaggtgcagacagaaagacagatgccaaaatgagaggcacagtacacaaaactgcttttagattttaatcaaaatctcctgcccaattttgattaaaactaaaattcttaggttttagaataacagcatctgtgtcagtttttcttgctaagattctatcaatgtctttgaaaggtcccatattttaccgagctacccagctaacaagttagcttgccatagtttcttggatagttgcaggagacatgagacccctgggtcaaagatgacagagagtttatcacagaagagcaagcagcgtaagaatcatgtttgcaatactgttttgatccccatttccaacaagtgatgaaaagaggctagttggaccctgaacatgcagtggttttataacaggagaggaaacttgtgcttaaggatccccaattttttttatgctggacaataagcatgcctgcctattgcccttgagggagatactatattcatcttttcaaaatcgtaaacaaacccaaagttttctctggagaaaacgctgtctctgtttttcaaggctgtttgttacatacacagtcttggaaagatagtcttgaagaaaggtagtttgtgcctctgctcacaggatgtgcaaaaaagtgaaagagtctcacaaagaatcaagtgttactttgtctcaagtttgtcaggtcttagtaatttccttaaatgtatttaatatcggcttcatgcaagtaccatttgttaggaagtaggagtggaggtatcagaggaatatagtacagtctggtttcaaagagctgaaagccttagtgaaggatagagaggaaaatataccaccatagaggaagctgacagtcataattgtactaatgcaggtatagacaaaatgccctctggagaaagagaagaattctcattggaggactattaaatcacgtggatgtggcagtattgattgttaacacttgggtttagcattacagcaaaaataactctaataaatcaaacccaacctgagaaaaaacctgagaccatctggcagggatagagaatactaatagatggaattaagatttctgctataaggtacccactttaggctgtggggaatgtgtattattacgctaaagtaaccctattatatcttttattgtcctaaatacataattattttctaaatgtatgctaaacatataagtgttttacttttcttagagttacttagagcactgcaaaactagctattccttatgatactctgacgaggcattactaatcaccaagtggcaattaaaaatattgaggcagactattaaaactaaatggatattctaggatatgctctagaacctaaaccttttagccatggttcaaatgtcacagtaatacattgggacttagaaaatcttagagtgaaaattatgcctgcaatatgaagattgagacattatttattacatagtgcttgtttgtggaatgggaggcttagactcattacagtataaaagcaaggagaaaagtttctaagatgacgtatattggctatagtaattcactttggccaaagcaaatcacaaaagaaaactttatagttttgttttctctttacgaattacattactggtttaactaatctgggtcctttcctagatatgtatggtaaactaaaataaatatctgaaactgaagcacttataaacttgtttttaaatgaacgataaagatgttaaaatgtcacagactaaatgataaaatatgcctatcaacctacttaacctgtcatattttttacatattagacttatattttcagaaataaatacatatttcttcatagttcttaaaattacctctgactcctagatatataatttttgcttctgagagtagagcttgccttgtctgtcataggcccagcaaacagtcaaacataacttacttctttattgtgagcattgatttgttatgcttgtgatttttttttcaatcaaactccattattgatgtcacaaaggttagttacagtttcttgacatgttgccatcaaaatctctctgaggcacatgacaattagcatatatataaacttaatttcttttaataaaagacactaataaaatactttcacaagtcacatgtaaaactctgagtatttgcaaatagcagataacgtgtatcctaataatactttcttacccaatttacaagtataatgtttgtgtaaaagagaatgctattaagcagcaaatgtaaatttcttctatattttgatgggttaagaagccacttagaaagtatttgctaggcatatgggttgtgaaactctcaaggccattagatgaggaggaagtaatgaatggtatttctgcttggataggatatttccttattttgcttctctcaagtcagatttaaaaatttcatcagatgagatcgagcgcattcaggggaaaaaggagaattttagaccaatatccctgatgaacatcgatgcaaaaatcctcaataaaatgctggcaaaccgaatccagcagcacatcaaaaagcttatccaccacaatcaagttggcttcatccctgggatgcaaggctggttcaacatatgcaaatcaataaatgtaatccatcttgtaaactgaaccaaagacaaaaaccacatgtttatctcactagatgcagaaaaggccttcgacaaaattcaacagccttcatgcaaaaaactcaataaactaggtattgatgggacgtgtctcaaactaataagagctagttatgacaaacccacagccaatatcatactgaatgggcaaaaactggaagcattccctttgaaaactggcacaagacagggatgccctctctcaccactcctattcaacatagtgttggaagttctggccagggcaatgaggcaagagaaagaaataaaggatattcaattaggaaaagaggaagtcaaattatccctgtttgcagatgacatgattatatatttagaaaaccccatcatcttagcccaaaatttccttatgctgataagcaaattcagcaaagtctcaggatacaaaatcaatgtgcaaaaaacacaagcattcctatacaccaataacagacaaacagagagccaaatcatgagtgaactcccattcacaattgcttcaaagagaataaaatacctaggaatccaacttacaagggatgtgaaggacctcttcaaggagcactacaaaccactgctcaacaaaataaaagaggacacaaacaaatggaaaaacattccatgctcatggataggaggaatcaatattgtgaaaatggccatactgcccaatgtaatttatggattcaatgccatccccatcaagctaccaatgactttcttcacagaattggaaaaacaaaaccacaacaacaacaaaaaaaccaaaaactttaaagtccatatggaaccaaaaaagagcctgcgttgccaagacaaccctaagccaaaagaacaaagctggaggcatcacactacctgacttcaaactatactacaaggccacaataactaaaacagcatggtcctggtaccaaaacagagatattgaagaatggatcagaataaggcccttggaaataacaccacacatctacaaccatctgatatttgacaaacctgacaaaaacaagaaatggggaaaggattccctatttaataaatggtgctgggaaaattggctagccatacgtagaaagctgaaactggatcccttccttacaccttgtacaaaaattaattcaagatgaactaaagacttaaatattagacctaaaaccataaaaaccctagaataaaacctaggcaacaccattcaggacataggcatgggcaaggacttcatgtctaaaaaaccaaaagcaatggcaacaa

SEQ ID NO: 1881283 - DNA, 4001 bp, Homo sapiens
atggaacatacaatcgggttttacaccattgcccagggacgggcaggagacagatgccttcctcttgtttcaacggcaaagaggcgttccttcttctttcactaatccttctcagcacagaccctttacgggtgtcacgctgtgagggacggtcaggtctttcccttcccacgaggccatatttcagactatcacatggggagaaaccttggacaatacctggctttcctaggcagaggtccctgtgggcttccgcagtgtttgtgtccctcggtacttgagattagggagtggtgatgactcttaacgagcatgctgccttcaagcatctgtttaacaaagcacatcttgcaccgcccttaatccatttaaccctgagtggacacagcacatgtttcagagagcagggggttgggggtggggttacagattaacagcatctcaaggcagaagaatttttctcagtacagaacaaaatggagtctcctatgtctacttctttctacacagacacagtaacaatctgatctctcttttccccacaggataggagtccaggtaacttgttccatggcaggcagtagtcttttttttttttttttttttttttgagaaaggttctcgctatgctacccaggctggtctcatctcaggctcatgcgatcctcctgcctctgcagtggctgggataagacacaactgccaccaggccctgcccctaggcagtagtcttaatgcctgatggtggggggttggggaaggaaggggttgagtatcagggtaaatgctgcagagctgtgttaaggacttaggccctggagtcaaatgcctctgctcacatcccactctgcaagactttgggcaacttaagcagcagcctctgtttccatcgcagtggctcttgcctataatcccagcactttgggaggctgaggcgggaggatcacttgcgcccaagagttcgagaccaccccatctctacaaaaaaatccaaaaagtaatctgcttcctcatgtgaatgtcgttgtaaggagtgagataacacatagagtgcaatgagcaagtcccagcacagaagactcatttcataaaatacgtgtttattattaccataggcctacagtccccggtattcttaacacatcttgcctgagaagtatcacactcatgcctatcaaccagctcacacatttaatcaaaggaatttggcagctgtagggttgtcttttcatccatatcgtccctggaattaactgtcctgctataccagtcagattgagcagcatctgtcaagagtttcagtcccacttgcagaggaaaggctctctggcttcggtccgtggctctccgtaggtgccgtgtctggacccagcctaccttcatctctgttaggcttagggctgtctccacactgtgtcttgtccaatcacaagacttcaacggagcgggcggtctggcctaggctcttatgcgtgggatgtctgcaggccaacaatcccagtcgggattcgaagccgcgcgcagtgcccggaatgacccctccacattgatgccactgtagagcccggaaggaaaagcaagcggcctcggccccgcacagcccaggattaaatgtttgcgccagggcccctctggctacctggtggtggccccgagcggcctcggaggccgcggcgtagctcctgggtgaaggcgtctctaaatcgctcagcgcggcggcacagggagcccacgggcccagccgcgaggtcctgcaggcggcgggccgcgtcctggccccgcagctgggcctgcagcagtgcgaaggccgtgagctgcgccgcacgtcggataggccgcgactctgacagacgttccaccagctgcgggctgtgcagcagggcggccagcagccgccgcagcaccatcttctccaagcgcccggaacccgacctcgccgccctcgtcttccgccccgcggcgcccgacccggacgtctatgcccccgcgcagcttgatgacgacacgccgccctcggattgggtccaatgagatgctcgcctccgcgcgtttccgcttccgccatcgcggacgcagcctcgtgccgggagtcgccgcattgtggtccgcttctctgcactatgtcgggtggcctcctgaaggcgctgcgcagcgactcctacgtggagctgagccagtaccgggaccagcacttccgggtgagggaggccgggccgcgagacgggaaggccctgggcaagaacgctgagaaacggtttgctcttgtctcattgtgtcgcctcccattcagctgaaatccgcaaacgccaagtggggccccggtgcctgctggcgaggcagggaatgggtgctggaagggcgcttggatatcactgaagccacttgctctggaagacggggaactggaggctcgcttatcccattcgctcgcagccgctccctgtaccccagccagtgccgagaggtttgagcggtggtggtggtggcggctcccgtttccacggttgtgcctccgcagacgactacgtagcaagggggaggggtgcccttctctctcccagagtaggcagaggcgccttcctgatgcagatgcggggctttttgctttgttttttaaatcggcgaagcagtgcccttcggcgattcgggccccttctctgggaggatggtgttacggaagctgtacgcggtgcgtgggagacacaagtggagtcctcactccgccctcggggaagcttcggagtggggaggtggacccgccaagctcggcactttgagggtgttcggatgtaaagatcggagaattgctggatttcagaagagggaaatttttagtccggactatatcacagtatattttgtggaaaaaggggaggcagcagatattcaaagtagacttttcagtatcagcggaggtagggatggaatacggttgggggttggcggggcgggactcattaacccaattatttagtaaacgtttatcgagtgctgtcgccaaatccttgtgctaaaccctagagggagagggaagacagtttctgcgctctgcgagctcataatcccctgtagtgaggattcagaaaagggaaaaatccccttgtgactgggaaaggaaggggcgcatatagcagagggtaagtgtggagaatgtgtgaaatgtgttactagagtagggaaagggaaattttgtttgacgctaaattagggaagctcttagatttatttagtcaaggctgggaacggtggctcacgcctgtaatcccagcactttgggaggctgaggcgggtggatcacgaggttaggagttcaagactagcctggccaagatggtgaaaccccgtcttactaaaaatacaaaaattaggcgggcgtggtggcaggcgcttgtaatcccagctattcgggaggctgaggcaggagaatcgcttgaaccggggaggtggaggttgctgtgagatcgcgccactgcactccagcctgggcaacagagcgatattccttctcaaaaaaaaaaaatttattcagttaatgtattttattttttgagacagagtctcgctttattgcctaggctgaagtgcagtggcgcaatcacggctcacgcagcctcaacctcctgagcctaagtgatcctacccacctcagcctcctgagaagctgggaccacaggctcgcgccaccacatccagctaattttttgtagagacagggtctccctgtgttgctcaggccagtctcgaactctgggactcaagcgatccacctgcctggggcttcccaaagtgctgggatgcctaagtgccaggcatgatttgcacttctaccacttttagttactactttagacagttccacatcctgaccattttgaacttaaagcatcctgtgagatgaaaactggaaccttctgactttgtctattattcatctcctcagtctaaacctgtagctttttttagatgctaatgccatactgtcatgtggaatttctagcatt

SEQ ID NO: 1881284 - DNA, 4001 bp, Homo sapiens
tttggtaggttagaagcattaaatgcatttctgacttaagatcttttcaacttaaggtattttcagtttatggtgggtttattggaacataacccctttgtaagttaaggaacatttatatagtcacattaggagtgagggcttcagtatgaatttttgggggggatgcaattcagtccataccagtcatgataaaatatgcagttatttaaacccttagaataaactcaaaattcaccgccattattcactttggatgctaataacagaatgtagacatagagtagctgttgcccagtttcatggtctacttgtcccagtcaacctgaggatagtacagcataaataggtaaatttgtgcttgaccttgtgatcctacatatggcaggctgtcttagtccctttagtgttgctagaaaggaatacccaaagctggataatttagaaatagaaaaggtttttcggcttatggttctgatgtctggaaaagttcaagactgagcatctgcatctgatggtagcctaagactgcttctactcatgccagaaggcaaaggagagctggtgtgtgcagagattacatggccagagaggacgcaaaagaagaaaggaagtgcgacgttctttttaaccagctctggtggaaataaagagaactcatttaccctctccccagggaggacattaatctattcctgaaggaaccacctccatgacccaacactgcccattagtccccacctccaacattggggatcaaatttcaacaggaggtttaggggaacaaacatctaaattacagcacaggccaaccacatgcatgcattaccaatcacgtaaataattttgaagttaaatgcagaaaactgcaaacttttgaggctgatatccagggccaggattaaaataaaaagtattaatgccttaaacagtatttactgaccatctaccctactgcaaggccctagggagaaactgaacagacatggttactgattcaacggagtttacaatctaggtagacatacaggcaaaccatttcaatagctcggatggagaaaacacctgtgctccaaggaaggtacctaactgagcaagcttccctgaggagcgatcctaaactgtgccacaaagatggttaagaagagatgaggcggctgggcgtggtggctcacgcctgtaatcccagcactttgggaggccgaggctggcgaatcacgaggtcaagagatcgagaccatcctggtgaaaccccgtcactgctaaaaatacaaaaacattagctgggcgtggtggtacatgcctgtaatcccagctactcgggaggctgaggcaggagaatagcttgaacccggaggcggaggttgcagtgagccgagatcgtgccactgcactccaccctggcgacagagcgaaactcgtttcaaaaaaaaaaaaaaaagaggcaggttacggcgcgggggcggggaagggggcctgcagcaccggcgaggggaagaaccaacttactgatgcctcagccagtggctggagccctaagaatggacagacctggctccgaaggtcctcttcataacactactgccgccaagaatgtaagctgcccaagcacgaggacacttttagagggccctcagactcagcttcttttggtctgtgcctcaaattaagcacatgtcttacatttctcccaggtcccaattttcaggtctgcttttctttgtttttctttgtcgctccccgctcctaagaaccttcggctgggatgacattcttcaggtgcagaaaccagggggaagctcccagagcagtgggggctgaactcaggacacagtcatttttgctgttaagtctctcctgcggcgctgaggaggcaggctcaaagtaaccaaccagagcagccgcagagggaaaagctaagacagttctggtccggcccagcgcttctcaccctctagctctctactctccgccgcgcagcctccgctccctccacatcaggcacggcgcttgattgacatgagggcccgcccaatcccagtgcggcagagaccgttgtcgcgtcagggaccggggaagggggcgactgaacctatcagattgggtccagagtgggtttcctgcccgcgcggatccgcctgcccaccgcgcgtgccccgcctctctcccaagagctacgcggcggcggcggagcgcaggcctcgtgccgttacggccatcacggcggccgcagtggcgtcctggagccctcctcaggtgagctggagctgcccggctcggcagcgggaaggtgagacggccttgttggcaggcagacacacacacaccccccttcagtccgctgtccgtccatacagcctgttactcgctgcgtcgcttcctcttctcgcgctgagttagccccgggggcgccgtctgcaggctcggagccgagccggagggggcgcggaggctgctcggagggtccagacttctgcaccgggattccgcgagaccctcgggccgttgccccagggagcgtgaccccgcggcctccttgtcagcccctggagcgctgtgtcgggctgagagcccgggcggccgcccgtgcgagcctgggaggtcgagtgtgcggcgcgctggttgacttgtctgttttctcatgaaaaagtccttttgccagctgtggcgtaatccgaggccgggaaggtagggacgtggtaggaggaagggcgctctcacctccagcccgagaggaggggaggcgtcagcctgcgcggtgctgcgggtggacatcttcgggacgcgccctctcccctccccccacccaccggccgttttctagtctggggctgtgactttaatggtctggacctgcttcagattcgtacgcgagttgctggggctgtgaacttttgacttgagttgtaatatgtttggtaaaacaaaaaaccatttcgataggttttgtaacctttcttctgtattaacatacaagttaaattcgccgttagaagctcaggaagctgggttttgttcaggggtgaggacgtaaccgtaggaacgctctcggtgtcaaactgatggacccggagtcacctgaaaataattatgcacgttagattaggtaagaagccctagaaattaggaaagaattaggttaaagagaatttcctaactcctctttgggtagggagcaaagcagctcaatgtcctcccaaaacgggtgttgccaaaaggtactcatttttaaaattttactttgatagacgtatgacaaaccaactataacgatttcttcagcacctggaaaccagtgtgcctagactctcagccttcggcgaggtcacacagtaaacggagaaataacctaagaagaaagttttgtttggtaattgtcaataatattcgttcttttctttttaaaacacttaattttcttgtggggggtggagtctgtgatattcttaaataggcatcccattcacaacttgatagtaatatgcactggttgataaatggtgctttcttttcatcttgaccacaaactctgagacttctttgggaaaattgtgatctgtggaaattggctgtaatatccataaacatagtttgcagagtgttcacatctactcagctgttggctcatgtattaaattttaaaatgtgtacttatttttctaggcattatcttttgtccaggttttgacagtgctttcaggtccatctaaataaaatttgaaacctacgtgtaatgttttgttcgatactgagggagtccaggcggggtagctcaaacctgtaatcccagcactttgggaggctgaggcgggcggatcacgaggtcaggagattgaaaccaccctagcagacacggtgaaaccccgtctctactaaaaatacaaaaaagtagccgggcgtggtggcgggcgcctatagtcccagctactcgggaggctgaggcaggagaatggcgtgaacccgggaggcggagcttgcagtgagccgagatcgcgccactg

SEQ ID NO: 1881285 - DNA, 4001 bp, Homo sapiens
ccacatatttagtgttataaaacaacataaatttattattttatagtcctaaaatcagtgtgtctacaggattgcattacatttggtggctctagtagagaatctattttcttgccttttctatcttctaggggctacctgcattccttggctagttcctctgctggttttgaataaactagcagtccagcatgttcagatttcaatttctgtctctgattttgcttcagtcaccacatcttttatcctgattctcactctcctacctctctccttttcttacaaggactcctgtgattatattgagtccacttggataatccaggataatctctatatctcaagatccttaacttaatcatatctgcaaaatctgacaaatgtatttgtaacgtaacatattcaagattctggagattaagactcagacatctttgggaggccattttgtatctgctacagagaatatgaaggaaaaagctgtttatccccttgaggacataaaggacatattaaggaaaagattcaagtttactgttgttcatattttactttacaagcatatttcaaagaggacagagcagaaaaaaattttcttgggtttttaccatatgacagaatccatgtgagataatttacacaatttcattaaattgtctaagccacactcactttattaggaaggttccattagccacatttcacagaagaggaaacaggactcctagaaaaatttgtccaaaatcatccagctaatggtagagttaagaatttgaaataagcctggccaattccaaaatccacactcttaactaggtcatgctctgtctataactcattgtatcttagctagaacagtttaaaagaattcctaaaatatggataaaatatttaaggatttctatattatattaaatggctaattgtacattttactcatgtttttatcttctgttgaactaaaaatgaaaaacatgcaaacaaaaaatgttctagtagatatatagctattaaatatgcacagttttgctatagagaagactcatttttctttcttaataaataatagacatttttctaaaagttttataaatcttaacatatatgcaatcaatatttaaaatattaacatggatactgaagagctttgtacttaatttaatcaaaggagaatgctgggatgctattttttaaaaaaatattttagtcataggactttagattgcaaactgcccagagcagggttgagagagacattgagaaaaaaggagcaaacctagtatcttgagaaactgaaaattctaatgttgatcttcaggctgaaagggcagactagatacagatactctgaggccacttatttgagatagaaataaaaaaggcttggattatctcttatggttatcaagtgttctagcctactactagactagattactgcatatgaagtaccaaataagtggccctttggattgaatgattcattgactcctaaagcaggtgtgttagaaagaaagcacaaatgtaaacgttatattgccattgactgtgctcataaaataatgaaaactatgataatataatttgttttcttcagatttgggccatatcttgtatcacatcatataagaaaaatagaagacacagtctggcacaaagtttactcaaatgtcacaggtgcagattgttcttggttgaagggacagatgctaccataacacctaccaacctgctagttcggctattttcatcttcagccaccttcaagcatgtgagaatgcatatgagtcatcagacttgctgttaacttcctctgaagctcaaagtttaagagtcagtagctcataacactctatttaaggttcacaacccctggttcaacctctaggttttaaacattggagccacctgctgaaggagaaaagattggtgaataatagaagacttaagtgctccaggtctttcaacctgtcaatcagaacttttcagttcttagcttgtttaggtagagagagatagaaacagagagagagagagaaagggagagagaatgtttgaaaatcactgttctagaaccttgtagctggctgataaatgtatacatatgtttaaaatgagaagcttatagtttcaaattttgaatcataaattcaaggaacacaatataaacaacgaattggaattcagcatatgtgtttcaatttcaagatcttttgttgacttacttatccaacttactttttaagatgcctttatgttttggggatttaaatgagttaaacctcaaaaatcctccaaagcaatttggaatttacaggaagttcatagcaatagatttcactcgaatttggtccttaatatatatatgtaatatatattacatattatatatacaatatatatgtagtatatataatatatatactatgcatgtataatatatggtatatatatgtagtatatataatatatagcattattatacatttaatatatattatatatttctactatatattatatatagtggaaaataattcaattgattttagtaatctattgtttcatttgtagtaatttattttttctgtgttcaagttcagttcatacaaggaatgcatttacacgtaaaaaaatggttttctttcctttctctaaaggcttcatttatactgttttaattgtgatcaaatctcatttattttaccctaggaaaatattatttctcagcaactcaaatttaattaaatttattaatttaactttttatttcagttaagagattatcaagatatttttccaacaagattattttaccctcattgaaggaaacagttaacatgtgtatgagttctttgacttctcccaagtcgtacagctaatgagtgttaaaacttgaaatgagctgaaccctcctagcaacgagtatgtattctcatcaggatgttccttcttctacgtataaaacctttgaaaatacggttatcagaaattgacatcatgaagaattaagtggtgttgatcattgctaattgtagtagttggggctatttgaatcactggctgactgaaacagacccttagggcatgcttattctaacttgccactcattttctaagcagaaggtttttctttgtgccactctgaatacattataccaacagctacagcagagcccaattcagggccttagcaacccagggtggtgctacataattcctaagctttacctaatgtcttttggtggtggtggtgtttcttagttatttgctactttaatcagtttctaaataatgttttaaggaaacagcctcattgatccaggctaatacaactgcacatattaacgaataatatagaaatctatatttttttatgacttggaattttaaaatttgtataaagaactaaatatttatgtttttatgtgtttgatcaatttttattaataaatgtttcttgaactttaaatagaaagaataaggctaatataagttatttgccaagcactgtggaagaaaaagacacaaatatagtttagacagtataccggtagctgcatgtatactacaaaaatgtgaagagaattatatataatgttaactttgctaagaaatatagctcaaatttttaaaaagctgtttctcatcatgcatctgaacatatttgttcacattctgtttttcctaggaaataaaaacattaaatattatgtttcataaaactattatactttcataaaattatttaaaatttcatcccaaatgagttttgggtacattttttcaagctggttatttatattaattttacacacttcaagaactgcagatttatcttctcagaatggaggagatggaagatttttggtaaggattattgataaaaagaagcttaagctctttattagaaacagttaactactttggcttctattctaatgccatgtgtcgtctctggaaagcaatttccccaactgatagaataatattttaatgga

SEQ ID NO: 1881286 - DNA, 4001 bp, Homo sapiens; identical to SEQ ID NO: 316026

SEQ ID NO: 1881287 - DNA, 4001 bp, Homo sapiens
ttaaaagttattctttcaaaatgcagactgaagtacgtgggttaaattcagcatgaagaaaaacaggttatgaggttagaaataatgtcttttttttttttttaaagacgtagtctcgctctgtcgcccaggctggagtgcagtggcgccatctcggctgcaagcttcgcctcccaggttcacgccattctgctgcctcagcctcccgagtagctgggactacaggcgcctgccaccacgcctggctaatttttttgtatttttagtagagacggggtttcaccgtgttagccaggaagaaataatgtcattttttaggattaagaaatttggtcactttggcattgaccaatagtaatctaagatcagtacgcaagtagggtggagaaatgtggattagaggcatgtcactggatagaaatgacgtggggaaaggagagatgcatgcttcagagcactcagttccagactgtagaatctgaatgtactccccaagctgtaggaagttagcatagtgagtttggttatttgttggagagaatgggtgatggctattttatcttcttactcaagcatagttatggaagtgttcagctgaggcccattccaaaggaggtactaagatgcaaaaatgttcaaagggtttagtcagaaacctagtggatgatccttaaacccctgatccacatggagaattcaaaaatttgaagttagaaatcagaacggatttgaaaaggtagaaagttcttaaggtactgtgatggtggaaatatttccctttatctcaggagaccacctgaagaaattagtatatacactctggattttgaagaatgcaaaggcctagtatgactacttcctgaagaaaatctaaagggtaagagaagagatgactagccactttgatggagggaatgaaggagagactggtgtgcggtctccaatgtcccatgccgcaatgagttaaaaaacttaaccttgtctaaggattgtccctggtggtttcagactgtaaaatctaaaagctctttctttgctggcattattccttgctggtcattctatctacatgcatactgagagagagatatcgcgggaagcacatagcaggcactccataaatttttcagatttcccaactgcttccagaaaggagtttccggtcaggcacggcggcagcgaaagaaatagctgcagcgtttgtagagcagctgggacccaggcctgtgctccctgtgaggcacgcccgccagggagcctcgagccgggcggagacaacggagagaagccctatgtcggagcaccactccaccagcgttcggagcacccctccaccagcgtccggtccactgctggtcctgcacagtcgccactccccccatccttcctgctagccccgcccttcttgctagcccgcctggccctgtgtgctttctcgacccacccccgtttgccctgccccgcccacatgccccgccccacttgcccggcccctcttgttgtcccgcctagccctgctgccccgccccgtccccctcgcccatccccccagttccgctgccccgtcccgttccgctgccccgcccctccagttgccccacccccttccgctctccctccccgccccgttccgctgcctcgcctcgtccggctctccggccccgccccgccccgttccgctgccccgccccgtcctgctcccccgccccgtcctgcacccccgccccgcccagttctgctgccccgcccctcctgtttccccgccccatcccgctcccccgcctcgccccgttccgctgctccgccccgtcccgctgctccgcccagtcctgctctccggccccgctccatcccgctggcccgccccgtcccgttccgttcctctgccccgccccgtcccgttccgttcctctgccccaccccgtcccgttccgttccgctgcccagtcctgctggtactcactaggtagtagcggcaacggacgccatggggaccgcctcgtcgctcgtgagccccgcgggcggggaagtgatcgaggacacgtacggggcgggcggcggcgaggcctgcgagatcccggtggaggtgaagcccaaggcccgcctgctgcgcaactcgttccgccgaggcgcgggggcggcagcaggggccgggcccgggtcgctgccccgcggggtgggcgcgggcgggctgctgggggccagcttcaagtccactggctcgtcggtgccagagctggagtacgcggcggccgagtacgagcggctcaggaaggagtacgagatctttcgcgtcagcaagaaccaggagttgttgtccatgggccgccgcgaggccaagctggacacggagaacaagcggctgcgggccgaactgcaggtaacgccgggctgggccgcgacgccgggagacccttgggaagcacggccgtcctgctccctctccaaaccaagcggctttgaaagttcggcggaaactgcccattttaatttgagaggccatattctcttcgagtctgaaatgattccttaaccctcccctttttctgtctctttttttggagacagggtctcgctgcggtggcacgatcgcggctcactgcaacctggaactcctgggctcaatgatcctcccgcctcggcctcctaaagttctgggattacaggagtgagccaccgcgcctggtccccgcttttctatttctggtttattcattgaggcacctagaagaaattagccggaaagtgtcctgaggaggcaaatgccaatctccagctccactgccgcccccgcgcccaccccctcagaaggctggtgacatctgttgaagcaactcagcaaactcttcctaggagtttcacccccctccccaccataaaaattttaagtgggtctccaaagtggggctcaagtgtcggtttctttgtaaagtttcatcgctcttgcattttaatggtcttgacatgaaaatttctggaagcctcctgatctcaccatggttgaaaaccttctctagatgtagtcaaatttccctagtccatttgattaatttacgctaaaagcaattattgcatgccctccatgtagcaggtccattataattcaataaaatagtatgtaaagcagccgggcgtggtggctcacgcctgtaatcccaacacttttcgaggcctaggcggacggatcacctgaggtcaggagttcgagatcagcctggccaacatggtgaaaccccgtctctactaaaaatacaaaaattagccgggcatggtggcacgcgcctgtaatcccagctactcaggaggctgaggcaagagaattgcttgaacccgggaggcggaggttgcagtgagccgagattgcaccattgcactccagcttgggtgacagagcgagactccgtatcaaaaaaaaaaaaatagtataaagcaagaggttgcttttctgtgaacgaatctctaaaactttttgccctcagtttggggcccctctggtcgttgttgtgtcgtttgtgtactctttactgtgggagagacttataggcagcctaagagttcccggagtcgttacagtcggggtgaaataaatacctcagactgatttttctaaaagaaaaaaagcctcctgtcttcaagactagacattcttctagtcaggttttgttgttgttgttgttgttgtttttgtttttaaactccctcattagctgttgtgtaattattgtcgttgtctgggaagaagtccgtgtagcagtttatctgttgtcttatcagttttcctactgggcaaccttaatgcacttgcatgtataaaatggactagtgcatttcaaatatctgattcaatgtatccaagccactgcccaacagacaccgcacgttggaaacaactgtgaggtgggggtagaaaaggccaaaccaaacagggcggagtgcaataagggttggcaagtgtcacagtcactcatgtcaccaatcctgattccctgtgaaacatactg

SEQ ID NO: 1881288 - DNA, 4001 bp, Homo sapiens; identical to SEQ ID NO: 316029

SEQ ID NO: 1881289 - DNA, 4001 bp, Homo sapiens
ccttttctgggcctctgcctcatagccacccactcaactgtctcacaggcccaaggagccagatagagccagcggaaaagtccgaatcacctttaatatgggttacaaaagtagcaaaaccagctgaggcttaataagaggaggtggagtagggatccaaagggcagaaccactcctcactgcccactccccaccatatcctgggccctcttctggaggggatgggtggataaggggaagtgaatggtggctggatcttcggttttcttccccagaacagagcaggctgagcccagcaaccccaggaagcccacaaagggaaagatatatgagatgggggtaggggagcaccggagcagtctccgagagtgcaggctatggagacagcactcacaccacagaacagccctcagcttgggggcccaggacctggaccacatcttcctggcccatggcaaccagggcattctctagcaccttgtgggtggcaccactgtcttcttggatagcccagtccctcagcagtgtgtaggctcacacctggccttgggccatgatttctacagcctcagcttggtagcccagatggtctgccagtccccgccagcccttgtcaggttcacgtgacacctctaacagccgctccactttctcctggtgctgccgagggagatcaaggtgaagtcggcacccaagctcaggatgtggtcctggggcaggagacatgaggatcacacaagggctgggtggtgaggcagttctgggaaaggggctcaccctggctgggggcacagggctccagactgctaggagagtccaggaagacactgctatccccatgcatctggtccttgttgagacctcccagctctgcagttcgagctttggccagctgctgtctttgtttatgtgagcgccagctgtggggagaaagggagacctaccaacctgcccccaccttcaagacagggaattggttgggagtccagacagggaagggggtgccacagggcagtgcccagaccacctaccacttgaaggccatgtaggcaagcagaccgaggaccacagtggccagaagggtacagtagactgggatgatgctgcctgagacctcttggagactccaggaggaaaggggaggaggtattgggggccagggctcctcctgcccctacccatactccttccctgtccctctcctgcctcctcaggatcttacctgtggaagaaaagacagatcaggtcaggagcaaggaacaaaggctagggtccctgggtagcctcacctaaactttgttgccaaaaagatttgaagccagtagtccctactattagagtcaaaagcttataccacagcatcaggagctgtctggcctatttttccattttcatctacttcttcccctttgcttaccactctggacaccttgtccttcctagatgcaccctgttctcataaccttccagacttctgctcttgccaatctcccttctccatctgacatattggcaagaatcttctactctgggaagacttcttgatctcttcctttttggggtccatttgcacctcctgtctaccacggcactaaatccaattttttttatccaattatccagggcacaggaagaaagaccatggcactgtctaccatggcacttgtgtcctgtctccgccaccaagtctggactgtgagggcacattgattcatgtggtccccacaagcatctctgtgcaaaggaggccttgtaaatttttgcaaaataaagctgaactggaaaggaagtgttgttgctttcttctgcctggaagcgacttgtccttccaatctagtgcagtcagggcacacggggcagagactccagaacctgtggctggacttgggtgtgacctacccacttggggtacctcccagcctgcccagtgcccatgatctggatcaacggatgcttacccacataggccaggactttgctgtggctagagttgtgaatcatggctctgttagtggttaatactcctggggctgtttcttggagaagacgttagagagttttaggcagcgcccaggcaggggagctgggagctgcttctctcagtccaaaaagggctgtgtgcaggaggaatatgggggaaatctccaggcctgacgttggcagtcccttggggtagtctgtcccccttttctcacttcaacctgattcattctagggctggaccagtttcctcctgtgtcagatggggcggaggtgacagagctggtcccagctggccaaaattagaagggtcagatacagctcaggatggaagacaggttggaaaccaccctgtctcaaagacgttgccaaacacctggtctgagtccagggatggtagggaggataggggagacgtgccttctagctccatcttggccagaaccaggctggagagatgtactggccagtgggaggctcaccaccaggcttttaaactagagttcaggaacccaacatcctaaagccccaaggcaggaggactttctgcagtgaccatgctcgcactctttcctcaagggtcagtgtccagccctctcctgatcaggaactgggtggaatgctaccctggtgggttcagcgagggaataggggatatgggcccagagactccctagttgatcctgcttcatccagaaattcagagagggcctgagactcaaaggataggaccgctcagtcctacctggatcctatagggctgaatctgctgggacccacttcctgaggtttggggaagagaagctcctcgtctagactaaggagagcttgcctggagaaggaatggaggagacatccgggaaggccctccagctccccagtatccaccaccacatattgggtaccgatctatcccacaccatgtgcccatgtgtatggctaaatcagcaacccagtgctgtggccaagtgggtgcgacctggtagcccttgccacatatgggtgtgtacctttgtgtcacttacattaaggggccctgcaggatcctggatagtggatgggcctgtgaccaggacgcagcagcagacaggcctggcttccgcccagcctactctgagcagcgggactggaacccctcccgcctcccacctgtctccaggcccacgaatacgcacacacaatgcaaccaccccgcacacccacactacccctgacttctcacgcacacgccgacaccagcacatacaacacccgcaggatcgcgagtctggagatgggggacagagaggcagcccccggctccctccgctcagcaagggctctgcccccaactcctcatgaccagtggccgccaggatggatccactcagcagggcaggaccgagccctccgggaagacaacgtggactctctggggtggttctggccccccacccccaaccccgagaccacagcggcgccacagggcggcccaagaagtaggcaagacaatgaggtggcagggccgagctggaggggcgcggcctcgggtgttgtcgcccctgcccggcgaaggaatgcaaacgcgcctgcggggcgcctggccgggttgcggttgtggacgaatggcgtgcgaaggcgaccccatgaagagatcgtggggaaaccacaagccggggcgagatgtggggcaggggctacactgccgggtaaactgaggccccagttcagcgacggccacgcggagggggggcgagtgggcccagagggggtcacgggccaggggaacgcgagccaggccagactcagacggcgaccctgggacggtggccatggcaggccgagacgctgcgcgcgaacgcacactcggagacggagcagctacaaaactaggcctggtttattgccgagaagggagaaccggggccgccgttaggaattaaggccacaggcggccctcgtgctttgacgaaacagcgacttggaagccggggaaccccgccccagactgtgcaaaaagtgctgctgcggccgcagacgcc

SEQ ID NO: 1881290 - DNA, 4001 bp, Homo sapiens
ccctggagggcaaccatggaggagtgtgggaaggattcacccttgcttcagaagctccttgcaatcagggaccagggtagtgtgacaaatgccacttcaaggttaaactggacatgaccaggggaaggtgtcaggctgtgtgttgttacagattgtatatttgcatgcctgggggttaccaggctgtacgcatataaacagggaggaggcaggctctgagaacctgccagggtgcctgggataagctgtgactttttgcccctgatgccataagttggagggtcctctgctcaaaacatatggtacacacttctccttcttttcatctggtatcatgtatcatctctcagatccaataagaaaacattcccacgtccttccctccctccctagtaccaaggtcctcatctcagttttcatgggtccatggagggctgcctctagtgatgagctggaatcttaaggcctgaaatagagccagactgcagcagtcccaagtcctggagagcttcaagtaactgctcccgcgcagagccaataaaggaattctccaggaaggtaggcaggcctcctacaccatcccgcagggtatacaggggcactcgcaccaggcccagcacctgtaaaaggaaggagacaggagacactagggccccaggtggctcattcccttaactccatcctttctccagcagatcaggcctcaccccttaatactccagcagaaccaggcccaaggctcacacctcactaaagcctagtggcccaaccttctgcaggaaaatgacccaaaacatattatctagctctatcaattaatctttcccacatctgcttctaaacctctagtggctactgcctcaaagatgtattcataccctttcaccagtggttgtcaaaatgtggtcctcagattatttgcatcagcattatttgggaacttttgaaaactacaaattctcaggtttcctctccccccgccccaccaccaatgcaggaatgctgagagaaatcgctattttaataagacgccccgatgattctgctacctgccaaattttgagaaccaccttcatacataatctatctactagccctgcctgaaatatcagggccacatctcctacacaagaaaagcaaaccccaagaataaaacctaggttgccacacctagataatgtgataatctatcacactgtcaatagggaacagcagagagacatggatgagtgtgttctagaaaggatctctcctggtaaagggtgggaaagacctttacagaaagcccaggttggcagtactaattcagagtatagatgatcacgatcccaactccaccaagaaagctggggagagggcaaggtcagaggggcaaagacttttctccagggatgctttcttgggggagagaaagctttgggagaagaggaaattgggaaagggacagagtcccaggctggtcccacctccagcccgtggtccttggcgcgtgttgcgccggcctccacagccaacagctcctcgagcgtcagacgcttggcatagaagtgggccacaacgcgtggccctgacccgacgtgggagctgcggtagtcagtgcgctccacgcggaaagcggcagccgcttcgcccagctcctcgcgcagctcgcggttcagcccgtcctctaggcttctgtcctgcgtgtccacgaatccgccggggaagcccaggcgtccatcgaagcgcatctgcatctgcgggagggggaagcggggattggcaggggcgccccagaggagaccaccagagagggtgcggggctcaggcagaaagtggccgggcgcgcccccttctcaccagtatggcgtagcgcagcgggatgcggccgaagagcatcccagggtccggcgcgtagaggagagcgtggcacgcatgacgccagcccgaccccagcgccagggcctcgcctagctccagcctgcgggctccggccatggccggacactgctcctctgctgtcccgaaggcccaatgggcagaggggcgggtctcacctcggaccaatccgagcctgggcggtgctgcaaggcccaatccctgcagggataaggggaggaacctaggcgcctgggggcggggcgccgcgaccggtgcgggaggcagctaatcagggcggggcttgcagaccgggttgaagtccagggcccaggaaccctagggtaaccgaaagcagcctctgggttgggcctgcggtggggcggggctagaggtgtggccgcgccctaaacctggcgcaaggccggtacctaaaggctcctgggagccaaaagagcaagtcagggaactagctttggttgggttcggtggtacacaaagcacaaggcctgggttggggttaggaggaaatgagacttgcggcgggtcggggctgaagatgtggcagcgccctgaacctggagaaaggctggtacgtaaacgcctgcgtcgcaatctggagtcagctggagtgtcccggcaggtgaggaagagctggggcgctcagttgagtgctgggagccaaagaagtaataactacctttggttgggtgtggtggtacacaaagcacaaggcctgggtgggggttaggaggaaatgaggcagggttggcctcagacaccaaggcctatcctagggaaatggagatggacaggcgccatggtctgacaactatcttgagtggtgaaattgaggggacttggtgactgagtgaatggggaagagggagcgctgggctagtggtggttccgagtttcctggatgtggtgtcattttctgagagggggagagtaggagaagggtgagcagtgataagtgtagttctaaggaattggggtggccataggcagtgggcagctgatcgtgggggtctgacgcacagggagtggcacatagagaagtcacagggcagtgagattttcaggggaagggtgggggtggaaggagctgtgagtgaaatcctgtggcacaggactgggagtgaggaggggtgagagatagaagaagcctcctaggctttctagtctttccctcaaaccccctcagacctctgagctatgaaggagggtgggttaccctaccacaagggcagaggcctactcagggcctgatgctgagatgcaggatccctcactccaggccaggccttccccaccctgcagagcgcccctacaccaggtgtcgatattgattatgcaatagaaagcaggaggcagctccttgaggggggctgggcataaactcacagcctgtaagtgacggcatatggtgggaaagagtccggacccacccagaaacaggtttgtgaccttaacaagtcacttaactctctcagatcccagcagctcatctgttaagtggagatgataccaacctattagggatgttgagatatgttaggcacttagaacagtgccaggcagaaagtaaatgtagccattcttggagttgagggttggggcacagtgctatgtcttacgttgaggagccagggctgggcacatacctataatcccagcactgtgagaggcgaggtgagaggatcattcaaggtcatgaatttgagaccagtctgggcaacatagcgagaccccgtctctacaaaaaataataataataaataaagacccaagtgttggaactgagctgcactcatcacgctccagtgtttgaaggagggatgagctgtatgacatcatctttcctagcttagtcttctgcgttgtggggcagggatattatctaataacatgaagcaactgcattaaagtgatgagtctgtaggtgtgatacaattgtcactggcctgctagagttccagggggtttggaaatagccctgctttaacattagagtcacctcgcaaaaagcttctaaaaatttttaaaagctgccactttttcctaccacagaccagttgaatcagaatgtatggggtcctacagggacatatgcggtttttaaaatatgttttaggtaacta

SEQ ID NO: 1881291 - DNA, 4001 bp, Homo sapiens
ctggttaaattggacttgacaggtgaaagatgtcaggctgtgtgtggtcacattgtacatatgcatgcctgggggttaccaggctgtatgcaaatatacaaggaagaggtaggctctgagaacctgccagggcccctgggatgagctgtggatttttgcccctgatcccatgaattggagggtcctctgctcaaaacatatgatatacatgtcttcttttaatttggtatcgtctttaggtccggaagagaaaacattcccttccttgtaccaaagtcctcagctcaggttccctgagtccacagagggttgcctcagacgaactgggatctgaagtcctgagaaagcaccagcttccaccactcccaagtcctggagggtatccagtaactgctcccaggcagcaccaataaagcaattctccagaaagatgggcaggcctcccacaccatcatgcagggtacaggggcactcacaccaggcccagcacctgtaaaaggaaggagacaggagacactgggactccaggtagctcatgtcactacctccatcctctctttagcagatctttctagagcagatgccacaactcttaatactccagcagaaacaagcccaaggctcctatctaaaggaggcccagtgggctcaaccctctgcagacaaatgacccaagacatgctatccagctccatcaatgttaatccttatgacttctgtcccctacacctctagtggctcctaacgccaaaattcatgcttagccctgcaacaatggttctcaaaatgggaaacctagaccagcgttatcagcatcacttgggaacttttgaaaaaagcaatctcagatttctgaacccctgccctcccagaacttgggagtggtggaagctggggctttctcacccacaaccagcgttctgggagtagaatctagtcatttttgtttttataagcctcagagatgattctgatacttgacaaaatttgagaactacctccatatacaatctgtctccctggccttaagtattagggccttaagtattagggccatatcttcttcctaagagaaacagaggcccaacaataagggactagggtagatgcctggccattttcacattatcaatagagagcagcagagagatgtagatatgtgtgttctagaaaaatctctccagagcccagtaaagggcgaggtgggtggaaatcttcccaggaagcctaggttggcagtaccattcaataagagaagaccaagatcccaactccaccaagaaaatggggaagagggcaagttctgacagacggggacctcaatccaaaaagagttgctgaggcaaaggaagacatggaaggaaaaggaataagatatggggcagggtcccagactggccccacctccagcccgtggtccttggcccctgttgcgctggcctccacagccaacagctgctcgagcgtcagagatttggcatagaagtgggccacaacacgtggccttgatccggcgtgagagctgcggtagtcagggcgctccacgcggaaggcggccgccgcctcgcccagcagttccagcagaccacggttcagcccgtcctccaggctgctgtcttgcgagtccacgaatccgccagggaagcccaggcgcccatcaaagcgcatctgcatctgagagaggaggaagctgggattggcagggacacccgagagtagcgccgcaaggaaggtgcaaggccagagcggagagtggccgggcgcgcgccctcctcaccagtatggcgtagcgcagagggaggcggccagagagaattccagggtccggcgcgtgcaggagcgcatagcaggcatgcctctagcctggccccagcgccagggcctcggccagctccagcctgcgggccctggccatggcccgacactgctcttccgctgttccgaaggcctacgagggcacaagggcgaatctcacctcggaccaatccgagcgtgggcggtgccgcaaggcaccagccctgcagggataagggggaggaacctgggcgccttaggtcagggcgcagcgaccggtgccggaggcagccaatcagggcggggcttgcagaccggactgatgtccagagcccaggaaccttagggaaaccataagcaacctctgggttgggcttgcggcggggcggggcggggctgaaggtgtggcagcgccctgaacctggagaaaggctagtacataaacgcctacgtcagaatctggagtcagctggagtgtgccagcaggtaagggagagctggggcgctcacttgagtgctgggagccaaagaagtaataactacctttggttgggtgtggtggtacacaaagcacaaggcctgggtgggggttaggaggaaatgaggcagggttggcctcagacaccaaggcctatcctagggaaatggggatggagaggcgccatggtctgacaactgtcttgagtggtgaaactgtggggacttggtaactgagtgaatggggaagagggagcgctgggctagtgttggttccgagtttcctggatgtggtgtcattttctgagagggggagagtaggagaagggtgagcagtgataagtgtagttctaaggaattggggcggccacaggcagtgggcagcttatcgcggggatctgacgcacaggaagtggcacatggagaagtcacagggcagtgagattttcaggggaagggtgggggtggaaggagctgtgagtgaaatcctgtggcacaggactgggagtgaggaggggtgagagatagaagaagcctcctaggctttctagtctttccctcaaaccccctcagacctctgagctatgaaggagggtgggttaccctaccacaagggcagaggcctactcagggcctgatgctgagatgcaggatccctcactccaggccaggccttccccaccgtgcagagcgcccctacaccaggtgtcgatattgattatgcaatagaaagcaggaggcagctccttgaggggggctgggcataaactcacagcctgtaagtgacggcatatggtgggaaagagtccggacccacccagaaacaggtttgtgcccttaacaagtcacttaactctctcagatcccagcagctcatctgttaagtggagatgataccaacctattagggatgttgagatatgtaaagcacttagaacagtgcaaggcagaaaataaatgtatccattcttggagtcgagggttgggacacgctgctgtgtgttatgttaaagacccaggagttggaactgagccacactcatcaaggccccagtgtttcaagcagggatgaaaactgttaggcatcatttttcctagcttagtcttctgagttgcagggtggagatgccaaatactaacatcagatgggcagatcaaggtgataaagctgtaggtgtgacacaatccatgttggcctgctatcattctggggacttggaaatggccctggcttcatgttacactcaccttgctctaaaagcggatagcaactgccaatttccgggttccagccagagcaactgaatcagaatctgtggaggtaatacagggacatgtggcttttcaaagatgtttcaggtaactaatagccaaggtggagaagaggtgatctacccctctccccagcatttcaaaggtaaccttctctcctagattagctacttttaaggatttagggttaaacatgccctttccagatcttcaggctgttctttctttcctggttgcttgaagagacttttaaagatggactcaactatttataaggcaacatgaaaatctataaaagccaaggcaacagctatacaggaattaatgctttggagaccagagctttttctggatgaagaaaatggaagcccataagaacccccaactttgccatccctttcaaatccctctctgcttctgcctcacctccccacctccgccaaccatcccccattcac

SEQ ID NO: 1881292 - DNA, 4001 bp, Homo sapiens
aggcagggtatggtaacaaatgccaattcctggttaaattggacttgacaggtgaaagatgtcaggctgtgtgtggtcacattgtacatatgcatgcctgggggttaccaggctgtatgcaaatatacaaggaagaggtaggctctgagaacctgccagggcccctgggatgagctgtggatttttgcccctgatcccatgaattggagggtcctctgctcaaaacatatgatatacatgtcttcttttaatttggtatcgtctttaggtccggaagagaaaacattcccttccttgtaccaaagtcctcagctcaggttccctgagtccacagagggttgcctcagacgaactgggatctgaagtcctgagaaagcaccagcttccaccactcccaagtcctggagggtatccagtaactgctcccaggcagcaccaataaagcaattctccagaaagatgggcaggcctcccacaccatcatgcagggtacaggggcactcacaccaggcccagcacctgtaaaaggaaggagacaggagacactgggactccaggtagctcatgtcactacctccatcctctctttagcagatctttctagagcagatgccacaactcttaatactccagcagaaacaagcccaaggctcctatctaaaggaggcccagtgggctcaaccctctgcagacaaatgacccaagacatgctatccagctccatcaatgttaatccttatgacttctgtcccctacacctctagtggctcctaacgccaaaattcatgcttagccctgcaacaatggttctcaaaatgggaaacctagaccagcgttatcagcatcacttgggaacttttgaaaaaagcaatctcagatttctgaacccctgccctcccagaacttgggagtggtggaagctggggctttctcacccacaaccagcgttctgggagtagaatctagtcatttttgtttttataagcctcagagatgattctgatacttgacaaaatttgagaactacctccatatacaatctgtctccctggccttaagtattagggccttaagtattagggccatatcttcttcctaagagaaacagaggcccaacaataagggactagggtagatgcctggccattttcacattatcaatagagagcagcagagagatgtagatatgtgtgttctagaaaaatctctccagagcccagtaaagggcgaggtgggtggaaatcttcccaggaagcctaggttggcagtaccattcaataagagaagaccaagatcccaactccaccaagaaaatggggaagagggcaagttctgacagacggggacctcaatccaaaaagagttgctgaggcaaaggaagacatggaaggaaaaggaataagatatggggcagggtcccagactggccccacctccagcccgtggtccttggcccctgttgcgctggcctccacagccaacagctgctcgagcgtcagagatttggcatagaagtgggccacaacacgtggccttgatccggcgtgagagctgcggtagtcagggcgctccacgcggaaggcggccgccgcctcgcccagcagttccagcagaccacggttcagcccgtcctccaggctgctgtcttgcgagtccacgaatccgccagggaagcccaggcgcccatcaaagcgcatctgcatctgagagaggaggaagctgggattggcagggacacccgagagtagcgccgcaaggaaggtgcaaggccagagcggagagtggccgggcgcgcgccctcctcaccagtatggcgtagcgcagagggaggcggccagagagaattccagggtccggcgcgtgcaggagcgcatagcaggcatgcctctagcctggccccagcgccagggcctcggccagctccagcctgcgggccctggccatggcccgacactgctcttccgctgttccgaaggcctacgagggcacaagggcgaatctcacctcggaccaatccgagcgtgggcggtgccgcaaggcaccagccctgcagggataagggggaggaacctgggcgccttaggtcagggcgcagcgaccggtgccggaggcagccaatcagggcggggcttgcagaccggactgatgtccagagcccaggaaccttagggaaaccataagcaacctctgggttgggcttgcggcggggcggggcggggctgaaggtgtggcagcgccctgaacctggagaaaggctagtacataaacgcctacgtcagaatctggagtcagctggagtgtgccagcaggtaagggagagctggggcgctcacttgagtgctgggagccaaagaagtaataactacctttggttgggtgtggtggtacacaaagcacaaggcctgggtgggggttaggaggaaatgaggcagggttggcctcagacaccaaggcctatcctagggaaatggggatggagaggcgccatggtctgacaactgtcttgagtggtgaaactgtggggacttggtaactgagtgaatggggaagagggagcgctgggctagtgttggttccgagtttcctggatgtggtgtcattttctgagagggggagagtaggagaagggtgagcagtgataagtgtagttctaaggaattggggcggccacaggcagtgggcagcttatcgcggggatctgacgcacaggaagtggcacatggagaagtcacagggcagtgagattttcaggggaagggtgggggtggaaggagctgtgagtgaaatcctgtggcacaggactgggagtgaggaggggtgagagatagaagaagcctcctaggctttctagtctttccctcaaaccccctcagacctctgagctatgaaggagggtgggttaccctaccacaagggcagaggcctactcagggcctgatgctgagatgcaggatccctcactccaggccaggccttccccaccgtgcagagcgcccctacaccaggtgtcgatattgattatgcaatagaaagcaggaggcagctccttgaggggggctgggcataaactcacagcctgtaagtgacggcatatggtgggaaagagtccggacccacccagaaacaggtttgtgcccttaacaagtcacttaactctctcagatcccagcagctcatctgttaagtggagatgataccaacctattagggatgttgagatatgtaaagcacttagaacagtgcaaggcagaaaataaatgtatccattcttggagtcgagggttgggacacgctgctgtgtgttatgttaaagacccaggagttggaactgagccacactcatcaaggccccagtgtttcaagcagggatgaaaactgttaggcatcatttttcctagcttagtcttctgagttgcagggtggagatgccaaatactaacatcagatgggcagatcaaggtgataaagctgtaggtgtgacacaatccatgttggcctgctatcattctggggacttggaaatggccctggcttcatgttacactcaccttgctctaaaagcggatagcaactgccaatttccgggttccagccagagcaactgaatcagaatctgtggaggtaatacagggacatgtggcttttcaaagatgtttcaggtaactaatagccaaggtggagaagaggtgatctacccctctccccagcatttcaaaggtaaccttctctcctagattagctacttttaaggatttagggttaaacatgccctttccagatcttcaggctgttctttctttcctggttgcttgaagagacttttaaagatggactcaactatttataaggcaacatgaaaatctataaaagccaaggcaacagctatacaggaattaatgctttggagaccagagctttttctggatgaagaaaatggaagcccataagaacccccaactttgccatccctttcaaatccctctctgcttctgcctcacctc

SEQ ID NO: 1881293 - DNA, 4001 bp, Homo sapiens
caagcccagcttcaagtgaccaacaaaaggcccgagagctctgatgctgggcagccctgggcccaatcccagaactggcacatggtgactgtggtctgctagctagtccctcagtctcccatcatcaaagggggacagcaggaaaatgcacagggcaccgagaggactgaaggacatgaaggcaaagtgtgcggagcggcgcctgccctcaccacgattgccatcatcctccactggaagggccctttggggccgggggttgctgaagaccctgtcccgtaaggagcagctggaaagactgggagactcagcctggagaagagcagcctctgggggtctgggtgctcccaagtcagcagggctgtcctgcacagggggccctggcagggactgcagacccagggggcagaagcagcacccttggagagaggtggtcctcagaggtagaacccaaacacagtaaagaggcctttgtctcgggcacagctgccctgggaagcagtggcccatcaccacagctggctgtcctggggagttcagatagtgccagtctccaatagcacgtctgttacctgagagatgatgaccaccttgccagtctctgcatccaccacctgcacaagcccagacacagtgcccttccccatggtgagacctggtaccagcctggaagcgctcaccagtgcaacgttctagttgctgatggagaaaaggatgttggactgaggctgggggctgccctcagaggtgacctgagtggggaggaaatagcagtgcatcagtgcctactgtgccaggcagcctgtgcctcccccagatggagccagggcctcagtgctgatggcttccacctctacacagtcacctcgtgctaggacagaggcagtgcaccaggagctgcggctgctgtgcagtgggcacactggggctggagcatgatgtggcttctcagctttcacctgcatcatgacccggataagcagtgtcgcgttcctgagaatcagcccgagtggaggaaaaaccggttgagacagaggagagaaggaactgctgtgccctgaacccatgacttacacaccacatgtttcatgagaggaaaactcagggcacgaacatcacccctatgtgagcagtgacctgtgggccccagggtcctgggggctgcctcccagccactggccgaggctctctggttctctggggcatgttctgctgtttgtgactgtgctccacttccccagatgctaaacaccatgaaaacaaggacctttcatgcagctgagccttccccttggatcagcaattctcagtgtgtggtcgctgactagcaatgcataccctccagccaccccggcccatggagccagaggcagccctgcatctgtgtcctaacatgccctctggagatgctggtgtgggtcaagctttgccatccactgcctttaggactccccaactcctttttcgaaggttacctccttccctaaatttctcccaatttctgctgaaaaacaccttagaatcgttcttgtcagtgctctcaaaacttttcagatgaggatcaaggagctcagcaacaaggactagcccaggaggagaccagggatgccggtgccatgctgtggaggcggtgaagcccccacctgctcctcctgcatcccccccaagtgcactcctggcaggagaaggtgagtgaacacaggaggcatccagggcactgcttgtgtgggaggattggtctctgcagtgctgtgctattgctggtcagaaacaaatttcttattgccagaagaaaggtgcgagtccatctagaggcacagacagtacccacgtgcttcagatcacagattaatgatgctcaccagccccagcgtggcccaagcacagggaggatgttggcagggctggtttaatgttgctgctgtaaatagacttggaatgatccccgggccacgactgccatggcttgtggctgcagtgctgctcctgtcataacctaacaccccgagacagccccacaccacataatgagcccatgagtgacctcagagctccccttgtccaggaatcacctacttcaggagttgcctttgtgacatctctgctggaggaggtgaccatcaggaggactcacaccaatgtgacaattggggaagctgctcggagcttcaggtccatgaatgggaagtatttggccagaaggggattcttgtgcaagtccagcatgcggatgtttgccttcactgtcttcccaatctccgcctgcatcgtgcagacagaggctcagggatggcctctgagagaccaatctcaccatctatggtgccccatgactttctgagatactaatagcatcaccaacctcaacccacagacctgggaatcagggatgagtcacccaggtttacctctggactatcagccagtcagcaaatgaaaattgatgaagcgcttattccaaggggtgggtcaggggagggtggctggggatacttacaggcataagttccactccctactcttaaataacaatacactaattagggagatgagacactgcttagaacagcagcaggcatccagtaggagttcagtaaatgctcactgactgaatagctcacacctggcagtgtagaatatgataagaaccttaggaaatgagagtcagaaatacacagtgaagaaacagaaaattagcaaacagcagtggaaatgagattataggaggagtatgtgaggctggatagagcatattagcttcttaaggagcctaagatgcccttttaattaccagcccttctatccactcaggatcccgaccacaaccctctggaagcccagcttcagtcacctcagatatttggagtaataaaatttcgctattgacgtgaaagataaaacgagatctattccttttccttttttgcaatggtgcttggcgtgggtgagctgtactcatttgtcactgaaactccagagaacccaaaacctgtattttcagggggaaatccatgctcagcaagacatgtgcctggctggttaataacctacaccagctaaaagacaagaattcccaggtcacagctaatttagaggcaacttccagcaggatttactgccaagcctcatggggatgtcacctgggatgaagaagttccttactggagggactctgcatccttaacatagagcgaaggagatagaagacagctttgcaagctcacaggggaagggatgcagaccccaggagcaaaagtgaaggccataggaaacatcccacagccgcctcactctccgttcctgcaggtctgctgagggggccccatcatgaagcttccactgaccttatcaatcacacagatgtacagctcctgaatgtctgacacgtaaacgacagccttggccagggccgggaagatgaggcacaagtcataggtcatgatgctggtcgagccagggagcaaagggtatacctgcaaggttcggggctggggtagaggggtgggtggtggattacgtggctgcagagccccccctctgctcaggtccgtgagcaatgcctcaccctcagcaccagcctatcacctcactggcagagccctccaggccagcactagaaagcagtggacaagggaaatcctaccccaaatagtgccctgcccacctctcatcacaagccccactgctggccaggagcagggattgggatataacatgtcagtgctcagctagatctcaccgaacattgatctccaatttgcacattttacaaagggaagaaaatggaagctgatcaaagaggggcagtcagcaaccttgggatgtgcaggaacttggggacagagtgagaatgcagtcccaggatgccacgtcctgagctggccacctgccgctgcagccctggcggtagagaagcaccccgtgaggtcttctgtgaaactgcaagacagggactggcagaaaacgagacagctacttttcagcggcagctctccctgaga

SEQ ID NO: 1881294 - DNA, 4001 bp, Homo sapiens
tctccatatcttaattgtgtttttttatagcacttttgtttagtaatttgtatatgcttggctgtattctcagaggctgtttctatttaatgttgtcaaaacagctcataaaaagtgaaaattcggtcagactagttatttgatattatatatgaaatcaaaacaacctgaaacattatcttttaatttaaataaagaaccccaaattttaatcaaatgtatgcaaaggcacatagaatatatgacttaatgtacaacctttattaacttgatgatggaaacctgttcctagggacctttacttgaataaatgaaatatcaagaaaaaatactaacttaagaataataatttaataagtaagtaagctattatgatcttcaatcagtcctgagagaatcatggttgagaattagaaaatttagaccagtaagatcaacactgttaaaaaaaaaaaaaaatcagtattttttctccatattttttatatatctggatcattttatttagcacttattattgcactttccttttcactttttaaactatgctgttttatttttctgagacatctgatttactgaggaggaaaatggaaatgcggtacagagcccaagggtatgacggctttaaatgagtttccatttctgttttaagttaaccatccctccctagcttacatctgttcctttgttgcacccttggtttaacattattctcctccccaatttcctcttctcctcattgtgaactcgtggcagggtctgcttggtgagctcattctcttacaacaacaaattcaagagcatgaagaggaagcgcgcagagccgctggccaatatagcacgagctatgcccaacagaagcgcaaggtgatggatggtttaagggggctaccgatacattcacactaatcagccatttctgccaagatcatgtcacctcaatctgttcatggactccaaatacaagaaattaatttgacaaagtgaaaatataaaagatgcatcatataaatatgtaacttttctggagtgggtagtataggtaaagccaaaagaaacaaattcaagcagaggaattttggtttctgaaaattaggttgtctgtagggtccctgtatttatacttagaacaaaattaggaatttctgtttatgtggtccagttattgagtcaccctaagtttgtaggcatcttacctacctacttgctccccaagtttttatttctaaaatgaaaagcattgctgtagatgaccagtttacactaaagaataacatttatttatttgttttagctaaagtatatggacagggaacattcatattcttgtagaagaaaattattttgacttttgggcaaaagcatgtagttcttatacactttgacaaactcattgcgtacatttttcacattaatcaaagtcagcacaaataaattttcaccttggaccacggagggtttgaacactggaaatttgatataattctggttgctaaagaacaagttctaataaaagcttaagtgtataccaatatgtggctgttggtgcaatcagcaggtccgtaaaaatatgattttaatggttaggtaatcccacaacggagatcccaaagttcatgtttggaagagacttttgggtcaaagtgaaatcagtgtaatgaatttaaaattatactctgagatcttgaaatcagctaattatgttacatcttattagctcagaaaagttttgaagttatatacaaatgctagtcaggaaaaaagattcagtcatgtaattcttgtacattctactatttaaatcaaccaatattatagattatgatttagtgcagtaattctgctggctaaccttatctcatttggtggtggttagtacttcagagtactcaccatagtttcatttatgttttcagcatcacttcctggtttttctcaattccatggctgtggaatcaattcatatgtatatttagcttcggtgagcaaaaacatagctagaaaaagaaaagaagtgagtttcctacctggttaaattaaagtcgatgtgttaagccaaggaggacttcttttgaatggtactttaacaatccctgttctgtatactgtgaatatatcatttaaatagcctaataaattggatgcttaggctgagccacctatactttagttttgttatggaaagaagggagaggagcaagtatgttcttatatgttacttagaaataagaatgtagctgtagttacacattgttcttaagtttttttcgtaagacaacttgaaatgagtcccataggcctgctatttaacattctaagatatgacttaaggttaatgatgagcttttgaatctgacaattcaagagatatccataatgaatactgattcattttctacattgctgaaagctaatgttcattttaagcctactttagtagcctttatttgggcttagagatgttattcctctttctgatatttattgggttatctgtttaacccttttatatctccctttcccgatttgtaaattagagactggcaagactttttaccctgagtagagcaccaaacatggcttgtttctgcccacactgtagttaccttgaggggaagtaaatgggactttaaaagcaatttatgctcttttatagtgaaattatccctcttactatcccgaaagactgttaccttacaatatcctccactcctttccccctgtagttactatagagatgacttttcggttcttcactgccataatgatcaaaatcctaattcatgagatttttatcattccaggcatgtgaggtttacttgatgcataaaaccgcaagtactttttgttgttttttaattgttttttctctcttatcttcttgaaagtctaagtagatcatcatttttgatgtcttattagtagcaactaataaattttccctgtatcttctcagcaaaagaactcaagcagagacagaagattagaactaccattggtagttttgcttcctatggatatgttcacatacatagaaatttttacaatgacctttttatatatgtatttcagaatttcagaatggcctcaatgccttaataggaagaaatacttgaaatttttaaattagggcttggttttgtgaggagctagtaaaggtttttctctttcagctttagcttgtttctgcggaggattccgctctttctccatcagtttcatagccctggaattgtagaaaagctctggtttcaagaccattgatatccatttctgtcagggtgagttttaaatttatttcatgatgcaaacaatatattgaacaacaggacatgaacttgttcttgttgtaagtggctgaattttatcagtaaagcacatcaaaataaaatataccccaattgctagttaagacctagagtgacagattgaaaatagcttgtgttattctcttaagaaaatatataaaaattatcatctcatcaatctttaatgtttgttttataaatctaaatgtttttatattgtttcctaggaaatattaggtctaattttttactttaccaccagctgtcttttattttactctttttttgagacggagtttcgctcttgttgcttaggctagagtgcagtggcactatctcagctcactgcgacctctgcctcccgggttcaagcgattctcctgcctcagtctcccgagtagctgggattacaggcacatgccactacaccaggctaattttgtatttttagtagagacggggtttcttcatgttggtcaggctggtctcgaactcccgacctcaggtgatccgcctgcctcggcctcccagagtgctgggattacaggcatgagccaccgcacctggccagctgtcttttaatataacattatgattaattgtgatgttccattaaactaagcggagaggaaacatgctggtaaaccatgtgtgagttattcattgtaccagaaaggcaaatgatacatt

SEQ ID NO: 1881295 - DNA, 4001 bp, Homo sapiens
taaaccccagcctgcccgtgaagctttttcctgcccattgatttttcgcttatcgttctccccatttgctaataggcacagttgcttgatttttgtagcaccatatgccctgaggtgcttgtgtggtagaaatattgtcgtaatttctgtttttattaaaatcctcatttttccaaagcctgcttctctttaaaacatattttaattccattttatcttcaagtttgcatacatttttgtggctgggctggctcatttgcaaaaatctctgggggatgggggatctgaagattcttctgcttaagtcttataaattctctcagcagtatgaaaccgtttctcacattcatatttttcagagatgggggaacactgttctgccatttttgatgaccttgagagagttgttactgttttataagtgaaaattcgcagagattcagagaggggaggcgtgcaggggctcccaggagacaagtaggactttgtgagagaaggggagtgtggatgtggataagcacggggacctgattatggaaaacagcacttagaaaggatgataattatccatctctttgaattccacatcagagtagcggaatcaacaaacccttgaccctgaaagggaaggaggttttgtgtctttaaaactccatcaagacctgcttcttcaaaccctccattccttgcagtgcctgtctatgtgggtgctttgtggttgccagtagattggtatttacattgccatggacctctttcagacagagttgacctgctgactactgctgcctttccatctatgtacccccaagttggaccgcgatgggggtgggggggggggtcttctctttgtgcagatggactgagctgcagtgtgggtggattgaaagtgtcctctaagatgtttactgtcaacatggtgtatgaaaccagcttaactctgatatttacttgaggctgggtaggagaattgtttacaaatcacattgggagagaaagggcaagttctcagaggctgtgggagagaaaacagtcctaggtccttgtttaaggttagggcatggcttgctcaggatttgtgccaccaaggggcagtgtgccaggctcccatggccgtccttctgtgggcgggacttcagggccaccagtcatcccggatgactcagcttctggggcacctgcaccagccttaatttcctctgctggagccactgtctttgagaggaattgtcagacacagagggcatgtgctgttgatttacagtgggaaaggatggaggggtttgttttcacatttatgtgtgtactccgtatcatgcggctggatcttgtggaagactttctggctactagaagtcagggacaagctgggtctaattttcgagtaaggcagacagctggaggaggtgtggtccccgaaggtctataaacacatcacagtgagtgtagcagtgagtgggaaagatgaggatttcccctgcaatggcttgtgagcaaataggaaatcacagctttagaagaatgaatcattctttgcttcatgaagcttatggcagcctcagtggagcaattgatttagtatgcagtccattcttggtgagaacagctaatttcaagcagaaaataattgcccgcaaaatggagctacttctcctgttgagatgtttaaggactttgcagcccactccacctgttgggtacaccatggtggttggatttcacttggttttgattgtcctttttcttcccaaagcagaatgcccaggcactaccctctcctcccccagctggtgctggcatgagaggaattctgctaatacagattactgcccaccgggtcactgcagaggaagttgcagctatagcacctttgccattgggagggatttgtgtctgagctctctgacttccgtagcgtagactggaaatggaagctcacagggagctgagacagccacccactttcaaactgacctgaaatccagaagaggcaaaagggaggagagccaggaggacaggccagtagaagggaggccctgctaatctcagcattagccattcagactcatggcagcggtggccttggcaccaggagcagtcacgcagcagcacggggtgtcatgaggtggagctggaggagacccccagggccactggctgtaagtgctgggctcctgtgtgcttctacccctaacttcccagtgtagaatcagggtagctcacagctcagagacttccctctctggctcttcctctcagggttagcataggtaaggattcctcaattatttcagcataatctagcaaagcaacttgccaatgacgtcagataatacccattatgaggtggctagagaactgggcacataataaaagaaaactcagcttttggctgggggaatatcctgtgggcttcactgagatcttcccaaccatctctttagaattggggttatttagagctgattgagaacaccttaggagtatgtctgtggaaaacgtctatttacgttgaagttttaaaaatgcctaccccaggagggaaggaacaccgttattacctctctttggaatgttggaaaggaatggtccgtgtgggtatgtaaggccagacaattttaaacaccttgaccactaaaataacctttgtatgttagaagtgcctgtagatataagatgattctgtctaatgaggttagtaaattgttcgttttttgcatggacatttggacaagtctgtatcctttcatgtttaacatctttgagcttctgaatttctgtatattatgtctgacctgttattgataattggaaagaaatgtataatgttctgtgcagagtgcttttgcttatatgtaagcaagcatcataagaacataggtaaatgtggagtgtggaatgtggatacttctttcaatagaattctgagggcaagttaaccttgtaaccagagtccttaatacttggatactggaaaattttatgtgcaataatccccttgcccagtttattaagttgcctgttttctatgtaatgtgaaaaattggaattgagtgattgaattaataaacttgcatcgaggaaagcagggtatgttggccagtgtgaatcccagtagtatcataaagtttcagttttgccttaaattttcatttgttgtcttcctccctaaattaatgccaattctcagcattttcttatacctgctagagtgatcctaattgatttgggtagaaatagtcttagagcacgtttttccataaataattttagtccctggataatccaacttttacttataaacagaaaaatttatattagatatgaagtggcctggattgtgcaagttaacaggagtctaactttggtaaactcctacttgctaataggcaaaatgaagggggctcatacccatatactatagttagtttcttaaagaacagggagctgttttgtcaggggaagtccttacactcactaatcagggatgacgggagagatgaaaggggatatgcagtgtccaaggcacaggtccgacccccaggggacttgtctgccccgtggccaataggactgggtcacagaggagctctgcccgggacaggattgggtttcttctgtcattgcaaagcatgtgaattcatacactttatttctaacttctattgggccagctggtgatttttattgattatttcattttagccaaactcaggctctgaattggttttgtctgaagatgaaaaaagtgacaatgaagataaggaagagacggaattgggcgtcatggaggatcagcgtagtataattcttcatctcatttcacaactcaaacttggaatggatttgaccaaggtaggttggcatgtcccctggatttgtggtcagttgttggggttctgtctctatcctcaagccttctctatgcacattcttttcgttgtggtgagattggagaagaagagtggggaaaaaggccagcattgctttcaagtatggat

SEQ ID NO: 1881296 - DNA, 4001 bp, Homo sapiens; identical to SEQ ID NO: 316059

SEQ ID NO: 1881297 - DNA, 4001 bp, Homo sapiens
gggcttgccctctcctgagctgacaagaacatccacagcatacactttatgtatgtcaaattcagctttttcatggtccttcttctgctggtctgtgggattctggataatggttttttctccatcaatgacatgctgcttcaactggtgtgacagcataccttctactggcgtgcagttaaatgagtgggcaactttgttccaggcttgtgtcacttgtgtgttctgatttccaggtttgaccaggcgtagggcagcttcagcacaaaggtgagctgccttaataacatctgccttcctccctgttacttggtcccctgagctacatcaaccacaaaagtatgagctacattagcgatgaagccatccacatggaccccaagttcaatttttaccaagtcaccttccttgagaatataatcctggttgctcttcaaaggggagaagtgacatacacagttatttactgaaatgctggtgggaaaagcaatacctttcttcatttccttttctttcttgaagattttccctgtttcttccataatcacggcatcacctttctcacacaggctcagtaccgacacacctgagctagatgcttccaccaaggaccgaagtacccctgttggcgatgtcaccctccatcttatacttggtcacgaccaggtcctcagcgatagtttgctcctgctgctcatccttgcccgacatcttcctactaccaccactgcaatctcgtttcccctgagccgccgctgcctctgtctcccttcccagtcacaggctgtggtcagagtcccctccatcctcgaggagagggtgagggaaagcgcgagcaagcaagggagcgagcgggcaggcaggcgagaacgagaagctgctcagatcactttttaagatgcctttgtgtcttattatctttacagttgggatctataaacatgggccctattatccaccatgcagctagaaagttaacatgcttcagaacagggcatgcacaaaagagtagaagttagaattttttcattaggaaatataaaatttttatttatatttgaacatatttaccaacaaaggcaaatatcataaatctaaaatgaacagcctcaaaaggcacaatgaaaaatactgcattagcaatactgaactcagcaactctgaaagcaaaggttcttcaagactcagatctcctttatgccctgctgtttcagtttgaagtctaaaagactatctactttgtgtctgacttactttcctgtcagacaggaactggaatttgaactttgctctctaaaagccaaaggccaactaatttagaaggagactctcacaatcaatgatggtttattctagtttcattagttctgtctaaagtgattaaaggatttgattcccagataaacatgatccttattgctatttttacaaaccacattaatttctatacttagttctgatcacttgtggcattcctgagacaagtctggattcatgtagcattccaaccctgagtgccttttcaagtttccaacagaatcctgtgctggtaagtgatgatacctttattgtagtagccccaacgtgtggaagttgtttcctgtgacctagactcagcccaacccctccacttgttgaaacatctgcaaatactttgttcatttcagagacatctgaccacagctacgctcccatctggattgcttcctttttccttattgctcatgcaaagcatcaataatctggaaaggcattcagtaagagaaacagggagggcctagggattagaatgggaggttagttcttatggcttttctctcatgctcattcattaattgattcattcaaccatcatcacttattgggtagtatgagcaatgcaaatatcaataagcagcagtatctgtcctcaaacagggaacaatatattgcatgctacatttattgtttcaggtggggaattatattaatttagagtaataaactatatttaccaagtatcttctatgagtaaagttccacaaatgctttaattctcttatttttggtagatacagtatttatggaatattttacttaacatctttaatctgtctccccaccttgaaaccacataaaagtaaaagcaacactctcaaaagccttttgtaaataatcattaatttaaaaatctcataggaatctttacttaagtgaaatgacaaactgcatagtgcagagtaataagattccttcatatgtttcattttctttaggcctttatgttaagctacaaaatgaactgtttaactattgctaggaataaactatattttaaaaggtgttaatccagttggatcatttttatgcccttataagatattaactgcaagtttgttttatcatttatattatgcacacatttgtacatttttaaaagttacatttaaaaggttacatttatgataatcacatcatacaaagatctaattaacctggagttgttgagcaataattgtaccttcaaagtgccaggagatttaaggtgtatgcagggtgtggcccatccacccagaatttcaaaaccacatggttcttcaggtcctgttggggctcatctatttgcacgtctcccctgcaggagtttggactaatcaggtcactacaccctgacacagcagtctccagtctctaccactcattgtttgcaacatgacgtaatgtcaacagaccacagagaagttagcaacagggaagggaaaacactttaatctcaaggtcatccccagggttcagcaggacatatatcctatatcgaatcatctgatatcaaatcctacaaatgagctcggccaaaaggttgagccacgctgtctgactgtatcatgttctccagttgcaatgcaagactgaggcaatcagttgtgagctgacaattcttcctgtttgctaaaattgaaaagacaggttgttgtctatcattgctttgctttctttttgctgcaaaacatttcacacagtatcattatgccttagctagtcttcatttatctagatattagacatcttggaagctgatagggcttggttcacttcttcagccttggcttctcctcatcccccaatgttccctgtcttgcaactcatagcagagcaatgctattaaatacaacaagaaaatacatgccaaagggcaggtaggggttagatgcctgagaactctgaagaaaaagagagctactgtggccccatggtgcttttattcaagatgcccctatctcgggaggatgcaaaacacctgtgttggcagatgaagctaggtctggagttttatgcctacctacctcctccaccaggcaccaccatgcagtcagcaaactgcacgagtgcctatgactctggtaaaacttatacacatagacttaatatgatggcagagagaattaagaaacatgaggccaactttagtggggagaatgatgggaagcaaagtattgtatgcttttgtcttatgattttcttaacaggagactttgatgaaggactggtatctgccttctgattccagttaaaactgcctaccactgttctgccttcaactccctttccagaaagcccctctgtcattacttttccaaaccctcttaaggaccctctaccaagagcttagaacaggaaagggtttacgcaaagatgtgcacagtgcattactattcctaaagtaatgtgcattaaatagagaccaaaaacatttaaacattaagtaatcagttttgtctgttatctgttctatctccaatgcctagaccaatgtccgatacacagtggagctcttaatatattgattatatcgctagactttcattcactcgggaatagacaattataccaagaaggtcccttatcttcaagattccacgcatcaagtttagaaaagtcaccaaaagtttgttttctcctacgcacttcatacaccagaggtctccgcactcagaaaataccatcaccacaaatactactgt

SEQ ID NO: 1881298 - DNA, 4001 bp, Homo sapiens
ggttttgtgcctcaagcagggtaggggatgtgtgagaaaggacaaaggcagatatcacaaagactttttcaaagacttaacatgaaacattttttttttactttataaaatactgattttttaaaagaacatattttattagagtcaatctcaccattctttgtcataaagatattttatctaactcaagtttttgcatacccatttacagtcaattccattgttttgcttgaagtgaactttctattatatttttctagattatgtaagcgagctgattatgcaactaagagtgtggtaaatataagaattattataggatcaccatttttacacgtgacagctctggttgtttgtggagtaacaaagggaatatgaaaaaaaaaaaagttcgggcctgccctggattcaagtttatcattcctacacttgattaaaacacctaaatttaatccattttacaaatagccatgggtcctcagtccagatataaaaggaaattagatttcaatttaaaacaagctacaaacagtggaaaaccagaaaacactaaaataagacactggctaaataactacaacaaaatctcacttcttaaaaatccacgcctaaaaaaaaaaatccactagacaggaatgtgtggcagtgcagaaaggcagaagactgaagcgcacgtttgatctaattgtgtaagagcttgctaaatcagttactacttgaaagtatacttcagagagaagactgaaacttctagactgtttctagcatccttaagtaactgcagacacttataatactgaatgatatcctagttataaataattcttatccataacttaaatccatcttgaggctctactaagtaaatcttccttaacctacttagaggatgtgcagtagcgatgaaagtagcctttcttttctttttctttttttttttttttttgagacggagtctcgctctgtcgccaggctggagtacagtggcgcgatctcggctcactgtaacctcctccgcctcctgggttccagcgattctcctgcctcagcctcccgagtagctgggactacaggcgtgcgccaccactcccacataattttttgtatttttagtagagacggggtttcaccgtgttggccaggatggtctcaaatctcttgacctcgtgatctgtgtgctgggagtacaggcgtgagccaccgcgcccggccttaagcccctttctttaaggctcaagggcatattttcacactgcagtgcatcacaaccgttttcattcttccagtgttcctttcttctggtctccagccacctgccaggtacttctgattaattacatataagatttatccaagccaccccctccgtttctaccaactggacttcattctcttcagttcctgctagaatgcacctcctacctgaagtcttccctcatcaatgccctccatgatcagcctttgactctggaatcccttaatatattcctcagatcattagaggttttctgagtcatcatctgagatttttcattaaattgtggagtttgagcagccagtcctgagctgtcggactcagttccaaatagaagtcctagttaaagacacaaaaacaagaagatgggttagctgcggctcgaagagctggtgagcgcgaccacagggcagcttgcggacggttctttcggacaggacaagggcgagggaaacggcagaatggtgacgcacctgagtgcgcccactagacgaaagaagaccaactaagccttcgtgtagtgcgtagacaggccgacacacacacacacacacacacacacacactaacacacacgcaaagacagtgagggagcgagaggcgcatccccaggtagctgacaatgacacggccccgatccggacgcgggcttaaagccccccgacttccggagtgcccccctccccggcgacctccggagattaccgctggcgcatctctccgccctgcccggctccggcgccctcccctccccccgcagccgcagctccccgccccccgcgaacgcggctccccagtgtcctccagaacgcccgcgtggctgtcgggtttcgaaccccagggccgactctagtactcggcgcgcgcgccgccgcgtcgccgaccagcctgcggcccccgcatcaatcattaacggggcggcccgggctgcggcggcccgaggagggggatggtacggaactcgagacaggggacaactctatcccccgaagcggccgcgaaaccctagcctgggaggcccccgcccttcctcggtgcgcccgtccctccctccgcgcctcggctcgcacatccccacctcccgctccgggggcggcggcggcggaggcacccgcaccgcgcgatgcccagtcaccgctgccgcgctgccgccgcagtcagccgcgccgccgccgctgccgcagcgcgggcggccgcgcgccggtagcaggggcttggcgaggaagccgctgagcctcgcgcgctccgcgctcctggcggtcgcagcgctgcctattaattgattctcttattgatttatttaatttttaggagcggctgctcggaggcacgggtcttctcctaaacctgcagcgacgcccccggcgtgggcacaaaggctccgacggcggccggcgggggctgcccagcgcccgggagccggcgccagaggtcgcctgcgcgcgccctagccgagccccgggcaccatgccgcggcgcctgcagccccggggcgcgggcacaaaaggccctccggccccggccccggcagcttcgggggccgcccggaactcccactctgccgcctcccgggaccccccagcgtctgccaagccgctgctgcgctgggacgaggtgcccgacgacttcgtggagtgcttcatcctgtcgggctaccggcgtctgccgtgcacggcccaggagtgcctagcctcggtgctgaagcctaccaacgagacgctcaacttctggacgcacttcatcccgctgctgctgttcctgagcaagttctgccgtctgttcttcctgagcggcggcgacgtgcccttccaccacccgtggctgctaccgttgtggtgctacgcgtcgggagtgctgctgaccttcgccatgagctgcacggcgcacgtgttcagctgcctgtcgctgcgtctgcgcgccgccttcttctacctggactacgcgtccatcagctactacggcttcggcagcacggtggcctactactactacctgttgccaggcctcagcttgctggatgccagagtcatgactccatacttgcagcagcgcctgggctggcacgtggactgcacgcgccttatcgccgcctaccgcgccctggtgctgcctgtggccttcgtgctggcggtggcttgcactgtggcctgctgcaagagccgtaccgactggtgtacctacccgttcgcgctgcgcaccttcgtcttcgtcatgccgctcagcatggcctgccccattatgctcgagagctggctcttcgacctgcgtggggagaaccccacactcttcgtgcacttctaccgccgctacttctggctggtggtggccgccttcttcaacgtgagcaagatccccgagcgcatccagccgggtcttttcgacattatcggccacagccaccagctcttccacatcttcaccttcctcagcatctacgaccaggtgtactacgtagaagagggcctgcgccagttcctccaggcgccgcctgccgcacccactttctcgggtactgtgggctacatgctgctgctggtggtctgcctggggctggtaatcaggaagttcctaaacagctccgaattctgcagtaaaaagtgagcctccgccttggaggagactactggttcgcccatctgtttggagtttctgttgttgctattgttggtttgttttcaaatttcattgtgttttcttctttgctcaaggaaggtgctgcaaaaccatagggaaaaagttcactgct

SEQ ID NO: 1881299 - DNA, 4001 bp, Homo sapiens
gagtagctgggattacaggcatgcaccaccacgcctggctaattttgtacttttagtagagatgtggtttctccatgttggtcaggctggtttcgaactcccaatcttaggtgatccacccaccttggcctcccaaagtactgggattacaggtgtgagccaccactagcccagccctttgtttttttaatgaggaggtatgattgtaaatttatgggtgaacgtggcagggccacggtgcccatatatgaggtcaaatgttattctgaatgtctctgtgaaggtggtcttgcgataatgtgggtgtgcctcaaccaatcagttgaactgagtagaagactgacctctcttgagccaaaaggaattctgcaacagacaggctttcagatttgaatcacagcattggctcttgtctgggtctctatctagcctgctggtccgccctgaagtttttgaatttgccaacctccataataatgttagccaattctggctgggcgcagtggctcatgcctgtaatcccagcactttgggaggccaaggtgggtggatcacctgaggtcaggagttcaagacaagcctggccaacgtgctgaaaccctgtctctactaaaaaatataaaaatcagccggatgtggtggcacatgcctgtaatcccactactcaggaggctgaggcaggagaatcacttgaacctgggaggcggaggttgcagtgagtcgagatcgcgcaactgcactctagcctgggcaacagagcaagactccgtatcaaaacaaaacaaaaaaaattttacctttccagtgaagagaagataatatcaaacacagaaatatgtaatgtatattggtatgctgagtatgctgagaaatgcaaatgtgtttttatctttagaaattggacttttaaaactttgaaatcactgagttttgtatttaactacaatacaaaacctacagcacagaaggaatatgaataatctcttttaaaatactaattccttttcttttttttttttactaatggctggttttaatttttttagaggaaatactataatttaaaaaaaagttccaaaatatttaacagaatttccagcaatgattatttccaaaatgtaaagatttgaaacataatttatacaaaactaaaaaccagaaggattcattcttgctttttccttttttaaaaaatccagacatttgtcacaagaaagttcggcatgtgatagcagctgtagcctcagtcaccctcagaatcgctgtccctcctcatgaggacagagtgccacactgatgacagcaatacatcttcaatcggcttcttagggttttcctccaggtccatcataattgctccagattcagacagtttccattccaactcatctcttgtcaggttcatgccaccaaacaccagaggaccaataaactgagccttgatatctccttccaggtaaacaaatatcggggcagattcctatcaggataattgggtatgcaggttgttgaaatggctttgataaatttgacatcaggaaacttcctggcaagtccactgaggttctgatttatcagggcacagaggggaattccttgtttgtaaaggtgcaagatgacccacaagccctcaccagctttggtaacttcttgaacataatccttccctgagatctccaaaacttctcaaaatttattcttcagtttagttgctttccactcagccagtctctgctgtctgcacatttcaatagcacattcatcctcctcattaaactcgtcttcatgatcctccagctcttccaaagtcatatcttcatatgttttcaccactgactgctggaggatgcgctgctcctcttctgcctcctcttccaattctttcagactttccttggggggtaagataccctttttgcgttaagatgtcattccactcagtgtctgcgttggggtcctgcatcttgtttccagttcagttgctcaagccagctgtgccaccttgtttttttgtttttttgttttttgtttttttgagacagagtttcgctcctgttgctcaggctggagtgcaatgcacaatctcggctcactgcaacctccacctcctgggttcaagctattctcctgcctcagcctccccagtagctgggattacagacatgcgccaccacacccggctaattttttgtagagacggggtttcaccatgttggtcaggctggtctcaaactcctgacctcaggtgatctgcccgcctttgcctcccaaagtgctgggattacaggcgtgagccaccgcaccctgccaatactaattccttttcatgacctcagatgaacaaaactactcaaaaggctgctatgtatagatgttctctagcaggggttggccaactatggcccaaaagccatgtccaacctgcttcctgcttttgtacagtccacagctaattatgctttgtacatttttaatggctagaaaaaaaatttaatattttgtgacacaaaattatatgaaattcatatttcagtgtccatgagtaaaactttattggaatacagccatacttattcatttatctactgtctatggctgcttttacactataacagagtagtcatgacaagagaccattctcatcacttgtcactgctgctatccattacaaatcatagttacactttgtaacttggcagcattttgagtagcatgcctattgccataccccaaaattttatttttattaccagcatatatccctcatgtcaaaaaaaaaaaaggtgtggtgacacacactgtagtcccagttactcagaaggtaaggtggcaggatcaattgaggccaaggagttcgaggctgcagggagctacagtcacaccactgcactccagcatgggtaactccaggccttgtctctaaaaagaaaaaaatgagagagagagagagagaattggacttaaaatatcccatctctaaggtaccatgaagcatggattattttatcaaattcgatggcaaagcctggcgcttactatgcaaatgaaactatttatgtgctaaaagaatgctatatgttaatattattagaataagcagtcatcacaatattcccaaattacagaaaatcagtcagaaaaggtaaaaagaaattaaagagtatgtcaacacagaatttcctcacaaaaaaagaaagtgaggctgtaactaaagtaagtttccaagtgcctcatttgttagcctagtaagaaaagtcattcattatagcatgttaattaaatgtttgattgaagtggctgaagaaatgtatacagaaaaaataaacttggccaggtgcagtgactcacacctgtaataccagcgctttgggaggccaaggcaggaggatcacttgagaccaggagttcaagaccagcctggacagcatagcaagatcctgtctattaaaaataattaataattttttttaatttaaaaaaagttaattaaaaattttttaatttttaaattaaaaaaagaaaaagaaacttacttaaaactattagcctttaggtgagaacagctgcttaaagtgttaaggacacaggacacaaacatcaatagtaaaacaaggcaagttagccacatgaggtggcctatgcctgtagtcctagctactcagggaactgagtcagcccaggagttcaaatccagcctaggcaacacaggagatcccatttctaaaaaaaaaattttttttgattagaaaaaaaaaatttttttttgattagaaaaaaaaagcaaggcaagtgattttgaatggttttccttagcttgtactgaattgacaggtgttattgatgttgctcatttgttcctatatattcaaggagtcaatgattgaatggactgaagaattagctccaaaacagctgcatgaaacagctgagaatatttttaacgaaggtgaaaaaacactaattaagtacacctgaagtagaatcgctttgctatattgcaa

SEQ ID NO: 1881300 - DNA, 4001 bp, Homo sapiens
acctcaattttgtataactttcatatattttagttaccttgtatgccccatcatactgggcaacttcttctccaagcagaaataccttctcatctctttccagctcctcatccataccctgatttatagcatcacgaactgtcacctgtcacaggtatgcaaaaacagtcaatacagaattgtttgggattcaactaagattttcttcctttatatttacctaggctgcccacagcatacaatataaaaacactagaacaagcttctctctaaaaactcaaagaattctaaaagtaacatttctattacacatagttggtctttgcatgtgttaatgtactgagtgctcactaggtgccaagtactgccaaatactttgcatccagaatgtaggagttgctcttttaatataatgaatggtaaaatctagttaaaaaaaggaaggagaggagaattaacatacaatccatcaattccacttctatgtatatgccccaaataattgaaagcagggattcaagcatatacttgcacatcaatgttcacagcagcattactcacaatagacaaaacaaggccaggcacggtggctcacacctgtaattccagcactctgggaggccaaggcaggtggatcacttgaggtcaggagttcgagaccaccctggccaacatggtgaaacccattctctactaaaaatacaaaaattggccgggtgtggtggcgggtgcctgtaatcccagctactcgggaggctgaggcagaattgcttgaacccaggaggcagagattgcagtgagctgagatagtgccactgcactctagcctgggcagcaagagcaaaactccgtctcaaaaaaaaaaaagaaaatgtcgggctgagcgaggtggctcatgcctgtaatcctagcactttgggaggccaaggcaggcagatcacttgaggccaggagttcaagaccagcctgggcaatatggtgagaccctgtctgtactaaaaatacaaaaattagcccggtgtggtggcaccggcatctaatcacagctactcaggagtgtgaggcgcgagaatcccttgagcccaggaggtggaggttgcagtgagctgagatcgcgccactgcactccaacctgggtgacagagggagactatctcaaaaaaatatacatatatatattattcagccttaggaaagaatcaaactctgacgcatgctacaacatggatgaaccttgaggacattacgctgagataagccagacacaaaaggacaaatgatgccacttataagaagttctagaataggcaacctcataaagacagaaaagtacaacaggggttaccaggggtttggggaagggaaatgaggagttaccgagtaatggacagtttctgcttgggatgattaaaaagttctggaaatggatggtggttaatggttgtacaacatggtgaatgtacttaatgccactgaattatacacttctaaaaagtacattttaagttaggtctattttgctgcaatttaaagaaaaaaacatggagtgagggaggaaacgcctagtcttagttttcccccattgcccagccagctgtgaggtggtgactcgccggtgtgctaattgccaggcggcgacagaggcagcaggagctccacggaggatgctggctccgcaaacccaaggcccacggcgccggaaggccacagcgcaggcgcgactccggcctccttcccgagagaaggggggaccctccccgccctcgtccgacgagcacccgcgcctgttacctgcagcgcagccggcgcggtccagtgaaagcgcctcttcagcagcccggagacctggcagggagagaggaagatgacggcgggacgcagggtgggcaggggtcgcgtgggaatacaggccgcgcgctgctgcctacctcccgaaggggtctccgcaccaagccagacaccgccgccatcttggtcgtgtcctctatccgctgccaaacgacaacagaggggccggcagacgtgagcaggccccgcctccaccggcgcgggccaatggcaaggcgcgccggctgcgtgacccgcccacccgcccaccgggtgaggggccgcggggccgggctgaggtggcgtgtgggtggccgtgcccctctgcctggagccgcctcaaatcaactttattgacagtaggcggtgaccgacaggcggggtgcacgctgggcacacgtgcctggtcggtgttacttgaagcgtggggactagaagtcagaccctgaggagcatgatctctggaagctggagagaccttaagagttaggccaacctgttgtgggtgctggaatcctttgggcaccaagaagtgcttgcacacgctctactgatggggaacttaacacttcatgagtgagtctagtcttccctggacagtgctgtctgttgattccttataatgcacatcatagctttcattgattgcattaagcacctactgtgagccaagcattgagatatgtgctgtatagctcattctcacagtaccccacttgggtaattagtgttattattatctccattttgaagacggttaaactgaagcagaaattgattaaatgagccgatattttaatttaggactgtcttgactctaaagcatggtctttttcccactgcttcctaaagcagaagtggattcctgcttgggggaaggttacaacaactttagagaagggcggccctatggatgtagcaggacaagccgcagacgaaactcctcagacaccgagttaaagaaggaaggggtttattcggccaggggcatgggcaagactcttgtctcaagagccgagctccctgaatgggcaattcctgtcccttttaagggctcacagctctaaggaggtgtgcgtgagagggtcatgattgattgagcaagcagggggtatgtgactaggggctgcaagcaccggtaattagactggaacaggatagggattttcacagtgcttttctatacaatgtctgtaatctatagttaacataaccgattaggtcggggtcgatctttaccaggcccagggtgtggcaccaggctgtctgtttgtggatttcatttctgccttttagtttttactttttctttctttggaggcagaaattgggcataagacaatatgaggggtggtctcctcccttatggggaggtgccaaacacttggccatagggacaacctctggaagctcattagtcttaatttggcccttgggggtcagatgggacaattgagcacccagtctccacccatccccaagacattccaaacattcccttctatggatcacagctgcaggctgccaaattaggaatttgcaacttccagtaggttgctgactgggaatgggagggggtggaggcaaaggcagaacaggcggatgctgggaagtctgtggcagcaacagaggcagactaggaggcaacttccagatggagaggagggggacagttttgagatctatttgggctagaatcaataggaatgctgtaagtgctagggaagagcagaggaaaattttggatttttgtcattgctggatggatagatggggtaagggaggagcctggggcagtgtaagtgccaggagctggggaagtaagagtgtatttttgtttattttttgagatggagtttcactctgtcacccaggctgaagtgcagtgggcctcactgcaacctctgcctcccaggttcaagctattcccctgcttcagcctcccgagtagctgggattacaggcacctgccaccatgcccggctaattttttttatttttagtagagatgagttttcactatgttgaccaggctgatgttgaactcttgacctcaagtgatccacccgcctcagcctcccaaagtgctgggattacaggcatgagccactgcagccagcctttattctttagatgactgggacatacccaggttgcctggagcctagggccta

SEQ ID NO: 1881301 - DNA, 4001 bp, Homo sapiens; identical to SEQ ID NO: 316093

SEQ ID NO: 1881302 - DNA, 4001 bp, Homo sapiens
ccactccgacagctggcgagcagctcttgtccaccaaaacttccccgggtagattcacccaccggtcctggaaacctgctaaatcctgaaggttcacagaacctctggtcagaactgaagttgcagccggagcttcccgcaggctctgtaactttccctggaatgaaataaataaataaagaccgtaagtgctgagatagcgggccccaagatatttttagtcctctgcaatcagccactagaggaagggggagggagaagggagtaaaaaagttttgatccgttcgggaaggggctcgaagagaacccttgggagaaagcagtagcctcagctccaaactcagcgagcttttctcggctggcgttttgtctcctatagcgtagactgtaagagaacagaaaggagtttcccgagaagattcaggctggcgtcctgggctggcccgtcccttctggcgagcctcagtgtcctcccacgcgcttctgccttccagcctcctccctttttcggggggctggcgggaggcatccaaggcacgatgtatgtgcgctcgcgctcgcgcaaatacggccggaggagtcctgttcctcgggcattttccgaggaagtctggatcaattaggctcagtccggggagagccagcgagcgcgcgggcggcgtagccggcctgtctgggccgcctcgtggggagggagggggcgcccggccgcccggcggcgaccccggggcctggccgccaccatgggcttcgagctggaccgcttcgacggcgacgtggacccggacctgaagtgcgcgctgtgccacaaggtcctggaggacccgctgaccacgccgtgcggccacgtcttctgcgccggctgcgtgctgccctgggtggtgcaggagggcagctgcccggcgcgctgccgcggtcgcctgtcggccaaagagctcaaccacgtcctgccgctcaagcgccttatcctcaagctggacatcaagtgcgcgtacgcgacgcgcggctgcggccgggtggtcaagctgcagcagctgccggagcacctcgagcgctgcgacttcgcgcccgcgcgctgtcgccacgcgggttgcggccaggtgctgctgcggcgcgacgtggaggcgcacatgcgcgacgcctgcgacgcgcggccagtgggccgctgccaggagggctgcgggctacccttgacgcacggcgagcagcgcgcgggcggccactgctgcgcgcgagcgctgcgggcgcacaacggcgcgctccaggcccgcctgggcgcgctgcacaaggcgctcaagaaggaggcgctgcgcgctgggaagcgcgagaagtcgctggtggcccagctggccgcggcgcagcttgagctgcagatgaccgcgctgcgctaccagaagaaattcaccgaatacagcgcgcgcctcgactcgctcagccgctgcgtggccgcgccgcccggcggcaaggtaggcgcctgctgcccgccccgacctccagccaggatccctggggacccagggccccgccccatccctttgggtacagggatgccccgagcttcccgggaacatccttgcttcctccctcttcttccactgcttaccagctgtatcactacttgcaggtcgctgaacctgcctgaggtggaacactgtggtcctttatagtctagacgtaaccggtaaagtatagctgtacagcttcagggattctggaaggacgaaaaagaattcacaagcaagtgtaggataagaatgaagaatgcagctccagagtcaaaactgcgttcaaaggctttgctgctcagaccagctaggggatctcgggcaagttgcttaccctctagaggtcagaaacctatagactgacacttaggagaggagagatggacacattgggtgaattgtatccgtgcatcctctaggattccagaaaaaaaaataaagggaacccacagccagtgtagattaagttaagaaggatatcagaagagaggcctctggggtaaaagctggatgcaagcgtgggctttgcagccaactagctggctgaccttgagcaagctgcttaacctctctaaagttggaaactatggtccctagagacgtggtatacagagtaaaaacacagccaggcacccctgaggtattcatccagggatttcagaaagaattaaaggagcactctgcccccaacaagtataaagtaataattaagtgtgagtcctctggagttaaaactgttttcaaatctgggctttttgctgaccagctgggtgagcttctggcttaattcccagatccctcagtttccctcagtgcgaaaggtttttgtcaggcttcagggagagagtttagtagaagggcctcgtactgtgcctggcagagagtaaataaatgctcaacaagtgttacctagaattatttttaacatctccacctgagcggtccccttgagcgagggtttactttgctccaggctgggtgctgcattcttcccagtcatttcctttttaatcaagtgaggttggtgtgacccttcccacttagtagatgaaaaaactgaggctcattaaggggcagtttcatgcctgggtcacagcttttgggtgcaaagctgcatgttgaacctttgcgtgcccatctttccagcccacgttctataaactatcatgttgctcctcagtgcaaccacaaggaccatttattgagtgtttattaagtgccaccaacaataggaagtactttacatgcattacctatgttgtcctttgagatgagggaacagactcagagaagttatataacttgtccaaaattaagtagtgactcagggagcagagccggactcagattctacctcagagttctcagttttggggcatattggcattttgggccccataactcttagttgggaggggaggtactgtgctgtgcattgtaggatgtttagcagcattcttggcctccctcccaagtcgtgacaatccaaatattgtcaagtgtcctctggaggggcaaagtcgcccaggttgagaaccactggtttccctgattgcagaagccacattttcaacagctgggtacttctgccttcctggggaggggcctgggcctgctgccaccgctctggttgcctgctccagatggtgtggcagaaaggggaaaatatttgcccgaggctcccccaagggcctgtgtctgctttgcctctctctgccctctcccagccccctttccttacgtgcacaccaggcctgcaagttttccgacctggccccccttcctggcccctggcctgtctgtcagctgcagtctcagcagctggccagctctgggcgaagggcaaatatttacagctccacagcttgcccaggacctcacaggcacacaaaagactggtgtgagccttcgaatcaccaaaacagagggcaaagcttggtcttcaatcaggcgccagatttagggtgaaggagttcccgagtttctgctgtttatgctgtcatctggacttccttcgtcgttttaagtgacgcttatttataaataagccattcactgccccagagtttatgcatcatttattgttgagctagtttattatttcttcttaactttctgttttctttctggagtgtttgggtaaaatctccctcagagtcaaaaatatgatacttgaatcaaaactgtggatgtttttgaggctctgttgagttagtgggtagcataaagaaggatgttaagcttagagacaagatgttgattttgaacttacggagaaaggtttgttccggtgttggagccctgcttggaacttttaccaacctcagtgccagccttgagaacagcaaaggatggtctggcccagaagctgccctagatagtttccctggcctcagacccagcctggcctcagctgaggccttagggaagcttgctgtctctccttgccccgaaattaaccctcagtggcccttactgaacgcttttgctgttcct

SEQ ID NO: 1881303 - DNA, 4001 bp, Homo sapiens
gtatttttaaaatgcatttcaggcagaggtgggaggatcacttgagcccagaagtttgagactagcctgggcaacatagcaagaccctgtctcaaaaaaatgcatttcactcgcatgattatgaacttacaagaagcaagatgttttcaaatggcagaatccagcttcccagttgaggaagggacagatattgcattccctgcgagtcgggccttgctgtctgaggtgagttggtgtgctggtgggtcccccctactgttgttgctccctcagaaggggctggcacatttgatgtgtatccccttgtcaggcagcagggctgaagtcatgtcgaagatttcccagaataatctatccatatggccattacaattaattgactttcctgtgactgagggtcaatctgatgccagaatataccttgatcacttttttctagtgagagatttctagactgttttgttttatttatcttataaacatatctctgtgttttatggttcacactgaaagaggaacctggggaccttacagaccatgtaaaaaaggggaagattaaaacatagactatatggggtgggtgtgtgtgtgtgtgtttgtgtgtgactgttttttttttttttttttttttaagcgatgcatgttttaaagactggatctggccatgactaaaggctcattgctaatgctgggccttatttcactgactggagttcaggcatatggaaaatacctgttagttcaactaaatacacctaatatgaaaaatggactctgttccttgtgctaaacaaatgcattaacaaatttgcataatgtaaactcatccctttaatgactgtttggccccaaaatattgctggggttattctttcctcctctcctctcagcctaattttttctcacagagaaagtgggaaggagaatactctggaatgagacagatgtgagatcaaatctcttttttgtttcttgctgtgtgattacgggcaggttgcctaacctctctgagaccacagtttcttttgtgtgtaaaatggaaattgtatccctttctaagggtgatttaagaattgtatgatatggccgggtgcagtggctcatgcctgtaatcccagcactttggaaggccgaggtgggtggatcatgaggtcaggagttcaagaccagcctggccaacttggtgaaaccctgtctctactaaaaatacaaaaaaaagaaaaaaaaaattagccaggtgtggcggtgggcacctgtaatcccagctacttgggaggctgaggcagagaattgcttgaacctgggagatggaggttgcagtgagctgagatcgtgccactgcactccagcctgggtgatagagcaagactgtgtctcaaacaaacaaacaaagaattgtatgatatgatggatataaagcacccagctcagacttgttttggccacactgacagaggaaggtgaagctttgaggcataagagaagagccccagaatgaagaaagaaggagaatatggctttattcacagctgactcactttgggagagtcacggcttctctctggaactcagtttcccacttagaacatggggaaggtagaagtgtgtggagtgtgtagagtggtcaagagcctggatcaggggcttaaatcctggctgccttaccttgggccacttcaccgtgctgtgaatttccttctctgtcaaatagaggccttgtgcaaattgtttgaaagcctttgcagcaatgcttcgagtgtggtgttgtttgagtatcagtgtttgccattattcttataacaaggttctctttggtcccttctggctctgtttttatttatttttttatttctacttcctctgccctcaaattttcaaggacaggctgatttttattttattcttcaacattaaggtaactgcaaacatattgttgaaggaaaataaaaggtacttctcaggctttcgtctgcaataacttaaagaaaaggacccagaaaaaaaaaaaaacccaaggacccagcactgtcttgattctgtacaaatgttcacctccttcaaagaggcaagaaggcaagtcctgccagatctgattgtgcagacccaaaggatctgatcgcccgtcactaaggctactaatcaaatttccatccaatatgctcacgcaggatttcctgatcaaacacttaagcctgcccctctgcacccccattagctaacatgttttatatgcagaggggtcatcaaaagtgtaattgccttaaagaaacttaatcccgcattcttgtcaactcaaagataactaataatgcttgctagctgatatttttccaacatcaagagtgtaccagaaattaggatcttgttcttaatcttcctcacagcagatgttgaaacctaggtgtactgatatctctcacgggccaggtaaaaggatgaattttctctaaaattagctggcttttctgggacaatatgctgctgccacgtaatgctagaagactggaataggctgtggagatccaagcccaatggtttttcctagtcagtgtaacattattttggcttccaagttcaaagtttacctgtgaatgcttctgaggatatggcatccattttacatttgaatacatttaatcagctaacattatggagtgtctgcaaaagaagtttgctagatgcccgcccgaaaagaaagcaaagtgaaagtacagcacaagaaagggattatgtgagtgttgattttaatgtcagttattgtatttaataagggtaattaaaaacattacatgcttgatattggtttattatgtggatatattctaaacatagcatgtgcctaacaattcattattttgccatgcttcacagcttctaatatgtccatttggtcagtgtttcagggaatttttttttcaaaaattgagattttttaaagctcttatttctaaaggtgtttctcatatttgaagtaagttttctgtttccattttcaaataatcactatgtgattattttataatcatgtagtattccctttaaggggaaaaacttcccatatccatgtgcatacatgtacatgtgcctgcctgcacatgtgtgctcgcgcatacacatacctgcacggacacatcaacaatgcctcactgggatttgtggtttgaatgagaaatggtcccagtcaggctgggacaagtaggtcaggaaatttaacctgactttcccaaccccagtcatcactggcagggtctgaaaaggccaggtttgtcaggactcaaggatccttggtgtctgagtggcaaaactgatttgaggtcctgtctgtcctgtcctaacatttgccctagactcctccaagtggcactaactaacccaggcttttgtgcacagtgcctccacttgtgtgattacccctgactccactcctggatgaggtcaggggtcatctgcacagacttgttccactacttcggcaggacaaagaaaatgtgttccttgtgtttacagggggagaacagagcctgccacgagggcctggagaggcccgtgtaaaacaggcccatatgacaaaaaggtgaatgaatggtataagttgcagccatttatggcagtctaggtatatgcctgtgagggaagtaggattctcccttctttacagatgagagattaggtggcctgtcaacatcataaggttcttcagcaccactgcccccacccaggattaaaaacccagccccatccatctccaaagcccgtgttctgtccactgttccctccaccctgccctcctagggaaacaccatgcactagaacccttatgcaagaagcccatgcacacacagtcacacatggtacatgctgcttcctacagctacaatgactgcatggtctgaagttgtgcaaacaggaaagggaaacatctatgagaaaaaagcacattcctcttctgtcctgtatacctctgcatgggacactctgtgaggaagtcctcagacatcatg

SEQ ID NO: 1881304 - DNA, 4001 bp, Homo sapiens; identical to SEQ ID NO: 316111

SEQ ID NO: 1881305 - DNA, 4001 bp, Homo sapiens; identical to SEQ ID NO: 316113

SEQ ID NO: 1881306 - DNA, 4001 bp, Homo sapiens
cactgtgtttaattctgccattttagtgttgttaaggggttgggttgcttttctattgtgctgagaaattaattgtcagtgacccctttttatttccaaaccaaaaacttaacactgaagcagctgctttaaagagattgcagtacactgcatcattggtaaaaggactcatgaaaacagaagcatcattgtttttgtttgtggtttttttgtttgtttgcttatatttgctagccccattctaagaatattatccttcttactgttgttatgtgtatgtgaggggtgcattgtcttaaatcacttgaaggggaaatcaaaggcaatgaattaaaagtcacaaacaatttagatctggatcaaaattaaaactgaaaaatattttatttctcatttatctgaccttgtgtattggaaaaacaaaaaatggataagcattagagaataggttcagaatcagaactgagtataaagacacatttttgttgttagaaagccagaatagagaatgcagactctcatcacaggcagtcattaggtgtgatgaggtggtggtgtttgaagctttgtctctgtatgtatgtatgtatacaggtgtctgcctgactgatttagaactgcagccttgaaaagcacttctgctccagccactgtctctctgccggaggttttatgccttgacatcatttgttaaatgtgtcctcttccttccactcagaaggtggttattgtatgttttctagggaaggatatttggacagtgagtttggcctggtgtgctgagcaagtcctacaaatgctgatactggaaagcactcctagaagcaggggatggactactgccaatcctttatttcactcggagacataacaattgaagttcacccacagactaccagacaaactcccaagtattccctagacccgtctgggttttttttgaggtttggttggtttttttgtttgtttgtttttggtggctgaaaatctgacctcatgcaactcccgatctttgctttctgtgcatgaggaagagcagtggtggcttcaaatgcaggcttttctttactcacctcctcttttgggtgtcttccaggttcattgtcctcataggccccggttgcttttgagcaaggagagggctgcgaaatttctttatagttatgatcatgtatgttttatcagccattgactacagttccttgggaaatgccagatgggcatgcttcagaacaggtcttttccatgtttaattggcgcctgtggagttgtcactgaaatgatgcatgggccacttttaacattagtcatttgccttcaggccttctgatggaattattttgttgagtgatatggcaggtaatatgtgtttgcaaacagaatggcatctttggcaggccctaaatggctgtgtcattcagggcatgtccggggtaggttggggcttcctccttccttgttgtactttggctcaaaccataactccagctctgctagtgggttggctgtgtactctgaccccgtgactgtagaaaggagttgggcatttgttctgtgattcataggatatctcacagttactagaattgcttgggtagcgggggagcaaatagctggtgccagctgctgaaactggaaattatatgattagccaccatggagatcatgcaaattctttcaccctgctttgtgaagtccggtcctgctaaggaaaaagaaaaaaaaatggctttgactcctcaaaagatgctgaattcactgctgtgaaatgccgtttcctcagcagtggaagggacattaagtgtatgtatgtgtaggctcaagacaggaaaattacatattaaatgctagccattcatggacttccccctactagttctctttcctctacctcgagcttcatactcaccagataaaagctggcagtcaagtcaagttctaccagtccttgctgagaaatcctgaaatatagtaggcatttgggaaatgggggccatcatcgtccccctacttcctctttaactcttccctcttatcatcatctgcatcataatagctattatgtactgagcactaccacgcaggacccattggcatacattacctccagtcctcataactccatgaagtaggtattaacatcctcactttagagttaagaaaattattgttcaaagaggttaagtaattttctcaagatcacacaaatagtaagtggtagatgttgtatttaagcccctgtgtagctgcaaaacccaggcactgtctctgtgcccctgaggggtcttgggaatggcagagcagtgggtgtaatctttaactgaaagccagtttcttcaaaccatcctctgcagtgaatgaaagaatttttaaaagcgagtggtatttgtctaagtgattatcactttgaatatataggtagatacatacatattatatgcacatctacttgtgtacatatatacatattatatatacatatgcctgtttagaattgaaacccagtaagttttaaattcaattttagtgcttcaacctgttgtgtgcgtgtgcgcccacatgcccaatctggggcatctataggactgggtcagatctatcaggatggtgatgaggcgggggacatgggaaagggcagggaaaaggcaagccttctggcaacaatagcagaaatgagatggagtaaactatgccacgtttgagtgcacctgctgcctttgcctaagtcatgatgggagagaacatgtgtgaatgtgcacctctcaacagagccttgatgtattattttacttccgcaactgttaagaacacctgttaatggccaataccaccaaacatattaaaatatcttggagaagaacctcaaaataattctcattgctaactgtatagaatcatttgatgtctgaaggataaaggatccagacatcataaaagacagatttttaaattaaagctttaaactctacaaacattttcactgatttttgtaaaagcgtgatattctctatggacaaatggactaatgggaagacatttctctataatgtatactgcttttcaatgaattttttctctgtacattttaatgctatttcattttttaaaaaacactttctttcttattaaaggtaaactacttggtttacattttgggaaggttctattgggaagagccttgaacttaagggttgcaaaatttattgttgattcttgctgtgtaatattgaagaagtatctaaatttctcaggacatagtttctttatttgtaattaagatattgggttaaatgaaatatagagtcctttccagattaaaaattatgtgattaatttgagggtttttttgttttattttgttgcctgttctttgtccaatgtagaaagagctggaaggaatgattgggtcattttaggtctaaaacctatttcttttatgcctcttcaaaacaagaaaatgtataaacaaggtttcacaattgccagaatgaagcagggtctattcactttagcctcttaaaaggggctgtagattacttgatgcaaatgaacttttacctcatcagaccctaagtgcactttaagaaacctccatagagatatttatatatatatgtatatatgtaccttcatcatacatagtttttttaaaaagaactaattagaagaaattttaaaccagagatataaataacatgttacagaagcacacagaatggaaagattaattccaccttctgagaattaggaactaccttgttgagaaaatagcatttgatctagaatttgaggaatggtcaagacttcaagggatatgggttgagggtcagggttgggaaggaggctttccaggtggaatgggggtatatgggagtaaatgggggtatatgagggaaatggctagaggacaccctctctggtccttccatatccctgttatagtttctttgtcatagtacttctcaacacattgttatttttaagtgtatgtttttcccatg

SEQ ID NO: 1881307 - DNA, 4001 bp, Homo sapiens; identical to SEQ ID NO: 316137

SEQ ID NO: 1881308 - DNA, 4001 bp, Homo sapiens; identical to SEQ ID NO: 316144

SEQ ID NO: 1881309 - DNA, 4001 bp, Homo sapiens; identical to SEQ ID NO: 316155

SEQ ID NO: 1881310 - DNA, 4001 bp, Homo sapiens
gcacccaacactagggtccccacatatatagagcaaatattatttcatctaaacggggagatagactgcaacacaatagttgggaactttgatacccccttctcagcactggacagatcagacagaatatcaacaacaaaaaaaaatgaatttaaattgtactttagaccaaatggacctaacagataattacaggacattttacccaacagctacagattacacattcttctcatcagcatatggaacattctccaggatagatcatacattaggccacaaaacaagtctcaacaaattttaaaaactcaaaatcatatcaagtatcttcccagaccacaatggaataaaactagaaatcaataccaaaaggaattgtgaaaactgcacacatacatggaaattaaacaacatgctcctaagtaacaattgggtcaatgaataaattaagaaagaaaaaatatgtaaaaacaaataaaaatggaaacacaacataccaaaacctatgggagacagccaaagcagtgctaagggggaggtttatagcaataaatgcctctgtcaagaaggtagaaagatttcaaataaacaacctaataatgcacctcatggaactacaaaaggaagaataaacaaaaaccaaaattagtagaaagaaataataaagatcagggcagaactaaatgaaatagagactaaaaataaaatatgaaggatcaacacaatgaaaagttggctttttgaaaagataaacaaaatcataaaccactagctagactaaccgagaaaaaagagagaagacccagatgaacaaaatcggaaatggaaaaggagacattacaactgataccacagaaatacaaaagatcataagaaactactatgaacaactatgtactaacaaactggaaaacctagcagaaacagataaattcttggacacatacaacctatgaagaatgaaccagaaagaaatataaaaacctgaacagacccataatgagtacagagattgaatcagtaataaaaagtctcctaacaaagaaaagcccgggactggatggcttcactgccaacttctaccaaactttcaaagagggactaacaccaattctcctcaaactattcggaaaaatagacagaaacatgttcctaagaccaaagcccaagtgagttttccccaagacccaagatgcaagacaagatgaaaatctgatatatttcagtaataaattagcaataaaaaagaaatacatattttaaaaattgatatgatgaaacagtcccattccatcatcctgaaatctacttttcttcctttctactctattaaatcaaatgtcactgcaatcatcttgatggctttcatttatcttttgcttgattgtctatgtgtaattctttgtaaaaatcctccctttggttttctcttcttccctctcccctctctctttgcttctctttttttctcttttattccagtgagcagtgatgtacacccaaatatctaagtttctctggaattccttttgtactcattgaagctaccaatccaccatagttctatgttactggccccatgtcttccccacccctcagaagcccacacagatctagggcttagtgagttggggcacaccttcagaggtcactcaggaggcctgggctagctgagtcaggcaagagcattggaaccacccaggcagctctgaactccagaaaaagtcatcctgcagctgccctcagcagtctgttccaagatctgtccacaacggcagtcaggaagttttcttaacaactcacctaagacataccatccagatttggcgaggacagtggccattcatgctggcctctcccagtcttcttttccagatatgaaatcttggacttctccatgcacacacaccctccactctgctcctccagggagtgagaaatttggcttgaaattaactcaggactcccagcttcagcgggccatctggagtgactgctgcctccaaattatgttcacatccacggataaccaagtggattatctccaggaatcatcttctcagtcagaagagaggaggcggagaaaatatcacgttcatttcttgcctagaaaagaccgctgacatcagctatttgccctttctggcaataatatttggttgctgctccataatacaaagcctaaatcaggcttattagtgtcaaattaaaaggccctgaagggcagccagattttccagaactggcactcgttgcagcctggcacagtgatagagctgacaggccccagcttgggagaagtcagcaagggtttagagtacccggaatgcctcactggcccattaaccactgcaggtataattaagacgcatgtccctccatttctggatgccatccctttgttgacaagttgctcagagaatgaaagctaatatttaccaattagcccaagcaaaacattgtcagggaggcaaatctggcacaaacacaatgtcttggtggtctcccttagcacataataaaatcgatatcagtacatacagctggtaagaatctgtgtccataaactcaagacacacaacctttctttatgttccctttaatcagtggttctcagtcaagtgcaattttaccctccacgggacatctgtcaacgtctggagacatttttggttgtcacgctgggaaggggatgctactagcatctagtgagcagaggccagggatgccgctaaacatcctacagtgcacaggccagcccaccaaacaaagaattatccaaaatgtccatggtgccaaggttgtgaaaccctgccttaaatcaacgtaatttctacttctagcctcccgttcttccggcaaaatgattaatgtcagttattatcactgttttttgaaccagagctgcaccacagttctgtggtctttagggccgagccaaggttagatgaggggtactatgcttagaaaacatggaatcttagccagatgtggtggctcatgcctgtaattccagcactttgggagactgaggtgggcagatcacttgaggtcaggagttcaagaccaccctggccaacatggtgaaactccatctctactaaaaatacaaaaattagctaggcatggtggtgcgtgcctgtaattctagctactcaggggggtgaggcaggagaatcacttgaacccaggaggcagaggttgcagtgagctgagatcgagccactgcactccaccctgggtgatggagtgagactctgtctcaaaaaaaaaaaagaaagaaagaaaaagaaaacatagaatcttctgggaggttgtcaaggcccatctgcctgagaccctttgtccttccttctccattctgcagttcagtggcgtccagagttccatagcactttctcctcttctgcccctagcatgggcaaatccttttatctagtctcttttccctgctctttctgccactctacctcttctcaccctcttcttattctcagtacttaggaaatctcctgagaaaagaaatttctcaggccacttctaccttcatctttggcataaacctcccctgagagccttacttgactaaagaaggggcaaaataggacagagtggggagaaaaaaaaacacataaattaatattcaaaatattatccagcagttacaaaggcaccagtgaagtcaggttaaggagcttgtgccatccttgccctgggccattcaggagtccccaagccttcttcccacagctctgcctttcatgcctgtgggtggtgagaagttattaacatcggttatcagatatgttaacctaagtcatcatcacactcgaatgagaaagattttaaggtctcagccctggagaaggttttatgtcaacatttccacattggcataaaaataacaagtttcagcctggcgtggtggctcatgcctgtgatcccagcactttgggaggccaaggggggtgaatcacctgaggtcaggagttcgagaccag

SEQ ID NO: 1881311 - DNA, 4001 bp, Homo sapiens
ttccaagctgtgggtaacatgagaatccatttacgtttattccatgagtatgtattgagcaccaaagggtactgggcactgctagctctgcaagaatacagtgaagagtagggagaagatcctggctcccaggggattcattcagctacaaacttacatatgaccttaataagtcagggtgagtagtttaaaaaagggtcaagtgcaatagtgagtggttggccagaagacaactaactttgctactttagaaggagtgttcagaaatgacactgctgaggaggtgacatctacacgaggactttaacaaacagaagtcaggcatgcaaagggaagagttttccaaggcctgctggaataagcttattgttgtgtttggggagacagggaggaatgtaagcacagctgaagcagagttaagcgaggaggagtgtttagttgattatcttggagaaagagaagagagccaagtcacgtagggccttaaggtctgcgtaaggattctagattttgccagtaatgaaagtaaccacagaactaccctttctagaggcaagtacacagttattgctcatctttggtcaacattggcctttctgttcatgccctgcatgcaagaagaccctggaggaaaatctgagttaatgaatcagaagagaggcatttctcctctctagagtgagcaggtagtatttccagtcccacccacacatagtccaggggaatgaatggcttacatttaggtgaaactgatagtagatgctgggcttgtgcaacaggaccctcctgctctgatcaagctcttttgtttttcaagggggtgcctcaggttatcccgagctttcccgggatgcagaagcctgataccagaaggcagtacacctcccagcagaatagaagctgctcttcttcgaggtcacctcctcacggaaataggaatctgttcacaagcaggatgctctcaaaaacatttcacttctgggcttatgaaagacaggttcgggaaaacagcatgctggggaattaatagtatttgctaagttatttatgctgaccctaattctactcaagagctaggttggaaagccctgcaaagatcattgtgtccaccttttgtttctagacatgagtttgaagatgttttctttcctttcttactagagttcatccactcaaaccactcattcatcatcttaggttgttatcctctcctctctgctttcatattggggaggctctggaagtgattaggctgttgtaaatcggcttttatgatttgtatgtaagagataagcagcagagtaagcaagcgattggaggccccagctgctattgccctgacagttatcccaggaacgaaattgaaacaaaaaattactggagtatatgatatttagctgattaatttctttataggcatatccaatgttaaaatttgaccctttaacaaacattgttttattttttatttatttatttgtttattttttggagacaggggctcgctctgttgcccaggctggagcacagttgcacaatctcggctcactgcagcctccacctcctgggctcaggtgatactgccacctcagtctcccaagtagctgggactacaggcacgcaccaccatgcccagctaatttttgtatttttagtagagacagggtttcaccatgttgcccaggtttgtcttgaactcctgagctcaagcagtccaccctccttggcctcccaaagtgctgggattacaggcatgagccaccacacctggccaaacgttgctttacttttactccattttattgagatataatttacacagaataaagcaaaccaatattaaaactacatctcagtgaatttttacacatgtgtattgttttacagccaccatccagatttagttatagaacaattgcagtgccctagaagccttcttcataccccctcctcccactgccctgacctgtatcactatagatagcctcagcctgttcttgaacttcatataaatggaatcatacagcacatattctttttgcatgtccaagcattttctatgagatacatccatgttcttgggtgtagttattcgttctcattattgtgtaatattccattttatcagggtttcttctgagactgttgacagtttggtttggaaaattctgtgtggaggcaaggaagccatccttcacactgtaggatgtttagcaacatctctggcctctacctactagacgccaggagaatcccatcctaatagtgacaaccaaaaatgtgtccagatgtttccaaatttccttcagaattaaaaaccatcatatcagatgaatatattctaatgttaaagaaactttttatttggaaataatttcagacttaaaaaaagttataaaaatagaacaaacaacacctgtaatgtactctttacgtagattgatccattgttaaccttttgccacatttgttctttcatgttcacatgcatgcacacacacgcacacacacacacattttatttataaaccatttgagagcaaattgcatccatctgggccatttaccaccatatccttccatatatatttcccaagagtaaagatcttctcccacattatcaccattattaattgaccacagtaaatttagcataatacttttatctattgcccatgttccatttttttttcagttgaccaaaagttatcctttatagaggcagtccccaacctttttggcaccagggaccggttttatggaagataatttttccacagactggggccagggggtggggatggctttgggatggttcaagtgcattacatttattatgtactttatttctattattactacattgtaatatatactgaaataattacacaactcactttaaggtagagtcagtgggagacctgagcttgttttcctgcaactagacagtcccatctaggggtaatgggagacagttatggatcatcaggcatgagattctcgtaaggagcacacaacctagatcctgcatgagcagttcacaacagggtttacactcctatgagagtctaatgctgctgctgatctgtcaggaggcagaggtcaggcagtagttggagcaatggggagtggctgtacatgcagatgaagcttcccttactgaccactcacctccttctgtgtggccctgctcctaaccagtctgtagcctgaggtctgggaacccctactttatagcatttagtttccctaaagagcaggttccagtccaggatcaggtattatatgtaattgccatgtttccctcgtaccctttcatctagaacattctctcagtcttgtctggtcttaagactacagtcccttttttcataacaaatgtccctccttttggcatctgtctaatgtttcctcctgaatgcattcgggtaatacattcttgactggaatactacataagggatagtgtgcccttctgagtacatctcaactggaggcatgcagggtgcagttgcatctcaccagggatgttaagtttgaacttaaggtcaaggtgttgtctgattttacctttgtttagttactaattcttcccttgcaactaataagcaatgtgtagggaaacactttaaaacaatgctctcccccatcaaattttaccccctaaatttagcacactttttgattcttgtgtgaagcactctacctccaatggttataaaatgactttccaaatctggcacccccttccttcttgtgaacttactctactgacagcggttggcattccactatacatagagccctctcttttccctgtttgtgtatttatttatgtttttatttatctgctatcagcatggacttgtgaattcctatttgtttcagtggtttataaatcattacttcacttaaatatttgagtgctcaaattgttcagatttggccagtgggggccccttcaagttaggccctgtgtccttctgacaaacccctgccat

SEQ ID NO: 1881312 - DNA, 4001 bp, Homo sapiens
agcacttgaaccagccatttgtctgactctagtgcccgtgtgggcttttcctcctccaccccttcctcatgcacagtgaagagcatgcacattgctccactcagggaatcagatccaagaaagcagacttggtgtgagttggaggaggggaacagcatgagtcacacagtctctttcattcttagggatgggaaatttctcctaatctgaggttgaccttagtgactaaggaattcatcttttccccacctccagtttccccaccactgcaggaagcagcatggccctgcttcaaagatttgtttccctatcgacaatctctgtttatccttatctcttctcactctcttaccctggctttactgtacttcctccaggggctctcatgttactggtacagacagcgtcacgtacctgggcactcaatagtgacattcattcagcaaatattttttgagtgccaactatatggcaagtactttcctaggcactaggggacagctgtgaatagaaaagcaagtacttctgcctttgtggagctgacagtttagtgaaggatgcagacaacttaatagctgaataacaagacacattcagagaccgacgtctattaacaaagcaataagaaagggtgatatgatctggagcaaggagttgacaggctttgtctgtaaagatctagatagtaaatataggcttcatggattgtacagtctcagtggcaaatacccaactctgatgttgtaatgtgaaagcaggcattggacaataggtgaacaaatgggcatggtcatgtgacaataaaactttacttacaaaaacaggaagggggcctgatttgaaacacagacccctgatttagagaatctatctactttatattggatggctaagagaagcctctctgcagaagtgacatttgagctgggactttacatggaatgatggcttgattacccagatttggtctgcctcgtcccgtggttttcaaaacgaggttcccataccagtagcactagtatcacctgggaacttgttaaatgtagactcttgggacttgccccagaccaaataaaccagaactctgaagatggagcccaacaatctgtttcaacaaagcttttaggtgtttctcatgcatgacaaagcttgagagccattactgttggctaatggaaaagccacattgctaggaatagatgaggccacatctagactccatcacttaactctgtaaccttgggcatctcaagcatcagttttcttagctgtaacacggggatgcttctgcccaagtctaaagtagctaacagagaagaagtgaattcatctttgtaaggatcctaggacaaagcagacaccaaataggtcctcagcaaatggtagctgctgtcctcatcagaatcattatttgaatctccaagacactgaagcagatttgcgtgcagatacggatgaagggtgtgccccagaagctacccaatcccattcctgtctttttgcctttgactggcatgccctggatatcacccaaatacaaggctgattgttaaaggaaaactcaagatgcttttaaaagtctttcattggccctgtttcttcagctccctttctggcctgttaacctagagcatgcgctgataccttttactgcaggaccgtgaattatacagctgtgactcaccaccacccggctggggccacagtgccaggcgtccagctttaccgttagctttcaggctactgacagtttgctcttttatgtgagaagctatttataccaggagggacaaaggctggcagatgctgggggaagggagagaagaatgataaaatggttcatctcccaaggtctgctgggtggttttggcttataggaaaggaatgcacaatctaatagcccttctaaaacccccataaaaaccatcattagactcaccagccatttgcagagtgttgtctttatttcattactccatcagcacatgctgagatcaaaatggaatttcatggtacagggagatgcatgtctctccaactgaattggattaaattccccctaagctgcatctcctagttagccttcactgtcactcacctcggtgttttcaatgcagtttgagagatgagttgggaagggagggaagaagggggcagggcaggaggaggcttcagagcagtccacctcactcttcttgggaagctagtcacatgaacaatgctgtatttatcttggctccagaaatacactgatgtcatcagatggcaatgggaaatatgcctgtgtgtgcagctttcactaaaactgcctgttaataaacttgttttcaacggagctgtcagagttgggactagaacctgggttcccaggcttcagggcctctgccagatgaagtcagcagcaacacggccagattccaccagcagggacttgtcaaggcttgcgtgcagattatgaggcctagaaaggccaaggctcatttgcaaatgcaggatgagagacctgccattggagttctagctttcaagacaggtatctccaacctttacagtaaattcactctggggtcctaaagtttgggacttggcctcttacttagacttcctgcataaattcacagctgcacaccctttctgctgactgggcagtctacactgtagcctggtgtgagagttaatgtagtatcaagatgatctcctctgccttatgacgcaggagatattttgagtaatttcatgggatgattggattaatccaccaccaaatcagcaagtaactaacttccttcctcaatctatttatctgcctgtgccttcctttatgcatttatttgtgcattcagccatttattcgttcaacagttgtttattaagtacccatatgtgcaagctgttagtataggtgtgatttcaatatggcagttttccaggtccaatcaaaaactggagctttccaacaccagtctttatatgttgctttaggtggcctggagccatacaaaggtagatgtagaaagtgtctcatggaagacccatgcagacatcaggctttgtgctggcctccgataacttctgtcttttgagtaactatccttctgggctcataagtgtttgagagtctaagcttcgatgataactagctctgtgttcaaattttagctgtgctgctttccaacattggccaagttaattcacctccccaaactttcatctcatcttctgaaaaacaaggatgtcagtacttaactacagcatagttgtgaaaattaaatgaaacaatgttttaaacatttggggtttttaaagtggctgctcttagttttcttttccatagtcaaaaattggaaataactcaaaagtctatccacaggtacatggataaacatattgtattatatctatatagtatactactacttcacaataaaagtgaatgaactgttgatctatgcaaagtgaatcagagtctgagaatcattattccaaatgaaagaagccaggcaaaatagtacacactatgtgatttcatttatataaaactctagaaaatgcaaactaatctgtagtgacagaaagcagatcaatggttacttggggatggggaaatgagagggaggaacgacaaaaggattgacaagagttctgggggtgataggtacatttgctatcttgattatgttgatgctttcatgggtacatacatatgttggaacttaccaaattgtatacttgcatgtgatttattatatgttgatacctcgataaagtgatggaataaatgaatgaatgaagttactctttagcaaacaggaaggcaagcttcctcccatgccaatggtggaggcttcctaaggtttcatcaattgcctcagggagtagctaagtcttttgccaagcttttgtcagaaagaactgctcagtattaatcatgcacaatgaaaaggagatttggggtagaaactcatcaacatccagatggatggcacaagaaaatgagttcc

SEQ ID NO: 1881313 - DNA, 4001 bp, Homo sapiens
acaaacaaaatggccaggtgcagtgcctcacgcctgtaatcccagaactttgggaggctaaggcgggcagatccctaggtcaggagttcgagaccatcctggccaacatggcaaaaccccgtctctactgaaaatacaaaaattaactgggcatggtggcaggtgcctataatcccagctacacaggaggctgatgcaggagaattgcttgaacctgggaggtggaggttgcagtgagctgagatcgtgccattgcactccaccttgggcgacaaaaggaagactccatctaaaagaaaaaaaaaaagccaggtgcggtggctcacgcctgtaatcccagcactttgggaggctgaggcgggtggatcacgaggtcaagagattgagaccatcctggccaacatggagaaaccccatctctactaaaaatagaaaaaatttgctgggtgtggtggtgcacgcctgtagtaccagctacttgggaggctgagacaggagaatcgcttgaacctgggaggcagagcttgcagtgagcagaggtcatgccattgcactccagcctgggcgacagagtgagactcctctcaaaaaaaaataggggcctggcagaacggtcgccctcattccttccagatgccttttgaatgctctgctggatgggtggttggctgagccgtggggcatctgagaacaagtcagtagaccttctccaagagtatgcaataaggactgagcaggaaaaaagttggagactgcctgtcccctcacaaagttgatggtctaacattcttctcagggtcaagaaacttgtccagggagacactgctgtttataatcacaggcctgcttagcctagaacctgggctggcctcttcatcagtggggatgagggctccttgctcccagctgctcagctcccagcagcattgagctcctgggtgtgtgccaagcctgtatgggaggtgatagggaggattttaattaatactgagtaattaccaggcggtgtttaagcatcccaaatgccctcaggttcccaaacctacagctactctcttcctggctaggcctgtaaggagagggggactctgctctatgcccagtgggcctttggttagcacgtaggctgtagactggacatcccaggaaggtctccacctttttcaatacccttccagtttggtaggaggaggagggcaatttgggaaatagtctggcctctacagttcacctataccatcttcccaggggcaaaggataacaatgcctgtggtctgctcaacttcatcaagcagtgttgacctagggcccagtgtagaatgtggggagaggaatgggcagacctagatctggggaccctggtgaaagtgctccaggaggaacaggcacagaggtctttgctgcttttggccttatttccctttctcactgtacacatttggctgagtgaactctttcaaatttatttttctgtctgtggctctcaaattatgatctcattcaaacgcctacttcctacaaggccttacccgtttgacatctcagagacctgacagactcctgagttattccaccattccacctggcagccaaggtggtcttgactccaccaggcctttgctcttgttgtatgttcagatggctttcctccagatcttcccctgggcgggtcctgctcaggcctcggggctagcttgaatgtcacgccggaaagtgagccctctcttgcccttcatcacagcagaatcacactgatgtgctcgtatgcttctgcttctcgctgtgtctctggtgcttagtaagtgctggccaaaaagaggctcttggcatcagctgaaagaataatttaaaggtcttcaggaccaggcgagaggcactaatcggtccccttcatgggtagaccgttcattacctaattccctggattccctccgtgagctggcatcaggaacactccactgtctcgaccccccgacagcccgagggggcgggtcatctagtggcgcaagcgcactgagggccggtgctaagcggggacgcgcacgcccgcggtggcgtgcgtcacaaccaggacgcctgccccgcccgtccagctcgcctgcccgtcggtccccgcggcggcggcggctgcccagtgacagcggcggcggtgccaggtcggccgtggtagcgtagggttgcgcggcccggaaacgcagagccggccaaagagcggcgcgacgtgagccggggccgtgcgcgaagagacctcgcgggcgcggagcgaaaggccggcgtgagtgagcgcggagacagtggccgccggcggcccaacccgtctatcccttcggccgccgccggcatgagccacatccagatcccgccggggctcacggagctgctgcagggctacacggtggaggtgctgcgacagcagccgcctgacctcgtcgaattcgcagtggagtacttcacccgcctgcgcgaggcccgcgccccagcctcagtcctgcccgccgccaccccacgccagagcctgggccaccccccgccagaacccggcccggaccgtgtcgccgacgccaaaggggacagcgagtcggaggaggacgaggacttggaaggtaggctgtgggcggggccctggggagtggtgcaggaggtctccagaggtctagaggggtggcagggagccaggtgtcgcgccgcagccaagccgaccgcaggctgggattgggagctctgtagccgcgtttctagcgtttccctgagacaccggcgtgagcccgcgtgcgccacttccaaattgagctccgcgatcctgcgagccctagagcgcaccgagtgatttgtcagatccagccttgaaggaaacgtgcgcgctgtcggccctgctagaggatccctcgcctttgcttaagacccttcaccagttttggcttcgaagacaacagcgttctcatccagtgacttgtgtttaattgataggacagtaagtttgtttggaaataataattttttttgaaaagttactgtgaaaacttttaagcatagacaaaagaggaaaggtgagatgaatccctatatgccatcacctacatttaacagttgcgtttgtcacaaagtttcatccataccttttttctttctttgccgaagtgtattaaagcaaatctctcaggtcatttcacctctgcttacttgagtttgtatttcttcaaacatggtccctgggaatattcctatttttaaaaacttggccaaaacgattgaatcaaatttggtgagagtaaataattatcttgccggccggggcagtgggcccctatagtctataccagctactctggaggctgaggaggaaatatcgcttgaatccaagagttcgagaccagcctgggcaaaatagacaccctacctcatttttgaaaacgaaaaacctggccgggcgtggtgggtcacgcctgtagtcccagcactttgggaggccgaggcgggtggatcacctgaggtcaggagttcgagaccagcctggccaacatggcgaaaccccgtctctactaaaaatacaaaaattagccgggcgtggtggcgggcgtctgtagtcccagctacttgggaggctgaggcagggagaatcgcttgaacctgggaggcggaggttgcagtgagccaagatcatgccactgcactccagcctgggcgacagagcgaactccgtctcaaaaaaaaaaaaaaagaaaaaggaaaaacccagtaactatattcttgtttagtgggtgggttgtagctttaaaggaaaggatcccagcagagactgagatcaggagagcagcttcattggctctacttgctgtgtcaggatttatcatttagtaatagtaaaccttctccaagagtttgcaataaactccaagagtacgcaataaggaccgagcaggaaacaagttggagactgtccctcccctcacagatttggtgatccaagatcatcacacctttttttttttttaaagtcagga

SEQ ID NO: 1881314 - DNA, 4001 bp, Homo sapiens
caaggtccccacttcacccagcaggatccagcagcccctgatgttggctcagtacccccagttgaggtggtgtactctcaggagccaggggcccagccagacttggcattggccagaagccttcctcctgctgaggagctgccggttgagacccccaagagggctggcgctgaggtgtcctgggaagtcagctccccaggtcccccgcccaagcaggctgaccttcctgacgctaaggattcaccaggaccccagcccacggatccacccgcctcagaggctcctgatcggccgtctaagccaggtgggtatcaatgagtgtgctgagcgatgttctggggcagctggatgcctcaattctgtttgaccctgggtccctctaggtctcattttcctctttgtggcaaatgaggttgattgtgactcaatcctgagggattaggaggaccataggagggtcaggtaaggtgatgactgctttgtcatttcagagagagcagcaatgaatggagcagaccccatctccccccagcgggtgagaggagctgtggaggccccaggcacccccaagtctctcatccctggtccctcagaccctggcccagctgtaaaccgaacagagagccccatgggggccctgcagccaggtgagagcatggctggggtgtggggagagggagtgctctgtctagtaactgagaacctctgttggggatgtatgggggcggagggtggggaatgaatggagacaatcacctccttaaaggagttgcccagggcctccttcaaacaacctaggataataaattcatactcactgggaaatctgggagaagtcatttgcccttttggggctagaatgttctaatatgtaacatggatatgtttagaacaaaaaaaatatataaaaattagttgggcgtggtggtgcatacctgtagtcccagctattccggaggctgaggtgggagatcacttgtcctggaggtcaaggctgcagtaagcccacattgcaccactgcacaccagcctggatgacagagtgagaacctgtcaaaagaaaaaaagaaaaaaattccaatgcccaagccacgtcccaagaaattcttattccttggtctccagaagattctaatatgcagcccatgtgtcgaactgctggggtactacctccctgatagtagcattaatgaaaatgatagctgacatccatttagcacttactgggtgttgggcaccgggctaaacatttcatcttcttcacaacgcaatgaggcaggtgctgttatctccattttgcagatttgtttggaaaagttaaatgacttgccaaccacactagagggtgatacaaaatcaaaagcacttttcaaatggctattttaatattgttataattgcagatgaagccgaggagtggccggggcgcccccaaagccatcccccagcacccccagtccaggccccctcgacgtcacgccggggcctcattcgagtcaccacgcagcgagccctgggccagcctccccctccggagcccaccgccagctccatggcttcagccccagcctccagccccccagccaacgccactgcacccccgctacgctggggcccccttcggcgggtcctgagcttctcctgggagctgcacgtctacggggtgggggtactctttctgctgcccgcgttgttggcgctggctgcgctggcagccgccccagcagggccccggctggcattggtggccgcggtgctggtgctcgtggcttcggcgctgcgatccgcctacatgcttaccgacccttacggctcgcaggcgcggctgggcgttcgcgggggcctggtgctctacaacctgcccttccccttgctgcttacggcgctggcagccctgactctgctcggcctgggcgcggggctgccgccaccgctgcaaaacccactcctgctgggagcagtggcgctggtgcatggtgtagggttgctcgcgacagacctgctgtccacatggtctgtgctcaacctcctgacgcagggcttgtcgtgcgcctggggcgcggccgtggctctgggcacgctctgcctgtgccgtcgccgcctgctggacggcccacggggctgggatgccagcccgggccctcggctgttggctgtggcgggcgcgctggggctgctggctagcggcttgcagctggcggctgcgctctggctgtacccgggcccaggccgcgtgggccgcttctcgtgggcctggtggggtgtccacttctggctgcgcctcctggagctgacatgggcgctcgccctggcgttggccgcggtggctgccgcgagacccaggccgcccacggagcacgcttgctgggctaagctgatgcgtctggcgtgcccggcgccgtcaggaaagagcgaggtgccggagcgacccaataactgctatgcagggcccagcaacgttggtgcaggcagcttggacatcagcaagagcctcatccgcaacccggcggagagtgggcagctggccacgcccagttcaggcgcctggggctcggctgcgtcgttgggtcgcggaccccagggtggcccgggactgtcccgcaacggtgtgggaccggcgccatcgctgagcgagctggatctgcggccgccatcgcccatcaacctgagccgcagcatcgacgccgcgctcttccgcgagcacctagtgcgagacagtgtgttccagcgctgcggcctccgcggcctggcctccccgccgcctggaggcgctctgcggccgcgccggggcagccatcccaaagccgagctcgacgacgctggctcctcgctcctccgcggccgctgcaggtcgctcagcgacgtgcgcgtgcgcgggccggtcccacagcacgtagtggaagcacccgacggggcagccgctgcggcttctggcagctccctcgacagcttctccaggggttcactcaagatcagttggaacccctggcgccacgggctgtcatcagtggacagtctgcccctagatgagttgcccagcacggtacagctactgcctgccccgaccccagcccctgattctaccgccgctcggcagggggacggccagggagaggtccagccgcgcggcaagcctggggaatcccgcagcgcctccagtgataccatcgagctttgaagagcggtcctgacgcagggccaggaccctgcccgatgcccacatggcatggcctactgggacagttgagcctttaaaaaatgggcatcctggccaggcgcggtggctcacgccaggaatcccagcactttgggaggccgaggtgggtggaacacgaggtcaggagttcgagatcagcctcctggtctcgaacatagcgaaaccctcgtctctactaaaaatacaaaaaaattagccaggtggcacacgcctgtagtcccagctactcgggaggctgaggcgggagaattgcttgaacagggaggcagaggttgcagtgagccgagaccacgccattgcactccagcctgggtgacaagagtgagactccgtctcaaaaaaaaaaaaaaaaaaaaaaaaaaaaaaggcatccccaggcctctctacctgacggcaacccccgggggacagccaggtttgaactcaccccacccccatgccgttttttgcttttaatatttctatttttttttcagccggcattttgcacagaggccgtgtcttatgcggaatacagggtgggtgtgcatggattcgggcatgaagaacagggagcaggtgccccagactccccaacgtggagtgatgagcctcgcttgtctagattgtcctctttgtgccaaagaaataaacccttaggacttggctcatgcttccctctggccatgccaggatcctgtactcataggaggaaggagagactggaggccctgcctcccagtcattctaagtcctgtgtattggacggagagcaggactccgaggaaaggttgcttgaggcttg

SEQ ID NO: 1881315 - DNA, 4001 bp, Homo sapiens
tagtcttctccaaggttttgtcctgggttttctctctgggccatggaggatgggcttcaggtttgtgatatcctggaagcggaatataaaaatgtggtgtgcctgtgcctcggtcagacaggatgcataacttcatgtgactcctggagtctgaggagggaaaaaattaagaatcactgttctgacagacctgaattaccctggatctgccacctattcgttgtgggaccttaagcaagataccttcttaggagttccaatcagtatgattggaatcaaaatacctgccctatgagggcttagtaaaagagaggatgtatataaaatgcttggcacagtatctggcatattaagtacttcactagagaagtattattttaacataataataagccaaatcgaatagctacttaattttcccaggtaaactccatctacccttatgacctcactgatgatctaaaactgaaagacaactctccatctttattttccagctcaaacctccctcctaaagtccaaccagcctgtacagccagctgggcactaaaccagaatttcccaccagcagctcaaatctatcgttatgtctttttccttctctgttaccatatcgcacatttcacttaaagctcaattggtttggccaagctagaaacctgaagtcttcttagactcactcttccctttaatgttgaacagagttagacctcaaggcttgttggttctactttttaaagatttctgaaatcagtatcacttatcctcacagtcagccttcgtttggaaacttaatagctcttacctggattacaacagctttgtaacttatttttgtcccaaggttctcacctgttgattctgtcttccattgttattggagggccataggtggcagagatgttttttccacaaagtattaaattataagtgattctccccttccccctggagactttttctttggctgatagcctcactctcccttacctcctaagagatattctggtccatggtctttggatgtagaaaatgaggataacaagtgccaagaattacagccttacaaggtgaaatactactttaattaacttccattaacaacaggagcaagaacttcttacagaaagaggagactaagaaaggagtgagaagggagaggaacttaagagttgatttaggggagtgctttttgttaggactggggacaggggcaggtaaagacagatctttgaagcaaaagagagtgagaatgcaagacatggggaaagagacttaagtgctcctttgcttttccacagttttcagtacagatttgaatggctttgacttttggcagctgcacagtgctaggactggaccatgaaatatctctgggctctgacaattacatttgggttaatctaagcctgatcccatgtgttcctggaagagaagccccatgacattcaaagtccttgacaatctgacaccagcttttctaaccctataaggcccttccatccagcaaacttcctgcagaattattctctatccctcacatgttcatacccatgctcgacgcatttgctctctctgcctagaatcttactcttgtctgcctttctgcctggttaaatcccacatacgccaagatccaacactgctaaacccctttccttgagttgggatcatcttgttatgcagggccgggatacctgcaagggaatggaattaaaaaggttaagagattgagcagttgaaccttttcttgggaggtttgaggacaagccatagtgaaaggatttacctacagagagcacctcattattagatttgtggaaagtactgagtggatggttgactcaagtaaggagggaatgggaagtccacagggcagtaggaactgaagccaacatgactctttcatatcaggtatggacattcttgctaacacacagcggttcctcctcttattttaagcaacaaaaataatttatcagaatggtttatttgcaaacagtaaaaatgtctggatttctagaggtaaatgattatgctgtgttccaaataatactaaaatgcacttgtattgccagtaagggaggtatgtaaaagaaaggaagagattagaccgggtctggataaaaagcttatcttaaaccaaaactacatgtcatcaaatttgcacctaagtacaaatagaatgtgtttctcaatccatcaactccctcgtttctttcacaaacatgcaaggccagaatacagtaatgttcactgtttacacagttactaatttatccaaagcaaagctttgtgcccccagatggaaacatccccaggccttagaagtatttagcttatataagaggaaggctaaattgaaggggcttcacaagggtgttccatgccaaaagtgatgaaaagtcagagtagactgaaagggtttagtatcacaacgaggcagaaacgtacaatatttcatgcagccaaccttatttattgagaagtcctaattttattgcccgtttagtaacatgtttgttccacaagctaatttcttataaagcaaagcacaaccttttcttataaatagtataaattattttatttacagaaacttgttacaaaacaaatagactatatatttcttctcttttaaatatccaaagtaattttctatcccttgacatttgttcatgttctatacagcagccaacacaaagtccagctgagatgctcttgattatgtgtacaaattatcaaactattcacacgtttttaacacaggagattgcttttataaccaagctcaaaaaaaaaaaaaaaaaaaaaaaagcaaaatgctttcaaggccctacattcacactgacagtatgtagtgctcatttaaattatctgaaaatgtaaaatgttttgcacaaaatgtaaaagtgattattttctgctaaacaaacttttaagaatattttttcaaagcccaatcgccccaaaccccctggacagaatgagcgacattaagaaattccttggcaacagaactcttgcaggaagacagctgcccttataagttacatttttcaaattatacatttttttcaatgttctcagaggtacttctttgtattatatttttggaatacaaaatattttaaatattttaaattgtatttcatgagtgaataacaaaacggacacatcgtgtaagttgctggctgacaaaaagatctgtaacccttggtgccaccaggcaatccatcaccaattgaattactatgaaccaagaggtcttaattttaaaataccttataaaattaccagcattggtggttttcaactccgcccctaaaattttagaaacaatatttaggtggaaaaagcaaactccaaaagttcaactgaacattcaagtctttttaaagagattctgtctaagcttaaaactagtttcaggcactttcagttttttccattagttttaaaccacatcacatagtaacatacatgtgctgagtatacacacacacgcacaggcacacacacacgcagtcacatactcccacacataaaatactaacaaaagaaaagcagtgtgtcacttagttacatgtagtctatcgggaaaccaggcaaccaggaagaagcaatgcccacttcatctgtatgaatccactcccgagacactaaaagggacaaagacttttcacagaacagaggcatcccttaaaactgtaaaggaggcaggttctagaactattggcttggcagtgaaccacttcaaattataaaaaggtatttacttttattaattaataaataaatactagatgatctcaattgtaccaaaacaggatatcagaaaaaaagacctgtgcaaaaatacatatttaaatatgtacaattcatttttaacaaaatatgtcttctgaaatagggatacttccatatttataatagaacaagaaattccaaaataaagatacaaaagtaggttttgtataattctttgttcatcattgcag

SEQ ID NO: 1881316 - DNA, 4001 bp, Homo sapiens
ttatcgcatgctggtgcatagaactagtccaggggttaggaaacattaatttcacaccacctttgcagattatctcattatgggtcagttgttacttagtaggttgcaataattttcatggctgtgaatgcctcactccagaaagtatccaaacttacctgataaatacagaagctgtatattaatagatacaatgttgccatagattcttcctcaacagcctggtgtctcacagaaaggatcagctgtgggcaatataatgagaagggcagctatcacagacctttaagtagaaagtaaccacctttattggatgctataaaataaattatcaaagtctatctagataacccccaagtgtctgtgatatattcctgattgctgttcttaaaaactgcaagaaaactcccaaggtattccttagttcacagctaaggcggatggtgacctacaaaagttgggctcaaagttgaaagagccggatttgtcccaactgtgttactatgcaaacttacacaaagcagggaggtaagcagtttgtcaagcaacatacaaatgctgtaatgagcctacagttattattttcatgcaacccattaccaacttaagaaaaatccttatttgtaaatgtacataaaaaataaacaagaattccttataaccatgcaaaagctctatttcattcctagaacagaggaccactcaagggtctacttttcatctttcctaagtggtaagggtaaggaacagcaaaatcaaagttcctatcaagtgaagttagagtactctgaaattatgatgaatgttaacgggaggaattatttcattcgttcattcaaatatatttactgagcacttacatgtcaggcagttccggttgctgaggatacatcagcaaagcagagacaaaaatacctgttcttaggatgttcaaattctagtggtgggtgcacctgctaaacaaataaatgagtgattacacaatatatgcaatgttactgtgttacggaaaaaaataaagcaggtggaggatagggagccaggaggtggagatattcttatattggagattgaaggaatggtcctgtgaggtgacagatcgaaagatacaaggaatcaaatctataaatgtcagaaggggctttccaagcaaaggaaacattaagtgcagaagtcctgacgcaagagctacgttttatgtaaatattctacgaggagaaaatttaaaaaacaccttggattttggagtcctagctctttgtcttttaccagcagagtataatttataaagaaaacaactttacctctcttgaacctgtttcttcctctgtatattagaggactgacactaccatatacttatttcaaggaacgaaaattaagaaacgcactttacagaaacgagatattacaaagtgctaaattaacaaccaagcttgtctccttggctgtcaaatgaagctaatgtgcccatttcacagggctttgcggggactcaatgagataaccaacgtaaatatgtcgactgacactcagaaaccccgcaaggcatgatcaagcaatactactgtcaacacagggtctaccaactatgagcaggcaggggctcttgctgctctgctcagtataagacgcccaggacgaagcacctcgaaactgctccacaggcattcgttgaataaaccgactgtaaactcgactcactttagactactgtgccgaatttttcgcatttctacattctgctgggacattccagcttctaagaacccagcttcactctctgaaactctttcaacatatgcaggtctcactttaaaaggtcttgaaatggagttcctaccagacggcctttccctagggttcataaagaccctttcaagccaccctcccgcgcgccgcgttaccacacgcccacctcctggttgccgcgactacacctcacgaacttttcgcgccccaaggcggccctttataaagatgcggtgacgtcaccgcgcgccgcgcgtgcgcaaatatggtaacgtgaccacgccctggcctgcgctaaggccccggcgtcggcgcagtagctggtgccttcccggaagggctcagaggcgggctcggtgagtggagtcggacagtgggtgggtgccctgactgcctgacggccgcgcagggccttgcaggaccgctggggaggatgttgttaacgtaaagagccaggctgatgaggaaggttcatgagtcctttgggtataagcgggagttggggcggccggagggcagatgactctgagaaggtgcggatcttcgattctaaggggagaatgtgatttggttttgtctaaagtgctgatagtgggcctcacagaaaagttaccatgaaccgactttccgggattcccttggcgctgcattaattggcctcgttgcaaaaggaaaccgagaggaaggcggcaagacttggcctgcgggtgatgttagcggaaaatatctgtaatttagaccccggagggcgggcctgtgagcgattgctgtccgcggtgctgaaggaaaggcagccacgcccagaggaggaaacctaatgagggcagggcggtgtttccgttttccttggccgggttcagcaccctacactcaataagcgtgggctttctagcaggactggacactcaggcggtgtgtcaatctttagacaatctttatagagtgcatagatgtttaatttcataaaatttaggaaagcttcatttcaggaaggaattttattcctctttttctcccttagggcaagcactttaaccttttaagcccaaccagatgagttgcctgcagttttggaggccttcagagcatttcactagacctctgtctgtgtcggtccagtgtctttagccaaggtgagcttgctcgtggtgtgaagtgtgccacgaaaatgggctttcctgcactccacaaatgagagtgcttagcagccaggggaaggggaaggtatctatctaattgtgcttttcctcgcagttacacatgaaaagtactttcctatttagaagagagatggtagaactgggcactcttccaataaaggaaagaccttgaatttccagttggttctcatacttgtttgcctgcctttctgtctatgtgtgtttgcacatgcataagggatggtgttcctgtgttgaattttacagagcagattttttttctgttgattcaataaaacgtttagtagtcttagtaccagctgcttgtttgtttttaattctgattaaggttagagtctagaaagagaagacaatatgaaatatgttgggtttacctaattcatagtattcttagatgtatctggcatgctgaataaaaatgtgtttaattgcatcctttcattttatacattattacatcttaagttttcttttctcttctgagagaaccaatggattaaggtactaaaataatcaaatgttgcaaagctgaggacatgtggtagaagtaactttaaatgtttttattctttatgacagctttgattaaagatgacttccttgtttgctcaagaaattcgcctttctaaaagacatgaagaaatgtaagtttttttaaagggatgattcagatatagaaattggactggctttgttagtgaaatattgtatacacaggatgacttaaaaatttgcaagcatgtcattttaattttctgacacttaagaggttttagtgttagggaatttcattgtttcttatgaataagcaagattaaaaggtatgttctatgtatttttactctttgtaagtaatatatagataaatttgcccctcctcccaccctttctaggctccacattggcatttaatgggcttctctaaacctcttacacagggctggcttcttgggtatgtgacttatatacagtcacaggtcctgcatttggtttaatgctctcatgccattgtcttgcatcattttggactggaccctgcaaattgtgtagccagtcctgctctttgct

SEQ ID NO: 1881317 - DNA, 4001 bp, Homo sapiens
gaactcctggacccaagcaatctgccagccttggcctcccaaagtggtgggatttcaggcaggaggcactgtgcctggcctacttgagttttaacagtgaaaatatagatacttgcttgcccttgtggactgttcattctagtgaaagggaacagacagtaaattagagacatgtcagatggtaagggcaatggagaaaataaagcaagttaagggcatagggattagggtgggggaagctctttcatatgatgtggtcctggagagcctcaatgataaagttaaattttatcaaagattcaaaggaaataggagggagaaagtcatatgagcatacagggaagatctgttcagtaagaaagacttgcatttaataagagtaaggttggtgaacgttttgcaagtggatggacttttctgcgattttgcagtttgttttttattatttgcataattctctttacaaaaactgtgatcctaactggataacataagcttattatcaaatatagtacaaagttcaaatattctacaaaatatcattcatctcttttactaaaggaaaagctatgcgtcctcacacagcaggttatagaatttgctgatgttaagaagaattagctgaagtatataatgtcttacctctcctgtaaaatacctcctttgtttcagagtcagctatgaaattctaataatagtctcaaacttttcacttggattatttgagtaaatgtaaaatgcccagcactgtacataattacttctttgttaagatgtcaacctttgttttttagttaagagttaatgaaccttgataattggcaaacaatctttgagccgaaagtaggatggacaccatcagtactcttaacccaaaacaatgaaactattgttggcattaggattacattgctttctgttcagataatttttttctgaaaaaatgcatgtatactttgttattcaatggtgtcagaaatattaataagttagctataattaagtattccttaaacagtttgttattcaaacaataaatgtgaacttatgtataaagttagaagactaaaaatggcatagaacgcactaatactctcatgctaaaggttttaaaaaaattaatagtatttctgcccttgaaaaacatgagttgtatatgtaatgtaaaatctttttctgtggccagtaaaaatttccaacaggaaagcttggggtgagtatgtctaaaattcactcatctgaggagaatgtaatttaagattgggcacttttattatagaaagtagaaatttgagttatcttactttttaacttaaagaatcatcttgagagatcaatggtgtccactggaaggcaagaacttggttctggcaggaaaaccaccactggctggtagtatttgcagagcacttaacctctgtgcctaggttcttgtagctgtcaagtagataatagtaattgctaccttccgtgggaagtgagcttgtgctttgacatctttagttgaagatgctgtataaacacaaattattattattagaatataatacatatatgcacataaaacaccagcatggtgctcttttaatgcttatataacatctataaataatgctcttccatgctctctcttcactttaggtcagagaatatcatagcagaccactattcaatttctgtaagtatggaggaaatatatttgttaaagctccatgtcatctttttgagacgaacttaacctgctaattccttatggtctctgtagcaattgcccgatggcccctacccaagttaagcctttggtattttttgaaatgttggctaaattacttttcttggagatgtggagccatcagggaaaacctggaagaatgaaattggctagtgatattaaaattttggttgtttaacatttaactgagtctcaacaacgtgttaaagtgctatctaaacagataattagctagtggctgcgcagtgagctgtctaaatttagcagtgaaattaggtttagggaatgcgaatatagaaaaagaaattttctcaagggaaacggtggtgtcagcacagctgaggaatgtcacaatagctacattttgtcaattatgatcatcatcaggggatctcccggagcgatgcaggacaaggtttattcataagtgcatcttgagaataggtgatagaaagccttggctgcaggagacaagcttacaggggacgacagaggcagacaggcacagggagggagggaagaggaaagggctggagggaaaaaggcactagaccgagcgctgggagactggaagggaggcagaagttaagaaagaaaaaagaggtgggcagggtgtagaatggcttgtagccttggaggttagtaaagccttgtaatccagcgggcggaaggtgggaagaccctattgactgaaagccgaggacagcgtggtcttggccgcaagcatgcattagtttagctgcgacaggctaacttctgggcggctgatccttgttcagctttcctgttactggaacacatttatggctatctcgtggagatgacaggacctacataaaattaatagtgtcaggcctgaggactggtgtcctctgccttcaattcaccccctacgctggacagtccaaattgtccaccctcctactccccccgcggaaccaatgtggcagtggctccaaggtcaagctgccggtactgtgcgaggcgggaggatggagagggcagggcggagagccacctgggatgagcgagggtcatggtggaccacagacgctcttcttatacgggcaaatgtttaatacttcccgaggtcgcctctctgccatcaaacgaaaacaggcaagaaaataaaactacacatacgaacatgcaaaggaaacaaaaccaaagaaaaacaccaacgcactcgttgggggaaatccatggcctcctgttgccagtcgcccggcgcggaaagtggacagcccagcggccagtgagaagcaagagcaagaaagcaaaccttctgaagacccctctcctcgcccagctccgccgaccattctaccaagctgccctcccagaaaaaagagcaggaaaaatgcctgtgcaaacgtgccttggcgagcggggaataagtgggctgggaagaagggaaggattcggagagcacagctgtcccggggaacaggaaggaggagaaagtctctccctcccttcagtgccccgcgccccagcgaggaggaagattactagtccagcaggctgcgtccagcttcctacacaggaacctttagcatgggcaacggaagggcagccccctcctgccttcccctccccaccccaccccctcgtcccaggtccccgccacagggagagcgccgcccgggagaggagaaggccgagcgtgattgtcccgcagccctcgcctcagtcggcgccggggcccccgtggacccgcgaggggtggagtgggcgagaccattggaaaggcagggaaggggggaaaccaggcaggaacgaggggcggggccgactaacctattccagattttcctgtcccttttaaatctctgctgtgggagaaaccccgttatcaaagtggatgaaaagaatatttttttttgaaaggggaggagcatgtgtaggagggcggggtgggaggagacagggcttgcgcccggggatcagacgggaggtggagttgcgcggggagggcgggcgagtcgggcgcccgctctgagagtcggtttcttttccccctcttgcgtggggcggggtggtgcgttccgagttcccaggagttcgacgcgggcgggtgccgaggggaggggagtggcggcggcggcgggcggctcccgcttcagcctcggcagtggcgtcggcgacggcggtgtcgaggcagccgccagcgttcggccaagtgtcagccggcagcgacggcgctagagctgggagctggggacgcgcgcgccggaccttccacagcctccgcccagagcctgaggcg

SEQ ID NO: 1881318 - DNA, 4001 bp, Homo sapiens; identical to SEQ ID NO: 316186

SEQ ID NO: 1881319 - DNA, 4001 bp, Homo sapiens; identical to SEQ ID NO: 316201

SEQ ID NO: 1881320 - DNA, 4001 bp, Homo sapiens
tgcctgtaatcccagctactcgggaggctgaggtgggagaattgcttgaacacaggaggcggaggttgcagtgagccgagatcgtgccactgccctccagccttggcgacagagtgagactctgtctcaaaaaaaaaaaaaaaaaaaaaaagaacaaggctgggacattgcagcgttctcaaagagaaataaagtagccatggagataagaagcaggatgatttgggcatgtttatcagaggtagagacaagggagaaatcaaagataagtttgggcttttgtctccagtaactgggagcctagtggccatttttgctgcaaagaggaagctgggcaagtgtagcagtgaggctgaagaaaagggaattaaattttggccatgttcacttgaaacgtcttttagacatcctagtgaaggtactggcacggaggatctagtctgagggtttaggtcagtgtttcagccgtggatctggggcagatgaatgtagacagaccaggccagtgatcaggactgagcccagacttcatcgtgagatatggaagttgagtcagaatctgcaaaggagctgagcaggagctgcagggggtaggaggaaaactgggagagtgtagcccctgggagtcaaagggagcaagcttcaaatgatgctgagggggtgagaatggagaatggaacactggattccatttggtagtacacagatcgctgaggaccctgtcccgggcagtttcctggaggaagaggcaagcctggctggagtgggtagaggggagagtgaaggcgaaggattagagtgtatagagaccagtgtcttggtctgaggggagtagagacaggtgacaaccacagggcagacgtaggttaaaggtgtttagtttttccttcaagtaaatgggcagatgtattccatatacgttcccagtgaagggccgggtgcggtggctcaagcctgtagtcccagcactttggaaggccgaggcgggtggatcacctgagatcaggagtttgagaccagcctggctaacatggtgaaaccccgtctctactaaaaatacaaaaattagctgggcatggtggcgggcgcctgtaatcctaggtactcaggaggctgaggcagaagaatcgcttgaacccaggaggcggaggttgcggtgagccgaaatcgcgccattgcactccagcctgggtgacaaaagcaagacgcagttttttgttgttgtttttttaattgccaatgaggaaaggggaagttctgtgctaggcgatagagatccaactgttgagcaggcctctctgcctgtggccttccggccggtttccagacgcccaggtggccaacattagagtccgcgtagcagtgtgaggtaacccactgagataggtcgggcctgcggagcctggcgagcagcggccctctccctggggcttcccttcaatctccgggacatttccccgacctggagctcctccgcctcaccgccaggcctctctgcagattgcaagttcacctgccactaccgctgccgcgcgctcgtctgcctggactgttgcgggccccgggacctgggctgggaacccgcggtggagcgggacacgaacgtggtgagcgcggggccgagggcgtatgggaagggcgaggatgggcaggccacagtgcaggcattctcgagggctgcctgggtgccgcgcgcaaggagcgttctaattgccgatttcccggcggcacagagaggctaattctgcgcgggggctgggaggggagcctggattgccggctccgcaagtactccacccgctgcaagcggacccgggcccaggctgacccaggctccgcgcacgcgcacttcccgcaccttcccgccctcgcctccggccagaggccactcttgtgcgcttgcccggacgctggcacccgcccccgttccctgtggtaggtggggtctgtgagtggagctccggagcgatgaggtcattcctgggggcgaagcgtgcgtgtccccgccccggcgttcctgccccaatgagacaagagctagatcccggcgatctacgtttcagtcttaacggttgcggcgcggctctggcccgggcgcacgcgcacactgacacgcgtacacgcacgcacgcgaccggggcggtggttggcggctacggacgcgcaggactgggggacgggcgggtacggctatgggcgaggcggaggcgccttctttcgaaatgacctggagcagcacgacgagcagtggctactgcagccaagaggactcggactcggagctcgagcagtacttcaccgcgcgaacctcgctagctcgcaggccgcgccgggaccaggtgggagccagggggtgccggcgggcgggaggggaagcggtcgctggagctccgccctccccggtccgttgccgcgtcctgggtcggtgggcagccccaccctcctggctacgtggctccccgcgggtcctggccggggacctgcccgcggaaccgtgcgtaagaccccgattccaccgcctagatgctgggtgccggggcccccttggtttctgtcacagacaggttgaacacggaaaaagcagctgtatggcttgtggtagacctgagccgggcattatccagctatgactaaagccgaccgagcagtttggactagcacctcgatttccgcgttcgaatgctcctgctccctccttggggagactaggggaggatgtggagagggaagagtcctcgccaggaattgagaagtatgtttaggaaaacttgagaggcagagagagatcctgctcctccatctgcactcctgtatggagccagctgagccctcacctcttccctgttctggcctgtcaccagctgctggaatgtggaagattctgttcccttcctctagggtggatctggagaaagatttgggaatagataggaaagaagtcttgttttggaccataagcattcaggagcactttacccacaggaagggggaaagctagattataaaatgcctaaagaggtggaaaaagagatccaggttactaacccaggactgtaaggtgtctcggaacctcctaggtatccccattatcggagaactgtgtgccagatgccattggtgtgaccaccaggctcagagaaccaggcctaggcaccaggaaaaagaaacagggactgtgaagctcagtatgcctggcagaaatggggcggaaatccttatttaagtaaagaaagtggagttgtgagtgatgcttcagataaaattttacaaaattccttacaaaatgggtggtgctcagcacgccaaaatcttagcccagagcttgggtgcaagggttgagttgagtgtagacccctgggcttgtcttcatgtcagtcagtcctgagccattttccactgtggaaaggtgggaaaaccacaagacactaaccaattgaaaaggagggctagccacggaggtgcacacctgtaatcccagctacttgggagggtgaggcagaaggatcacttgaacctgggaggcagaggttgcagtgagccaagatcgtgccactgcactccagcctgagtgacagagtgagactctgtctcaaaaatagaaaaggaagccaagtacggtggctcacacctctaatgccaatgctttgggaggccaaggcaggtggatcatttgcaatcaggaattcgaggtcagcctggccaacatggtgaaaccctatctctactaaacatacaaaaattagccgggcatggtggtgtgtgactgtagtcccagctacttgggagactgaatcacttcaaccgggaggcaaaggttgcagtgagccaagatcgtgccactgcactccaacctgggtgacagggtgaggctctgtctcaaaaaaaagaaagaaggctgggcttggtgactcatgcctgtaatctcagcattttgggaggccaaggcaggcagatcacttgaggccaagagttcgagacctgccaggccaacatagcaaaac

SEQ ID NO: 1881321 - DNA, 4001 bp, Homo sapiens; identical to SEQ ID NO: 316211

SEQ ID NO: 1881322 - DNA, 4001 bp, Homo sapiens
tcactcctgtaatcctagcactttgggaggccaaggtggccggatcgcttgagcccaggagttccagaccagcctgggcaacgtggcaaaactctgtctctacaaaaaatacaaaaattaaccaggtgtggtggtgtgcatttgtagtcccagctacttaggaggctgaggtgggaggatcacttgagtccaggaaggcagaggttgcagtgagctgagatcacaccagtgcacttcagcctgggtgtcagagctaggccctgtctcaaaaaaaaaaaaggaaaaattaattacacctgagggaaattcccatgcaacatttaatgaatgccttcagtgctgttataatgcattaatttctatgagaaatgttctctcttttttgtgccttttaggaaaattgcattttggtgatagaagataaaaacttggctaattaggccaggcatggtgggtcatgcatgtaatgatatgggaggctggcatatcacttgaggccaggagttcgagactagcctgtccaacacagtgaaaccccgtctctactaaaaatacaaaaattagctggatgtggtggtggatgcctgtaatcccagctacctgggaggctgaggcagaagaatcgcttgaatccaggaggtggaggttgaagtgagccgagatcacgtcactgtactccagcctgggtgacagagcgagactccgtctcaaaaaaaaaaaaaaatcagtcacgcatggtggtgcacacctataatcccagctactcgggaggctgaggcaggagaattgcttgaacccaggaggtggtggttgcagtgagctgagatcatgccactgcactccagcctgggcaatcaagtgagtgagagacagagactcccatcttaaaaaaaaaaaaaacttggctaattaaacagttgatgtaattcctattccatggggaatagtgtgtggcaaaagctttaactgtaaataatgtaaaaccctgtgcagattcgagaaatgatggagtccttcgaaggccctcagcctgcggatgtgaggctgatgaagaggaaaacaggtgagagcttgcttagttcctgatattattgttctcttccccattcccacctcagtccctaaagaacatcctgattcccccagtcttcaagcacatgaattcagaatgaaaggtttgccatggctaaggaatgtgactctttgaaaaccatgttagcatctgaggaacttttttaaactttgttttagggacttttttttccttaggtaagtaatgatttataaactcctttttttttttgactatagtcggttgcatggttactttaagcgtggaatcaaatggagtggcatttagttcaggcggcttgttccttgccatggcaaagtatcaagaagatccccaagtcaagtcacatttgtaaagctgcttcccaattggctttgtcacgcagtgttgaagcagtgggagagagattcacctgttataaaggaactgactaacacaagtatcccgtctatatctgaatgctgtctctaggtgtaagccgtggtttcgccttcgtggagttttatcacttgcaagatgctaccagctggatggaagccaatcaggttgcttcactcaccaagtctagatattcatgaaaatggaacaagtctgtacaattttaaaaaaaggttgaaggagtggtttgttccaaaggagtgacttttttttaaaaaaaaagctttgtatatattaaaattgatgttactagaataagtacagtaccaaggacttcattatagaatttgttctgcctttaaacatggctacctacctggcagggctttgttaactactgaatacctgtctggtaatcactaaaacatcttaatgtttcccttttttctagtttgttatattcctattatgtccattgagagtaagcttagtatatcaaactctccatttgacagtgaagagaacatagtgaaagtctgtggcggcatttttataagtaattccttatttctgcctgaagaccacaaagcctcctggaggcgtaactgctcagaccggtcttcagggaatatttaaggacttagtggaatttatgaacaataagtctgatgagattagcctgggagtggtgtcctgcagctgtctaatctagttagagtggcattaacattctaatctccttgagaatgccttttatagtctgttcaaagcaagtcattgatggttcttcgaggtagtgttaactgaagtgttcttcagtttgtcaagataatgttcagtgcttggcacttaaataacattttttgcaagaactccaaggcacattattgaatgcctttaaccaagtgcattctgggaagtttgcttgactcattatcttgcttttctgcagcattctgtgatttgagtcatccatgaatccatgaataaaagttacattctttgattggtaatattgccatttataacaagactcactaatgagggtatcactttgactgactgatttgttaaagtttttaagcctctcattttcctaacccagaaatcacagcctgattttattaaaagtagagcttcattcatttcataccatagataccatcctagtaaatccagaacatatacaaggttcatgtgagtctgctttcttgacatgatagcattgtttgatgcagtggatatgtcagaatgactaacctaggagtttaaaactcctaagaaactaaaacctgtaagacatttaaaagtctccacaattttaatgtatacaaagctatgttactgtgtaacacattacagttcaaattcactccagaaataaaaggccagtaggattagggactcactggtagtttggagtctcccagcacacatccctcctagtgggatgatctattcacatatctcccagcttttttatttttgcttctgtatatcacagtgagtggatggcccttcagctttttctctcctggccagacatgcagtcttgcctttagatatcgcagagacaaaattcacagcatgtcttaaatcttccaggatttgcaagaaccaaattgctcaacagtatgtatgtttagaggggttagactcctttttaaaatctggatatctaaccacctacttaaatctgtttgatagtgtcaaaccacccccacccttgatcctcccacccccaagaaaaagaaaagatgctcctgttaaatgaaggctctttaggggtaggtgctaggtatactcttggctagattgattcagctcagaattttgactttttaaagctaagtccttgtagtcacatggttgacttgaaggatgaggtggtgtgtgcatttatgagcttttcctacccccctgaagaaacttcattggcctcctggttactcaccttgaagagagtaccatccattttagtgaaaaacacatctgtcacctaggacatgacatggttgcagttgacaggaaaaaaaaaatctcatttagttgttttagagttggtggcattcagaatagtccctcttgagaaagaattgtaaccagattccctttaaaaatgagttcccctccctttccccccaaaggactcatcctgaagcagaaggtgtggggggaaggagaaatgtaaaggcttttactttgcataaggatgggggactggggaaaaaggtgaagcgaagcccaaggacaccatgctaagggcaaaagtaagagacagtctcagaactgagagaattgtgtcttctgctttttgaagtagactgtcacactcaggcagcctgtcaatgctgaatgttaggacttctgtctccgctggagacacggcctggtgcaagtcagcgtttagtgtttgacagctttctcagcactccctgactccgtttacctttactccgcatcccattctcttactgcctatctgaaggattggatgggcagagtataggtggcggtggttggtcctccccgtatgttgtccatttaattc

SEQ ID NO: 1881323 - DNA, 4001 bp, Homo sapiens
tcacacttattcagtgattatatggtgtgattattcagataatatttctaggtcagcccatcaaaaatgcaggcttagcccctttgaatgtttttaacaagatataatgtgattatcacataaaagaccatggcctgtaaaaagactggattcaaacaaataaatgagaaacagcgtacataaaataaagccacttgtttgcctgtaagaactgtaacactggctttatacgatagcagtttttagacagagcatacttcttaaactttagagtatatcagaatcacctggagagcttgttaaaatacagatttcaaggcctaatcccagagagtctaatttttgtctactgctgctactgatccacaaaccatagttggggtggcactgacctagaatactatcacaggaatattaatgcagctagttcttcttattgtggttcatcttctgggattaatataggtgctaaaacagctatgtgtgctctagatggtagagaagccacacatgcttttccctgatttgccaatggttttgtatttcagttgggaaattaaaatattgaactttcaaagacttcaaatttctttcaaacattggcagaaggttaacaacacagatgcttttctggccttaggtcagatatatttacgccacacatgatgatctttggaaactttacccaaattactgttgaaaattgtttatttcagaactagggcaaccagatccaccctttgtctcttgagtgggagcagctttgttttgcaaaggcagtggctaaaaaggaccagacctttccatcagctgtttggtcattgtattttttagtggaattatagcattgtacaatatttttctttgcagcccaaacattgagcaaagccagacatccagagatgctaaaatgaaaaatctgtttcttcttgctttgccacttgccaggtgaactctgtcagacaccacatcctatacatctcaagtaaacaaaattatgcttaatgtgttggcaacatctgtcacaaacactcttcagcctatggcttaaatatattaagttggagtggatttgacagtgtatttaataagtcaaagttacggttgtggatactggctttgccatgctaaccataaggcttttcttttcttcttttgtatttatttatttatgtcatatacaatacaaaagagattctgtagttttaaataagcaaagtggctggcaaactccccctttgctgtaggtaaccaacactaaacctctctaagttgtctgtcccagacaaagtatcattaagaaaattcatttctcccaggagttcctattagttacttccagtttactccctgactgtacatttcttccattcccttaagattaaaaaatttgtattcttaataatttgtaggattgttttcactgaatgtttttattgaatgcaaacaagactctagattcttacatatccttccccaagaatccttattttattttttatttatgtgcaataactgatctgcttagaaagaactgttcatttatgtgcagtaactggtctccttacattattttccactctgtgcctagtgttgctatttacaattccaattaatgataaatcccttcttacttttccctttgattgtcaggtttctggtttatacacagaagcaacactcactctatgacatctgtaatcaaatgagtccccaaatactgctttcaatgaaaagattctgaaagagaccagacaattcttccaaaattaattccaagtgcaggcattcgatccttctcatcatgcatgaattttgattgttctgtcacatgctcacctacctcatctgcatattgcctttaaaaaaaacacacccctggggaatgagacaacctccagggtattgagaagaaagtatccttaccaaacgcagtttggtttttatctctgatttacatgaatgatcctttttgtggctagagcaagctgtttagaattgaggggtttctgggattgtgacagtttagctgcatgttggaatgtctaagggcaaatattctaaaaagataacctgtcttgagttcaagaagagaatcgaagtcttgcagctgctaagcattagaatgttgtcaaagtaccactttttggttgaaaaaaaaaaatgcttcaggacttccatcttaactctgaggttattctataatttatccctaggtgatttaagaagaacccttgttcttcttaaagtgtttacttctggtctggcacaacaaatacctgaaatgaaggccagtaagtattttttaaaaaaggaaaacaataaagatggttttgttaaaaagattcaggcagcagaaagaaaagtgatgtgtctctgaattataattaagtaaaagcttatcttatgtttctcatttaagaggcatcctgatgaatgacaatgcacagaagcatcgagaaattcaaacaacacaaatgcacaattgtgtatatttacaagctacagacctttaaaataacagacatgttttctgattgattcctactgaaaagcctaaatgtctttgtgaacaaagctggccctgtatatcaagcatttccaaatatttggctcaatttctattatctctgaaaattaatggggaggagcccacagagaaggcagagtgatagcctgatctttttcacagatatagtcaggaagttgaatttcgataataccaggaagaattgcttagtttgagcaaaagcattttaggaaacgcgcagtgggtaattagtttgggtgccgagatctggccatctacatgcatctgtccagtgagaaaaataatgtttagggaaataatttattcagatacataatcatttgatcataactgagtatttaaatgggttgttataaaatatgtttctacttttatcacaatctttaaataaacattgaaattatatactctcaaagattccatccaattcaagctttttaagtttgttttttaaaaatatttttccttctccaagttaattactgcaaggaaagtagcagggtagagaaagagaaatggaaggataaaatgacttagctccattcttcactcaccatatgacactttgcatatggatggaagttttttaaaatgtctgtaatttcttttatccccaacaatgataataaatcaaaagacatattctagacatccacttttcttaacatctgatttaaaagttgacacttttatttttaaaaaaaaattgtggatggacataaaaatttgaccagctctaacagagtttggtattctgtcttgtgtctaaaatatagatagatagaaaacaggtcaaaaggttaggaggaaaacaaatgggaaatagtaatttcgatttttagattatcaatgatagattttaatatgtccttcaaagagatccagttcagaaacccatgtgggccagcattatccctcttagtggtagattgtattggggtgactaagaattatgtatgtattaataagtaatagataaatgacataaaccaagtcttatcaaataacaagaaaattagagaatttccactaatgttcatatgtttcagtcagagaagtttatatttagaacagtgggcaagaggatatagatgattttcaatacattctacctcaaaaaatgaaaatgtaagtgacatattttagacacatcacaggtaaattacctcagaagaaaggaagatgttaatgccatctattcagacaagcacaaaatgacatgaatggacataaaaattatatacagttgaatttagcctttttagtaaaaaagtaaaaacatttgatgttcacacatttacaatttacagtgtttatttgtaagaagtctccttccttgtaggatatattttcaaatggacattgtatatgcttgtagggtgctgtgattacaccaaccatggaccatcccatgtcaatgcagccagccaacatgatgggcccactgaca

SEQ ID NO: 1881324 - DNA, 4001 bp, Homo sapiens
cagggactgaaatgtactgaaagagggatgtaagtcaggttgaaaaattattaattatgtctaacattttattcttcagacatttactgaacacccattttgtgctcaactctatgcaagtttttggaaatataaaggcaagtgagaacaatgtgacctcctgcccccctagagtttagaacatcatggaagaaacaaacaataagcaggcaaatacatgtagaataagccttctatgagggcaaatataaagtgcagcagagaaggaagggtttagagaaagctactgtgaggaggtgatatccatactgagacctgaaggacaggctgaagggtaaaagaggtggagatggacttgggagagcactccaggaagagggaatgacagaagcctctgagagcatgttcctgtcctgaaagtagctcagagtgactccggtataggatgtgaggggcagagttgaaagtccgagactagagtagaaagccagggccagacagctcgtcaagtgtcctgaaacctattccaaagagtcaggactttattgtttgagaaacgtgacaccactggaggatttttaaatcagtgtcatttttagtgtctgattcagtgtactgccttcagccaggagagttggcagtatttctattttatagatgggacaactgaggccccaaataatacatttaagagataggtggggttgatttaatattctcaatcaccatgttgtcagggcctcctaactcttaccctctcaccctccatccttccttccttctgattgttattcttgtcaaaagtaaaacataaaactatttacctgccatccttatttttatccaaggaacacgtatgcactcacacagcttccagaaaccagttcccctcggtggaagccagttgctttaggggtggtgcggcttgtatgtggatggacaccatgtgtgcactgagcccaaattctctgttcttcttgactaggaagctggatttgtaccagggaccttttatctaaataggagactctgggctcaggagaacagagccgacttgacaaagtagaaaagagctcagtattggtctgcccacgctttgggcatgcgtgagcactcgcagcaaaacacagctggcacatctaattttagcctcgcccgccttgaaaagggaccctttaaggaaatatattttatctgaaacaatttgtattataatgtagcagctgatagacatgacagaatattatcattggtgggaaaaaactctgccaagcaattatgatttttgttcttttttttttagatgatatcagtaaagtgattaaagcatcaatgcaacaaaataatcataaagagagagacaatgggagaaacagattttatctgtaaaatatctgacgaacctaaggggtcacttcctttgattttttttttttttttttttacaaaatggatgtattttaaaaaagttattatttttgatatgttcagttgatcagtccaatctgatgacatgtggcattaatagtagtcctggagtagaccctaaaatttcttcaatacttaacatccaccaagttttccaggtagtaaaaggttagtttctcaatcagctcttggatgcgtctggctctagcgtgttaacagattttgaaagcatccgggacttacttttttcccctttaaccagcaaggttagttcccctgcctttatttcttttcctttctcctccttccttctttcgtcctctcttccctctcttctgtgttttgtttagcagtgtggcttaccttggaacttggcaaaaagaggaacaaaaagcagctcttgtgtggggtagatggaggagggataagaaataatccaccgcccgcatttgagttcttcaggttcagttccagcggcagcagcgttgctgcaaaaatcgcttgctattcgagatagccagcagagggaatcggaactttgcttgcagcaggggttgaagcagcctttttttttttttttcttggaggaaatactgcagccttctggactgcgtacgctgctccctggagaggctctctcggttccacccaccggctggaaggaggggaagtgaatgaaaggacaggacaagccccgaacaccatgtcactctgggagggagacagcagcaactaagctgtacaaggttttttttttttttttttcttcctttttttctttttttttttctttttcccctttctttttctttctttctttctttttctttctttctttctctttctctctctcttttttctttttctttaaggtggggaaagagacaaccaagagacaggaagctgatctgcaaggattcggagttgtgctaaaaggactttgatttttttccccctttacgaacgctggcaattgacatcactacagacagcctggttagagaacaaactgcctcatcccaagtggaccccggcagctgggggaagccaggcaagatctgggaaggctgtgtgtgggtgttttttctacagatctcactcctcgccctttttttttttcctttggtgtgtgttttttgttttgttttgttttttaaaaaaattcttgctgtgttggaactagcgagtggtggagtctctgaagcctcatcagtcaccgggactgtcaggaatagtggtttaagaggaagctcggcctggggcactataccctgtcatccagttccctgcctcggagataaagattccagctacatgggcaaacgcctggatcagccacaaatgtacccccagtacacttactactatcctcattatctccaaaccaaggtatggcttgacccacggtctggcgatcagcgtggtatcgttctgcacttgggatgggaaacagacaggcgtgtgaattattagttaacccccacccccatcacttcttcctgcttctttgaaattagtgacataccaatggagttaatgaggcagaggaagacataagaagaaagcagcaaacccggaattgtagctttctctttaaggagagataatagtttcacttgagttcagtttctttgttgttatttggcagcataaatggtcctgatatcaggaacgtcttttgcagatgggcacggtttttagaaagcagatcacaacagtgattaccaggcacaagaatataatttcaggggcttttctggtgagctgttctttgattgtggctctaaaagggtttttcccactggataggacgtgcaacggtgggggtaactcaaacttttaatcgcagggtatagaatgaaagaagggtgtgagaaggtatagggctcctaccagagtctctgagagtttatttttatttttaatttgccttgcctattttattttatgttgaggatgatcagcatgctacagactgctttacaatagatgttctttacttttagaagatctatttttctgtgtagctgccatgaggaggcctgagtcttgaaaaggaatgaaatgtaactgatcataattggacttgaattggttaaatactttaggctttatgtgtgtgtgtcaaatgaccattaggggcccagaggcaagcccacgtaagtaagcagtgggcagtacctaccctgaactttatcctgcagttaagacatgaaagactctcaggtgtgaaatcactgctccgatttgtcaattaaattggacttgattagggggaaaacatgttagcggagtgaccacctcgagtgtacgggtgatattattttgtattgcattagcattagccagactccaccgtctccttaataaataaatatgccgagagtgaacaaggcgtgcctgaatgatctatgctgtcaccaggactcggtgatgtgattagggttaggtaattcatgctgtagttatctgtcatttattttgtctcgtccagcaacgcctatttgtaaaccagactgggaagcagactttcagtattatacaaaagattattgctttgtttttttcttttt

SEQ ID NO: 1881325 - DNA, 4001 bp, Homo sapiens; identical to SEQ ID NO: 316216

SEQ ID NO: 1881326 - DNA, 4001 bp, Homo sapiens; identical to SEQ ID NO: 316227

SEQ ID NO: 1881327 - DNA, 4001 bp, Homo sapiens
aatcgagtctggtcaactcttccatttacatatttattgaacctattcagtgtcctccattcctacaaccaaattttctggttcaggtcaccatcacctcccctgattactggaaaagcttaataacagctcttatggcttttatttgtgcccctcaagttcattctccacattgaaatcaaaggtatctttttgcaagtgtgaatcttattatgtcctccatgacattaaacccatgactggttcttcagcaaagccttcaggataaaatcttcttctttcatggtttataaaacttttcttgatctggcctagaactctggttggcaagttaattcatttcaactctctagctaatcaagctctattacttctcaggtcttcccacatactcttacttccacctggaatactgtcctcaccagtaactcctactcacccttttgttcacaacttggaactcacatcttttgagaagtcttttctgatttacagcattggttaggtactccgcctaaatgctttcaaagatccctatgctcattaagcttccataaccatgccttagagtattgtttcataaagtaaaagcttgtggttcatgtggtgaatctatcccttcatccatctcttctatcttctcacaggtaaagaacaaaaagaagaaagagcaagagaagtccatttgctgaagacaaaggaaaggttttcccgtaggtgtcctctggaggtgacaagacaggtctgaacagctctgtgatcatgggccaatgagaaaacggtgtggacaaatccttctgttgccttttttccccccaaatatgttagaattttataaatagatcatctcgaatttctcaaagaatttgtgagctgggaattactattactgctttgttctccttagaagtgaagttcaatttatttgtgtttctaatttaccaaaggccttttaattattcatacccattttaaaatatgtaagtagatatttggggaaattagaagtacagttctcttctttctgcatgactacttcataagccttatggaaagtcacagaaagtaagaagataagtcattttgaaaagtcaaagtaatattctttataagaaaagatctgattaattttaagtgaacaatcacaaactaaccattgtaatttctgcagcaaaccaaaccaggcctaggtttacaagtaaaactttccaggtttcttatgtgtgccattatttggttgtgagtgctcaagactgaggcagatggtcccatgatatcttcttttgaaattcgaaaggcatgggaatagaccattggaaagaaagctatggggaccccatggatatatttaaagtctaaattgaaatcacatggtatttagcccatctcatttcatcccctattcatttaaaatgtcaccatgattctaataatttttaaaatacctagtgattttatttcttagggtataattatataaatggtatatgaaaacattatacaaaggtaaacacatcaaagaggtttgtcatcttcatgaaacaagcaggtacactcattttgttttactaatcttcccatcgatagggagaaaacaaagttccacctgtggaaattagtgtgttaaataaagtcttatgaaaatatcactctgagacactgcatatgtgattgaccctttcgacttctttgtactgttaaatagtgcattgcttttagcaaagcatttactaataatgtccttctttgtatgttcttcactaaattatgaattgcaaatccttgggctcaagaaaggattttgagaaatcatgtagaccaagttttaggcaaaatatatctcaaatcaggatgattatgaatgtaacctattttttttaatgattttcaattaaaaaatatggaacgcttcacgaatttgcgtgtcatccttgcgcaggggccatgctaatcttctctgtatcgttccaattttagtatatgtgctgccgaagcgagcacaaatgtaacctatttttaaatattagcacagaggtacattccatcaaaggaaactgagataggattgacagatttaacaaatacaaatgcaggacaccagttaagtttgaatcgcaggaaaaaaaaaaaacactttttttttagtataaatatgtcccgtgcaatatttgaggcatatttatccttgagaagtgttaactgtttatctgaaattcaaatttaaatggatgtcctgtattccatctggtaaccctaggactaaaaccttgccaaagataatttctgtcagatgactcaatttctctgttatagattgcctgagatcattcatccaagagagagtgatcataagttgacaacttcaggttaattaagaactaattgttggtcaagttgtcaaaagtcaatatttctgtcttcaatgtaacagtcaattcaatcaatataaatttttttaaaagattttaaacaaatatgatttttgtcattatttttccctaataacctagaaacatgatggtgatcatttcattttccatatgagattacctttaatggataatatataactttttgttaatttaaaaatatacaacttgaactttatgaaagctgaccttaaaggtaaggcagtgtatttttagtaacatataatttgcttgtatatttttaatataccaaatgtatcatcctgacacccaaattcatttatctccaatatttctcctctcactgaataataacataccctacctggccaggtaagaattatgaattattctcaattcttttaatgtaatccagatattttatttaaaacaaaacaatatgggcctggtacaggtctgggctctatgtgcaggctgcctgaatccaaacctggcactgttagccggggactgcaggagccacaccagcctcatcaatggtgtgggaattgggtgaggcctttggctactggctattccccacttccctggtgaacaatactgctaagcaggggcagcataatcccctcttgaacataaccccattggctggagaaccacccaccgccaatcccccaaggagagtctgagctcagacccacctagccctgcccccagctggtggtctttctctacccactctggtggctgaacacaaaagacataaagtcttgggagctttatggtcccgcccattgcttaagaagcagaatacttcccctggtcaacttagggcaagctcaaatcccactgctactaccatagctggtgctgtcttgcaagcgccacctcctggctggaggccaaccaactcaggacattacggcaactcatgacagaataaccttgctcctgggaaggagaaaacaacagttaattccactgcctgcaacgtcctggctaaccagaggtcctgagtctgtccacgtgacaacttcactgctagcataaccagcactcaggaaagccagcacactaaactatctatacccaaggaatctcatcactcccctgacacctcaaccagagtaggtgctggtatccacagctgggagatctgaagaacgatcacatcactggactctttcagacattccccagcagcagcctggagcctggtagccccactggatggctagacctataagagcaacaacaatcactgcagtctagctctcagggagccccatccctaggggaagtgggagagcaccacatcaagggatcaccctgtgggacaaaagaatctgaacagcaggccttgagaaccagatctttccactggagggtagtttctcacagcagagatacaatcgcagtgctgggcatagtaggggaagtctgcacctctaccccaacaggcaggctgccgctgtgatcatgaaaggccttggaaaaggggtccttgttccccctggcactccactgtagacacagctggggctgcccccacaggaatgcagcatggaggcacctataggtagcctttctggaaaaattcagggtgaatgc

SEQ ID NO: 1881328 - DNA, 4001 bp, Homo sapiens; identical to SEQ ID NO: 1881327

SEQ ID NO: 1881329 - DNA, 4001 bp, Homo sapiens
gaaagtcattggtagcttgatggggatggcattgatctataaattaccttgggcagtatggccattttcacgatattgattcttcctatccatgagcatggaatgttcttccatttgtttgcgtcctcttttatttcattgagcagtggtttgtagttctctttgaagaggtccttcacatcccttgtaagttggattcctaggtattttattctctttgaagcaattgtgaatgggagttcactcatgatttggctctctgtctgttattggtgtataagaatgcttgtgatttttgtacattgattttgtatcctgagactttgctgaagttgcttatcagcttaagaagattttgggctgagatgatggggttttctaaatatacaatcatgtcatctgcaaacagggaaaatttgacttcctcttttcctaattgaataccctttatttctttctcttgcctgactgccctggccagaacttccaacactatattgaataggagtggtgagagagggcatccctgtcttgtgccagttttcaaaggcaatgcttccagtttttgcccattcagtatgatattggctgtgggtttgtcatacatagctcttattattttgggatacgtcccatcaatacctaatttattgagagtttttagcatgaagggttgttgaattttgtcaaaggccttttctgcatttattgagataatcatgtagtgtttgtctttggttctgtttatatgctggattacgtttattgatttgcatatgttgaaccagcctggcatcccagggatgaagcccacttgatcacagtggataagctttttgacgtgctgctggattcggtttgccagtattttactgaggatttttgcatcgattttcatcagggatattggtctaaaattctcttttttttgttgtgtctctgccaggctttggtatcaggatgatgctggcctcataaaatgagttagggaggattccctctttttctattgattggaatactttcagaaagaatggtaccagctcctccttgtacctctggtagaattcggctatgaatccgtctggtcctggactttttttggttggtaggctattaattattgcctcaatttcagagcctgttattggtctattcagggattcaacttcttcctggtttagtcttgggagggtgtatgtgtccaggaatttatccatttcttctagattttctagtttatttgcatagaggtgtttgtagtattctctgatggtagtttgtatttctgtgggatcggtggtgatatcccctttatcattttttattgcatctatttgattcttctctcttttcttctttattagtcttgctagcagtctatcaattttgttgatcttttcaaaaaaccagctcctggattcactgattttttgaagggttttttgtctctatctccttcagttctgctctgatcttagttatttcttgacttctgcagcttttcaatgtgtttgctcttgcttctctagttcttttaattgtgatgttagggtgtcaattttagaactttcctgctttctcttgtgggcatttagtgctataaatttccctctacacactgctttgaatgtgtcccagagattctggtatgttgtgtctttgctctcattggtttcaaagaaaatctttatttctgccttcatttcattatgtacccagtagtcattcaggagcaggttgttcagtttccatgtagttgagtggttttgagtgagtttcttaatcctgagttcttgtttgattgaactgtggtctgagagacagtttgttataatttcttttctgttacatttgctgatgagtgctttactttcaactatgtggtcaattaaaaatatggaacgcttcatgaatttgcgtgtcatccttgcacaggggccatgctaatcttctctgtgtcgttccaatgttagtatatgtgctgccgaagtgagcaccacaaatgtggttttcataaaaagcccaagccatgtgcttttcctactgggaaacattctccagtataagactatatttttgatactaaatgcatcctcattttaaagcgtaggtatacttatttcattatttcaaagtacagcataataaaaaatttgtggaaaagataatgagtgttgaagatgttaatgaaacacttgaatggaaaagaaataaaaaaaaatactgattaaacacctttctccctgaaaatgctctaatcatcacatgatttagaaataaaaaaataaataaatcatcttttctaaatagaagttagatgccctatattgctaggacaacaaatttatggcatcaatattagccataggttgtactataaaggattttatacacataagtgacaaagcttctggttacttattcattacgtataaagtgcttagaatgagctctggattcaataagctgcagctgtttttattatcattctcatcctccctattttccacagcatattaatggtatctgctcctttactccttgtcataaagccacactcatcagtgatttcaactacgttcctaacagtaacttcaattctccagctcagatcgtgtccttaacgccaggtgtgtggtcgaattgcctcaggagtctggatgtccacagggtcctttcaacaccatcccaaactgacctcaggctctgtctgacttctgccctctcaacagcggcactcctcagtcctccccctcacaccctgtgctttaataacagtgagttatactttatttattatgtgttcagagcagcagtgggtaagagcacgatctctcaagtctggtccaaaactcccctctgcccatgtactaggcaataactaggcaggttatttatgcccataaactaggcaagttatttgcccataactaggcaagttatttatgttgtgtctcattttctccttctgtaaaacggggcttattatagtgcctgcttcgtagattgttttgaggattaaattaattaattcaggtatttagaataatttgcgtagaggtgcatgttgtcaagactgggcatgtggtggtaactgcagaagcttttgcagatacacaaaagcttgttacactatgcattccatctgtgtagagatgtgaaactttcctaaatttttaaatcactaaaataaaattgaaaatagaaaatacaggtatttggaataattatgtagaatagtgactaagattagcattcaattttctataaaaattagcttctgctgctgcgggcctcatcactactatcactgttgttgctaagttccttaaatgcatcatactctctcctctttggaatttcctaaagtcctttcctttccctattgttctcatactaatttgctgtgtctctgcttagacagcctgttcatgaagctgggatccactagcttcctcccatggcatatattctatggctggtgttacagctgggagttttttttgcattgcatccgttcctaatctgtaagctttggggttcatcactggaatccccagcacatggctcaatacttgacatagggtaacagccaaatattcaaatacttgttgcatggctgaacaaatgaagtcattttcattctccaccaaacctgtccttcctgctgtgttatctcaactcatgacacctctactggtctaactgcacaagccagaaacctcagattcctcctgtatcacttcttccttactagacaactagtcatacatcctgtcaatgctactgggaaacatctccactccatctcttctccctttcctagaatcagtgtgttatgtgcctgcctggcctcagtggtttcctaactcatcttgctaagtctctcagcctctctcctcttcaatctacccttcaaaactgccaccatctttgtacaatcatctgacaatatcacctctttgcttgacactcaagtgactttccatctatagaat

SEQ ID NO: 1881330 - DNA, 4001 bp, Homo sapiens
gccatattttaatgagatttgtgacacttgagggagacctgctattataagaatggtgagatagggcccacagtcccctgtctgaaatccctggagccaactgtgttttggaattaagagtttttgtgattcttgagtagtaaatactgtcttttaccaggtgttctataatgccctcagaagtgtcggaggcagcctcagtactcacagactgatgtgtcctcagcaaaatatatgtctagttcagggtttctcaacctcaacactattgacatcttggagccaaataatttgttgttgcagggacctatcccctgggggcaaaattactccaattaagaatcactgggccagacacagtggctcgtgcctgtaatcccagctacttgggaggctgaggcaggagaatcacttgaatacgggaggtggaggttacagtgagccaagatcgtggcaccgcactccagcctggggaacagggtgagactctctcaaaaaaaaaaaaaaaaagtgtacgtatatatatgtgtatataaaacatccttgtacctaccacccagcctagaattttatcagtacctctgaagtccccatctgctataccccatcctaaccttctcttcgtccccaatatccaccattctgcatttttattgtaattttataacatatctagtcaccctcaaatatgtatggtttaggcatgcctgtttgggaaccttttatgaatggaattatgctgtctgcattttttccacatacttttcactcagctttatgcttttgagacttgttgatgtatgtggtgtagtttgttcactttcactgctgtgtattgctacactgtaaatatactgcagtttatttggccagtctcctatctgtagacatttgggttgttttcatgaatagtgttgctatggataatgttgaatgtacatcttactgggtgtagggcaaagcttctcaaacttcaggtgatctgttagtttagttcttgaattgctaattagaatcacctgggaagcttaataaatctgtgttcaaactccatttcattccagttgaatcagcaatcagcatctttaggggcttaccctggcattgtttttggttttgtttttaattttttttttcttttttttttttttaattatactttaagttttagggtacatgtgcacattgtgcaggttagttacatatgtatacatgtgccatgctggtgcgctgcacccactaactcgtcatctagcattaggtatatctcccaatgctatccctcccccctccccccaccccaccacagtccccagagtgtgatattccccttcctgtgtccatgtgatctcattgttcaattcccacctatgagtgagaatatgcagtgtttggttttttgttcttgcgatagtttactgagaatgatgatttccaatttcatccatgtccctacaaaggacatgaactcatcattttttatggctgcatagtattccatggtgtatatgtgccacattttcttaatccagtctatcattgttggacatttaggttggttccaagtctttgctattgtgaataatgccgcaataaacatacgtgtgcatgtgtctttatagcagcatgatttatagtcatttgggtatatacccagtaatgggatggctgggtcaaatggtattgctagttctagatccctgaggaatcgccacactgacttccacaatggttgaactagtttacagtcccaccaacaatgtaaaagtgttcctatttctccacatcctctccagcacctgttgtttcctgactttttaatgattgccattctaactggtgtgagatggtatctcattgtggttttgatttgcatttctctgatggccagtgaaaaatatggaacgcttcacgaatttgcgtgtcatccttgcgcaggggccatgctaatcttctctgtatcgttcgtattttagtatatgtgctgctgaagcgagcactgtttttaattttttaaataccccagatgataatgatgtgcagctcatattaaaaaccaatgcattggtgggttatgaactctgtatagtggacgacactaaatgcgctagaataatataatcagagtgttgtgcacacagtgaaaacgttgtcttatgaaacagtttgttttagttatgtgtatactgagtcaggatataaaatgtatttcttggtgtgggtcctgaccaaagatttaaaggtcattcagagatgtatatttaggattagaattgctgggttacaggctgttcccgtgtgtgacttgactaggtttgtcagattgttttctaaaagtttttagtgtacattctcacccacagaagatgagcgttcccattgctgagcaccctcagcaactctgggaggggtgaaatactagctcattgtgttttaaattggcctttccctgattactcaaaaaactgagcatcttttcgggttaattgaccattcttgtgtgctttctgtgaaatatctgttcaagagaaagaaatatctgttcactatctatattagtctgttttcacactgctgataaagacatacctgagactgggtaatttatacaagaaaaagggtttattggacttacagtttcacatggctggggaggcctcacaattatggcggaaggcaaggaggagcaagtcgcgtcctacgtggatgacagcaggcaacgagagagagcttgtgcagggaaactcccccttttaaaaccaggagatcttgtgaagacctgcccatgattcagttacctcctactgggtctctcccacaacacatgagaattcaagatgagatttgggtggggacacagccaaaccatatcaaggtctttaatccatttttctacttggtggttagctttttcgttttctattaataaacattccttgtagtctatacactaatcctttgccagttatatgatgttaaagatagtattccaggatgtgatttgccttctcaccctttcagtagtatattttaatgaatagaagttattaatttgatatggtggatttgatcaatttctcttttttttttttttgagatggagtctcattctgtcacccaggctggagtctagtggctcaatctcagctctctgcaacctccgccccccgggttcaatcaattctcctgcctcagcctcccgagtagctgggattacaggcgcctgccaccgcgcccggctaatttttgtatttttagtagagacagggtttcatcatgttggccaggctggtcttgaacttctgaccttgtgatccacctgcctcagcctcccaaagtgctgagattacaggcgtgagccaccgtgcctgtcttcaatttctcttttttgtggttcgagctttttgttttttaagaaatttttgtcttacttgaggtcataaagacattttcctgtattttttctatagcttgccttttacactttaaatctttgagctagctggattttatttttgtatatttgtgaaaagattcactttcacttttttctttaaacttggatagtatcccagacccatttattgagtcttctatttccccactgacctagaccaccattatttgtcaggtttccatgtgagagtctgtttctgtgttctctgctttattccattaggttatttgtctgtacctgagctaatagtagcaccctgtcttgattactatatcttacaatctttttttttttttctttgaggcagggtctcactctgtgacccaggctggagtgcagtgatatgtcttggatcattgcaacctccacctcccagattcaagtgatcctcctgcctcagccttccaagtagttgggactacaggtgcacaacaccatgcccaactaatttttgtattttttgtagagacaggctctcatatgttgcccaggctggtctcaaactcctgagctcaaacgatctgccagccttggcctcccaaag

SEQ ID NO: 1881331 - DNA, 4001 bp, Homo sapiens; identical to SEQ ID NO: 1881327

SEQ ID NO: 1881332 - DNA, 4001 bp, Homo sapiens; identical to SEQ ID NO: 1881327

SEQ ID NO: 1881333 - DNA, 4001 bp, Homo sapiens; identical to SEQ ID NO: 1881327

SEQ ID NO: 1881334 - DNA, 4001 bp, Homo sapiens
gcaaatcccaccctgccagtgtctgaacccccagatggtccttccggtagtactggccttgaccatctacttgaactggagtctcagtttcctcacctgtaaaatggagacgacattgtgtgctgaatgcctgcagtacctgtcacagggtaaatgttcaataaagaaaaccttctaattccctaggtagcagctgcgctaccacacccccaacacacacaaaaccatcatatccctctaaggatgcctcaaacctggagatcttccattatcaactcacaacttcctcagtgtggtcttctgagccattcatttatttcctacagcagcaccccttctgttctctttgcagccatcagttggcacagagtgggtactcaatgaaccacgtattcaaaacaactttgccttctggcccatgatatccttgaaggcaagggggaagtttcatctttatattcccagagctcctgacgatcaaaatctctgttaacaactgagtgagctgacctgcaccccatctttttttttttttttttttttttttttttgcagtcccaccacagcagccctagggtcacaggctagaaggaaaggaacgtggggtcatggcaatgaatgaatgcacgtgggccaacatcagtaagcacggtataaaccgaaaaataaattctaagccccccacccaactgaatggactcctgctcttggccaagggcattccaaagttaacctgaaaaactagttcaagccataatgggaatgtggggtcgaacttgcctcattatgcccttctccctatggaattcaggcacagctgaccagcgttagcattaaaagagatcccaagactgacaaaacagactttgtagcaataagacaccaaatttcaacctgactctagtatagcatcacatgacagattgcaggccctgaaagaaacagaagtactttacccaaaaatatatttctttgacatattctgacatggccctgtaaagctgtctcttgtggggacaatctacgtcctgtagtgaatccccctccctttccaggtcttctccctgagccaggagaggctccactaagactttggcaccttttcaggcctggtaagaaacatttacgatctactctctttgaagcccgctacctggaggcttcctctgcataaataagaaccttggtctccacaacctcttatctgaacccaggcattcctttttgttgattccaagtctttagacaaactcaaccaattgtcaaatctaccaacagcccggaccaggccccccaacacacctccctaaaatgtacaaaaccaagctgcaccccaaccaccttgggcacatgttctcaggacttcctgagggctttgtcacgggccgtggtcactcatactggactcagaataagtcttttcaaatactttacacagtttgactcttttcgtcaatagacgcaaagcccaaccaccaccccggctgcctgcttcactctgttcgtgtacgcgctccagcaagccgacaatacccacagacacagagtggtagggaaggcctccttaccaggggaccatagggccagatgaagcctgcaggaacgcagatggccacggattaagactcactcaggccgggcgcggtggctcacgcctgtaatcccagaactttggaaggccgaggcggacggatcacttgaggtcaggcgttccagaccagcctggccaacatagtgaaacccactctctactaaaaattcaaaaattagccaggcgtggtggtgggcgccggtagtcccagctacttggcaggctgaggcaggagaatcgcttgaaccccggaagcggaggctgcagtaagctgagatcgcaccactgcactccagcctgggaagcaaagtgagactctgtctcaaaaacaaacaaacaaacaaactcaccgagcaggaaaaagaagcaccaaggaagagagaagggatgagagagcgccggggctgatgggaggtaacctctgggtcctgacagggaaaaggcaagcacttccggctccgggtccttaaaaaaaagacatgtcaaagaaagagtgctgcagaaatgccgaatttaactgttttaatagagagtaatatctaagaatgtaaaggaaaatttatcttacctgcccttggcactagttagaaagttggaattctttctgagttgagacctggtgtagggaggaatctacttccgccagaagttgaagccaatctagcgtttgggctatttccgcccttgtttcctctactccgaagtgcgcttcctagcggtcaggagagatcaagaccgacttcccaaaattccctcactgaatttacatagtaaatagtgatgagaccggaaccgctaacgtacgatgggcctaccacaattctataatgtaacctattattgtctctattttgcatatgtggaaggagaattttggagattttactccaagctccacgcttctaaccattagtctaaactaccttgctttgttttgttggttgttttgtagagttatggttttactattttggccaggctggtcttaagcgatctctcgcctcagcctcctgagtagcggggattacaaatatgagccattgttcccagctactgtctaatttttaagcttgttcttgatttgcttagcttttttttttttttttttttttttttttttgagagggagtctcactctgttgcacaggctggagtgcagtggagtggcaagatctcggctcactgcaacttctgcctcccaggttcaagggacaagggattctcctgcctcaggctccgtagtagctgggattacaggtgtgcgccaccacactcgactaattttttttaattttcagtagagacaagggtctcactatgttggtcaacctggtctcaaactcctgacctcaggtgatctgcccaccttggcctcccaaaatgctgggattacaggcgtgagccaccgcgcccagcccttagcttttgtttttaagattattttgaaaatcaaatttcaggaggaaaaaaacctcctagattccactcctggaacacagtacagatgtcactggcgatcttgacagggatagttccagggaccagatggggtcagaagctaaactggattgtattgatgactgaatgagagagaggtgagaagggtgtgttaacaactccatggtgagatttttgggtgtgaggagaatggggagtttgaggagacccagagaagtggaatgtctgaggtcacacagctggcaagccgtagtgctggggctagaaccctgctgcatctgtggctattccacacctcatgaatcttgcttatcctgcaggctgtatgtagtgagatgggatgcggagcagggaagcacattactaatggcagcctgaatgatgcctgtcatgaaagaaaaggtcttgattgggtcaagtgggttcatcaactgggagggttcatgaaccacagagcctgccttcagtttccaaagacccaagagatttggaagcagtaacctgatggctcagtctttgtggggtacgggacatgctgccacctcacttcacagaggagagtacggggtacccacactgcttccctgtgggcactggggtcccaggacaagaggctggaggtggcctgcagtcatccctggaatagcccagggaacgtacctgtattcccccaggctcaaggtttccccactgggatcccgggacaagaggctggaggtggcctgcagtcatccctggaatagcccagggaatgtacctgtatttccccaggctcaaggtctccccccggtcacagctcctgagcaagaaatcacatcagctgggtcacaggtgaaatgagaaaaactccaacctgctttatgtagaaagggcagaggtcaggggagggaaatagtcaaaaactgcacgtcattccttggacacatctaccctctgagacactggacacttt

SEQ ID NO: 1881335 - DNA, 4001 bp, Homo sapiens; identical to SEQ ID NO: 316248

SEQ ID NO: 1881336 - DNA, 4001 bp, Homo sapiens
cctgctaggccctgcccctccctatcgcagacagctggcacttggaaggacccttaggatccccctgtgtttggaaaaagccctgtagcccagaggggccagcactggctcagggccacacagcccaagagcagagggggtagcacggggcaactgccagaaacaacgcactgcttctcactggggccctagcatcccatcctgggtgaggctcagctagggctgaggcagccagagggggcgaaatgaccacccccttgtcccagccagtgctggtgtttgtcaggtcagacctgctctcatttggtgtctgggaaagaggtccctcgggaggtagaacagtgttcacccccttcatccgtggtcatccattcattctccacacagaagttcctctttcttgcttcctccagtatgcagccactccccttccatttgttctggggagagcaggccataagaggatagggggtgagggaggcctgggcaggggggctggggagcttagggtgcagggcgggccacgcagcagggccccggaactgtgaaggggtgggccggccacgggggctgcctgtcgtcccctgctgccctgccgcccctcccgtcacttggcggcaggcacggtgattaatggccaggccgtgcgggctgggcggccatcagcgcgcgtctcggcgacggatgcggctgtcaggccggcccggcccgcgctgacccccgggcaggggcccggcgcgatcaatgggcggcgcgcagcgggcggcggctgggccgccgcgataagatgggccgatgggcgcctgccgattgcccgctccgtcacccgccgtcaccgtcaccgtcacgccgccagcacgcagatcagcgccgtcagcgccgcgtgattaatggggacgccggcagctgcggggagggcgcgggcatgcggaccccgcacccagagggacatggtggggtgcggggtgcgggctgggacgccgcacacggcacgctgcacttacactggagccgcatgcagggaacgggggacacggcgggatgcgggctgcaggtctggggcacacggcgcaggttttcacggggctgcgcgcgcgcgtgtgtatgtagtgggtggaggtcccggtgccaccgtgacacaagggcctgagtgacttaggcctgaggggtggggggaggagggaccacacctactgtgacctccccaccgcgatccctgcctggcctaggcctcagccaccaggtccaccagcctcttcggtctttgcaagcctgcccactgtcccaaccatctttgagaacccagactagacggtcaggaccccgacccaaaacccttccacaggtcccatggctaaatcccaggttccccaccctcccggcaggcccgcaggaatgccggccccgcctctccatgccggccgcccccctgtgctcctttagctgtcatcgcaagtggtcccgtcccccagagcttcgtccctgggtcgggtcatgctgttggggacgccctgagcgctctcagcgcaccgttggccctgctcgctccccaccgggtgaggagggcaagagccggcttcccacccccctcctccgcgccagagcgcacaaatccccactcgaagcgacctgcctctgaggcactgcccctccagaatagcgctggtccgccgggacccactcggaactcgggaatcgggagggagaggctcgcccaacccaaatacccacatgccgccagggaggagccgtgtgccaggtgtgcagagagggggccggagggcttcccaatgccagtgacaggagcgcagcagggacagccgggcgcgagtgtgggactgacccgaagtccgaactgccaaggagagcgagacgaggggaaggggggggccccggctgggtggactggggcctatcccgtgggcagtggggatctcagggccaagcggcagcggaggcaggaccagccactctcacttttcccctcgaaaaccacagcgttccagggccgcgaggcaccccgcgggagcttgcgaggacacagcgcccccgtgtgggcggacgcgcacagagtcgcgcccgtggcgtttcgggcccaggctccgcccccgccgcgctgcccctccccccatgggggcgtggccaggcctagcccagggatccgagattccaagtcacacccagcacgacttgggaagtcgcgacgaaagtgcgcgacttcccagcaagcgaggttgaagtcccggcaggcagggaggaaggcgtgtgtccccccgtgcatgcggggaaggagcagtgggggaaggctgagttgggctttcaattaaaaaaaatgtgcatacacttagttttttgatgcaaaattgccaaaggcgtgtaccgtgaaaacctacctcgacacctgccccctgcctcctgttccctttccggaagcgcctgccttacaccggtgtgttcctctagagatggccaggacctgggtgaggcagcacacactcacaggaccttcccaacactcattatgaaacatatcacatggaaaactgcaagaattacaggcaatcgcctctcagcctttggctaagatcaagtgtagtgttcttatcactttaatatctgctatctgaggacagtatgttaaatggatttttggagcagggagatggaataggaccttgctctttccactccatgcatccacctggtattgcagtacctccaggaatagtgcaccccctttgggggaataaaaaaaaaggattgcaggtgagcccccatatccctgtcatctaggcactgcactgcccatccccctgtctgcctgccagtcagtcttgtcagtcttctgtgcatttcaaagtgagttgcagatacaacaacctctgtaaatagttaagcatgtgtataattatctagagttcagtacttgattatggttttttaagtttttttttttttttttttttttgagacggagtttcgctcctgttgcccaggctggaatgcaatggcgccatctcagcttactgcaaccaccgcctcccgggttcaagtgattctcctgcctcagcctcccaagtagctgggattataagcgcatgccaccacacccagctaattttgtgtttttagtagagatggggtttctccatgttggtcaggctggtcttgaactcctgacctcaggtgatccacctgctttggcctcccacagtgccagaattacaggcatgagccactgtgcccggctgcttatggttatttttaaacgttaaaaatacagtgaaatgtacaaatcctaagtggagcactccatgagttctgactaatgaaacccaaatcccagtgaaggatattactattgcccagaaagttccttgtgccaatctctaacacactagaggcaaccactgttagaattttttttttttttgcaatagattaggttttcctgctctagaatttcatgtaaatggcatcatacaacatgacttgtttctttcacttagcttttgagctcctgaatgttgtgtgtatggatagtttattttttattgctgggtaaaatgccaccctgtggatccaccacatgtatccatttgcctgttgatggccacctaggctgttccctatttttcagctattatgaacattcttgtacaagtctttgtataggcatatattttcatcttgggtttcaatacccaggagtagaatagctgggtgtagggtaagtgtatgtctagttttatgggaaattgctacaccttttcctgatgtagtctattagtcacttcctaccccccttttaaacacaaatggtagcatacgctattgtttcttgctttctgtattcttccttgacagcatatcttggagattcttctaactcaacatataaagaatgtcctcctagttcctttccacagggaggagctgctgtaatttattcagccccctccgatgggcatttagatgtttctagccttattgagctgtgc

SEQ ID NO: 1881337 - DNA, 4001 bp, Homo sapiens
ttctcagacacagatattgttactggttaggaaatgcagcattttggtaaattaaggcaggaggatttaatgtctcctgggacctgtggggacagaaagtgatccaagaaggaaaacgttttactatgttttgctcattataatcatttatacctttttgctttgctttacaaaactaggagttgtggtgggcacttgtatctttaaaaaggagggttggttccctaaaagaaccctaattcataattttaaaaaattcctatatgtttggaattgtggtctcggcataaaatgatgatcaactgaaaaaagatgaataacttccagtgaattcaataaccatggatgaggggaaaaaagcagcatgaatacatgctgtattctcctttatttagaaaaagcacacaaaaatacagcagagttgatgtgtttgtcaccagggcttgaaagtcgaatcaaccactgtgtaaaagataaaataagactgcacggatatcaggattttcccagcgtgctttattcatagccatctgacacaacaggacctaacagagcttttaggaaaaactgaattctcagcccacaatcactttccaggaacttccctgcaaacagtgctgtgcgctggcaggatggaaatcttagcaatctccctcctgcttccatagtttcctcctctctaaataaaattatttatggggacttaatgagagagcaagccttgtgtgaaaggaattcaagaaagtgcggcttctaaaaatacacctaggcagctctacagtccttattgttacaacctgacgttttgcagttcatgccatgaacctaactacacttcttgccaaatacacacaagcgtacaaagaagaggaaaagtaaaaactatgttactatgttttatctttctgcaatccctttgagtaaacagtagtaattttctgttgacatactcaatgcaaatttcccaaaggctacacaatacaaaacaaaagacctgttagcttcctcagagctggggggaggagaggcagggggagagaaataaagttgatggagctccagtttctcctaagcctgcagtcctgagcctccagtcaccctagtctttttgtagagattttttgagtttcagtctccacttgggaaggttccttggccccttctctcccaatgtcaataaaaccctcatctctcccgctttgcccccagctttttggggaaattggaccttgcctaggcgtcttgttccagtgggttgaaaagtacagctggtgatgtgaggataaatatttaaactaatgggctgggtcacagcgtgggggtcttcaagagagggcctcctcctccttccgccacgtgctcctcacttggggtgcagggctcctggacaaggggctaagacggacgagggtgggatgaagggagatggacagaccagactgtaagtgaaggaggccctctaggaaacatcgtctcgaccgaacattgacggagaaaaaaaaaatggcccaaatgcccctagtggggaagcatacaccccacgcaggctgggttggggtgggggtgcttcgcggcctctcacctgacttcctcctccgcctgcacacacactacagtaaccccctctactcaccccccaaaacccagccaaacaacaagcaacaagaggaagccgcaggcgacaagaggaggagtgcgcgtgttgggggcccccggagaggtgagggggcagggttggcgggcgacgagaaccgcgccgcgcaccccaagcgcacccccaagcgcccacacttacccctcgaggctgagggtcctgtcttccgcgccaacccccgtgtgcgccccctggcccgccctcgcccctccggcccgccgccccccacaccccggccggcgcgctgggagggagcccgggagcggtgcgcagcagcggcggcggcggcggcggctcgggctcggctcggctcgggcttcagtgcgcctagtgtcgccagcggccgccgaggctcccaccgccagggggagaagccgggcgggcgctggggaggcgggccgggccctggccgccccgctggccagcccgcgccgcacaagctccgaagcggcggctacgcggggtccgccgagcccccgggcgcagcgtgcccggtccgaagcgccacgtctggatgcgcgtcccgggtggctgcgggctcccgcgggggacgccccggccgctccggtgcgcctccagactgcaggcgccgcgaccgacgagacgagagcagctcccgccggccccttccccctcccgcccccgccgccgccccctcccccttctcccccccccgcccgttaacatctcctccctccccctccttctcttccttcccttggccccgcgcgctcgctcgctcgctcctcgcctcgctctcccctttaaacgcccacttcgtatggggaaagaggacaacttgaagtcaagttgcaattaacttccgcggcagccgcagctccggcggcggcggcggcggcaggagaggcagaagccgccgcctcggaagtccgacgccggcgcgcccgcccggggagccgttcttggtttcaggcccgcactcgacagccaccgccgcccccaacgtccatgcctgagtgagttctgctcttttgcctcccttttccccttgctactcttgctgttttatctctgtccctctttttccggaatcaatccaaacttctccgtagcacccactcctcgtcccctattggggcggctgggctcccctctcgtgggcgcagggcttcaacggtcttccgagccccttttctcacgcagacggaccttggaggggtgggctggtagagtaggggagagcggtcgggatgggggatttgaagatgccattcgttttctgtctgggtgtggacacaccaccacacctgcccaatagaccctggctgaacaaactccttcaggtcaccggtatggccccttttagaaaaggaaaggggagtggaaaagaccgaaggaagcaaatggggaaaaggggagcctctcggtgcgttctggagccgggcgggcagtaaggtgcctggaggagtgggctgcgggagtggtaatgttcccccaccggatcgcgagtctgctcagcatcctttcccggtccatctccgcctccctccgctccctgcctgcgcggctgattgtaagcatcggcgaagaggggcctgggaagtttgtggcaacttctgcatcccgggagctactcgggcgccggggcgctcaagttggagcccggagtttgaaagccgcggcactcctcatttcgagccctcgctggctgtagcgaggccggtcctggagaggctgctggcgtgaatgtgggtttggagttgggcaagaggcagaagaaagggccgtcctcttagcaggggccgggacatcacaggtgcagcctcgcagtccacaccgtgtttccctcctgctgtccagacccgagcgcggtggccttttcctattgctccagtgctaaggctcccgggccggcagaaccggggtttgggaaaccacgacgagaaggacgaagcaggcaggtggcaggtccggggagtgccacgtgcttactggggaaacgcagtttcctcttgggatgacctcagaagaccaacaggggaaaggggcatagggatctccttgaaagttttggccttggcctccactgaggtgttgcaaatttcactaacaaatgtcaaccacagggtcctctctcaaagtgtcctggttggcaactttgacctctgcgcccttccttggcgaactttctcagtggcattccggacttacaagcaaatgttctaagacttggactccacatggttataaaagagacagggaaaacagaaggatgccctattccccagagagaaccttactgctctgactgactgggtttccatgtttgcatccttggaggccaggggacctgactttctcaagggggtggcgggtagggtaagaa

SEQ ID NO: 1881338 - DNA, 4001 bp, Homo sapiens
ttctactttgtggttttttttttttttttttttttttgagacagggtcttgctctgtcactcaggctggaatgcaatggcatgaccatggctcaccacagcctcaacctcccggattcaaatgatcctcccaccgtagcttcccaagtagctagaaccacaggcgcatgctaccacaccaaactaatttcttttttaaaaaaagtttttgtagagatggagtccccctatgttgcccaggctggtcttgaactcctgggctcaagtgatcctcctgctttggcctcccagactgctgggattataggtgtgagccactgcacccagcctcatgctgtaattgcgataaactgtttctcccaaatgctaatatgagcatgagagatgatatggcatacaatagcatacttatttgctatttgattttggacaatttatttgtctataccagggtttcttcatctatcaagtgggaataatccctaatcttataggcttaatgtcattcaatgaggtaatgtatgtaaagtgcttagaatactatgtaagcatttattatcaacagtaacgatatgaaagtttagtatggcctaggataatggcaattttggtaaaagaatgatacacagaaagggctaggatttgccccccaccccccaaaaagtttcttgtatataaaaatggctaggttcaaaagtcgtaatgttaatattactttactatatttatgccactgtatggcttctaattaagcagaaagtataaattcacataatgtctcagatttaaatccccttccccttacatcagataaatgatacatataacatgattttcttaccttatccaaaaggtgtattatcattggtacaagattggcatcaattactgcctgtacctgctgctgatttcctgcagtgatgttggagaggaaccacactgcttcctgtagaacaagagcatttgaatatttctcattaaaaaataaaatctgcatctgaactaagtaaaaaagcattcactacactgtcccaatgattttactacgaaatgagctccataataaaaatctcaggaatctcaattcctttacacccctttccatattttctttggacaaacagctaatggacctaattcaaatcacaatgaactaacccttcggaagaattattgaaaacaatgctcccaaacagtgtggctcaaaagaagcttggctgaacaaatttgaatgagcaaatatgaaataatgaatgagcaaatatgaataatgagtataatacaaatacaaatcctaaaacagctgtaaataagattcagtgcccttccctcacataatgtgctttattctctattctattctgatgaagaatcttagccaaagtagataaatatcaattatccacaacaatggagacataaaaaacaaagtgcattgttttagtatacttatttgtaatagtcattcactgcataatttctctcaaggaaaagtggaaccagatatttgattgttttattggcctatcttaatctttttatgttaccctttacatcacagttggtgctacttttgacaaaataatggtggccttacgcgttataatcatagataactaataagttttactctaaaaaatattagtattagctaatgtatactaggctcttttggatcagatcacaggaccattttaatgaacctgttagagattttagggtgccaggctagttaggtgagctgttcttgggttataatcattggcaatgttgtaatcaacaacccatgttatttctacaacagcctcagatgcactccaatatcagcatcaccagtcagtgccccctttccatagccaccacaagcacacacacatgcatacacactctctattaagtacctataaaacactaaacttataagaattacataatatacatattaaaaatttccagtcatacaacattcaacacccaattatctctatttcatcatttccaagagagccaaaattgcacttttcataactggttttatgtatgaaaaaattattaatgcttgttatggagagtaaaatttttattttctcttgatgtctaaatgacagtttgtattaagaatcaatattacagacatttctaagactctaattttacaaatagaaactgttaacattttaagtgctatctattaagtagtatttaatagtacttactttattaattttctctttgggatgtgtcaggagtgctgggaagtgtgaaagagcatcacagttcaaaactacttgtgtttgctcatcagttccagtaacaatgttgcccacagctctaagtgcagcagtctgaaatgcacaatgagatgacattctatgtgaaatccttttttttttttttgagacaaggtcttgctctgtcgcccagggtagagtgcagtggtgcgatctcagctcactgtaacctctgcctctcaggctcaagtgatcctcccaccccagcctccagagtatctgggactatagcagtgcacgaccctgtccggctaatttttgtattttttgtagagacagagtttcaccatgttgcccaggctggtctcgaactcctaggctcaagggatctgcctgcctcagcctccaaaagtgctgggattataggcatgagccattgtgcccagctgaaacactccttattaaaaggcatgttaggtaccttataaaagacaaatgcattcattcactatttcttccaacaaacctattcttttttgagacggagtctcactctgtcgcccaggctgaagtgcagtggctcgatcctggctcactgcaacctctacctcccaggttcaagcgattctcctggctcagcctcctgagcagctgggattacaggcgcgtgccaccatacctggctaattctgtaattttttttttaggagagatggggttttgccacgttggccaggctggtctcgaacccctgactttaggtgatctgcctgccttggcttcccaaagtactgggattacaggcatgagccactgcaccctgctccaagaaacctattctttttgagcacttagcatcaggcactgatgtaggaacagagatgtgaagatagacacatgttccagctcttacagagcttatattattgtaagagaggagtcaataaacaagaaggataattttagatagtgccataaaaaaaaaaaagacagaactttagatttagtgttgaaaatataaaaataaaaacagctaggtgcagtggctcacgcctgtaattccagcactttggaaggctgaggtgggtggaacacttaagccctggagtttgacaccaggctgggcaacatgacaaaaccctgtctctacaaaatattagctgggtgtggtggcacgagcctgtagtcccagctacttgggagactgaggtgggaggattgcttgagcctgggaggtccaggctgaagtgagctgtgatcataccactgcactccagcctggacaacagagtaagaccctgtcaaaaacaaaaagacaaaaaacatagtgcctttctgaaggaaagaagatacctgcctaacatgagatttcactatggtatgaatttgaattatcaattatttttctgtggttgcatgaggtcatttcctgttaagtaaagctttttactcctctaattttcctttctacatgacaaatgatccaaattttttaaaaaattgaaataaaattcatataacataaaatttaccctttcaaagtgtacaattcagtagttcttagtatattcagagttgtgtaactattactagtatctaattccagaacactttgatcaccccaaaaagaacacctgtatccattagtgatcactcccacactgccttcatccctaggtccctggaagacactatgcctgtctctaagattttggctatcttgggcacttcatattaacaaaatcaaaatgtatttggccttttttgtcta

SEQ ID NO: 1881339 - DNA, 4001 bp, Homo sapiens
accctctgcatctaaatctcatctggggcagatatttgaatctggaaagcccaacttcaagtcaatgtcagtctttagataaaactcaaaactacttttgacacaaaactagtcttttgtgccaattattaattttttaggagaaactatcaaacatttcctctaagaaaaaaaatggggaacatataactaaaaggaatacttagaccttgcttaacaatacagaatttcagatgactgaatcaggaggtggagggggaaaagtaacaagtgcagagacattcatatccgaaatctagcaaagtaaggggtcctcatcgaataaaatgcacctataaatcatgagcaagaaacgaatctgcatgtacaacctacacaatcacaaaagcagccaacgaagaacccaaaaacgcacgactttctgtaggaaaagctaccttcatcaagataaaaagacttttacaaaacccaagactaaattttggttccattttgctatcttgccatctggtctgaggtgcctggggccttagtctgcagaaggaacactgggcaccatctgggttggggacaaaggcactggctctatctagcttctctccaaccacaagctaccagtgcccctaaaaagtcccactgaccatgggcttcacctcctgcttgtggacgccctcccagcagctcctaagagcccaagatgcggcgggggtctctgcttggtcagcaccaaccacagcaacacgctagaacggtttacacgctttccgatgttgacaggatggctgtatgactaatcctcacatttaattcaaagagattttcaataactatttcaaaaaggagaaaattgcacaatcacaggcataattcaaatcactattgctgaatgccttggttcctattgagatttttactctgcaatttaaaattactttgtaattaagaggtgggtggctaagttcatttaaaagaaccaaacaactaaacctatccaatttcgcttgattaaataaaatcctagaaggccgattctgaagatgcaatcgtagagggcacactcagacactcagagagcaagggctcagggaagtataaccctgaccatcatcctggactaagccgagcccggccctcgaggtactcagcgcacaggcaagcacaggtcctggagtcctcgctcggtcagtgccctgagctctccgtctgatttttaaaaactggcacagctgcttttaaacaccggcacatttttgtggcacaagggccaccaaacgggacccaaagtacaggtccttaacttccaagatcccgaagtggacatgcacagatttgcgctctctggaaaggggaactgcaagcccaagctcgggcgcgccgcgcttcccaccggacacccacccggccgagcccggccactcctcgcacccacccgggcggtttcacccgccccgccggccccacccacgggctgcgggcggccccgcaggacaaccctcacagacggcggcagaggcccggcccagccaggactccaccccggtgaccctgggcagacacgactcctccccgagtccacccgccaggcagaggcgaggggctacctcagcccgcgaggtcgccggaccccaggcccggaccaaagcggcggaggggacgcccagcaagcccgcggggtcgcgaccttcaccgggacgcggcctacctgctaaggaccgagctccccaggcccccgagtacactccgcggctccccctcgcaccggcccagggctctcccagccccttcccgatccccgggcagggggcgcggggacccggcgcccgctccgctcggacccgctggggaccgtcccgctcctaccgccgcctcgccccccgcctgccctgccccggtccgcggcagggactcaccgccttggccagcgccagcgccaggcgccgagcgcttggcaaccgcgacaggccccggacccccgacacgtctgtagtcgccgccgcgcagtcccgccagtccctgcgcagactgcgcctgcgcaccacggccgggtcaaggcggggcgctagtgggggacattgcgcctgcgcaccacgcgacgcccgggccggggtctaatgggcggggacgccgcgcctgcgcaaagcggacccgcggaccgtggcgctgggtggccacggaggtcccgcgctccccgaccgagatagggcgggccctatttcggggagatgttgggcaccaactttttttaaagccccgtgggtggttctccgggatctcccagaccgagagggcctgaacgtccagacctcagggaatggggtcgaaggggcggcgctcgtccgcggaggtgggcgggagcggcccggggcctccggcctctagggagcgggagtgaccctcggtttctggcctccgaggggcgggagcgatcctcagccatgtccctagcctctggcttccggctgatttttaaatttttggtagaggcgggaatcttgctctgttgcccaggctggtctcgaacttgtggcctcaagcgatcctccctcctcggtctcccgaagtgcggggattacagacagagccactgcgcacggccgtggtcagctttgaaagctgggtagatccctttggctcatacgcctttctgctagcttaccctgattctgcttctggttcagatagtattttaatatttctagtgtgtctttttgtaagatacctgaaatctttttgtggaatgaagtggcatgaaaaataaaccaataatcattagtaattatgtttcctgccttttcactttattaaaatcttcgtcttgtgcatcatgtttaacaattttgagttattttagtaaatttgcaagggttcggtcccattttattgatatttgggttgtttcctatttttgctcttaataacaccgtacagaacatatttgtgaccataactttctctttaggattattttttttagatgtatgccccagacgtggcctttattggcttgcagggaatgaacatcatacctcctagacttatttttttaaagttatgctgttttagtcctgggttagttacctaattttgtttggtttgagacggagtttcgctcttgttgcccaggctggagtggaatggcgggatctcggctcaccgcaacgtctgcctccagggttcaagagattctcccgcggagcttacagtgagcggagatggcgccacttcactccagcctgggcaacagagcaagactatattgctttaatttactctgccggctatctggagagatgcaacctcatcagcagaaattatttccacctgctgctttttaaatgttatttcctatagccaggtactgagcccttcaattgaggtctaaaccctccaccctctccctccgggattgccaagcctgtggtttcagttccatgctcccaggtagattatgtcaactcaaagtcaatgcgcttatgaaatactttttgtggtttttttcttaattttaagaggttttttttttaaatatgtttttgtttcatggaggcgacaccctctgtctctgagttgtgggagccttcctccttcagtctgcatgtactgaagccactgtttgccgtacagcccctcagccgcagcagcccacagtgaggtgcaggtgctcacgccatcgccccagagagctcctccattcgcccctccacccgtagcccctcgaaaccactgccctgctccccgacacggtacactgtcttctccaagatgtcatgtgttggcatccttcggcctgtggccaccgaaactagcttccttcaccgggcatgtagcctgggagacctggggcatttgggtgcatctttccactgctggttggtgtcccctatgtggaagcatccgcgttggttcacgccttctcctgctcctgccgatggacattttgttttcttccagttattggcaatgaggaatgaggcctaaacacttgtgtgcaggtttgtgtg

SEQ ID NO: 1881340 - DNA, 4001 bp, Homo sapiens
aatctggaaagcccaacttcaagccaatgtcagtctttagataaaactcaaaactacttttgacacaaaactagtcttttgtgccaattattaattttttaggagaaactatcaaacatttcctctaagaaaaaacatggggaacatataactaaaaggaatacttagaccttgcttaacaatacagaatttcagatgactgaatcaggaggtggagggggaaaagtaacaagtgcagagacattcatatccgaaatctagcaaagtaaggggtcctcatcgaataaaatgcacctataaatcatgagcaagaaacgaatctgcatgtacagcctacacaatcacaaaagcagccaacgaagaacccaaaaacgcacgactttctgtaggaaaagctaccttcatcaagataaaaagacttttacaaaacccaagactaaattttggttccattttgctatcttgccatctggtctgaggtgcctggggccttagtctgcagaaggaacactgggcaccatctgggttggggacaaaggcactggctctatctagcttctctccaaccacaagctaccattgcccctaaaaagtcccactgaccatgggcttcacctcctgcttgtggacgccctcccagcagctcctaagagcccaagatgcggcgggggtctctgctcagtcagcaccaaccacagcaacacgctagaacggtttacacgctttccgatgttgacaggatggctgtatgactaatcctcacatttaattcaaagagattttcaataactatttcaaaaaggagaaaattgcacaatcacaggcataattcaaatcaatattgctgaatgccttggttcctctattgagatttttactctgcaatttaaaattactttgtaattaagaggtgggtggctaagttcatttaaaagaaccaaacaactaaacctatccaatttcgcttgattaaatgaaatcctagaaggccgattctgaagatgcaatcgtagagggcacattcagacactcagagagcaagggctcagggaagtataaccctgaccatcatcctggactaagccgagcccggccctcgaggtactcagcgcacaggcaagcacaggtcctggagtcctcgctcggtcagtgccctgagctctccgtctgatttttaaaaactggcacagctgcttttaaacaccggcacatttttgtggcacaagggccaccaaacgggacccaaagtacaggtccttaacttccaagatcccgaagtggacatgcacagatttgcgctctctggaaaggggaactgcaagcccaagctcgggcgcgccgcgcttcccaccggacacccacccggccgagcccggccactcctcgcacccacccaggcggtttcacccgccccgccggccccacccacgggctgcgggcggccccgcaggacaaccctcacagagggcggcagaggcccggcccagccaggactccaccccggtgaccttgggcagacacgactcctccccgagtccacccgccaggcagaggcgaggggctacctcagcccgcgaggtcgccggaccccaggcccggaccaaagcggcggaggggacgcccagcaagcccgcggggtcgcgaccttcaccgggacgcggcctacctgctaaggaccgagctccccaggcccccgagtacactccgcggctccccctcgcaccggcccagggctctcccagccccttcccgatccccgggcagggggcgcgggcacccggcgcccgctccgctcggacccgctggggaccgtcccgctcctaccgccgcctcgccccccgcctgccctgccccggtccgcggcagggactcaccgccttggccagcgccagcgccaagcgccgagcgcttggcaaccgcgacaggccccggacccccgacacgtctgtagtcgccgccgcgcagtcccgccagtccctgcgcagactgcgcctgcgcaccacggccgggtcaaggcggggcgctagtgggggacatcgcgcctgcgcaccacgacacgcccgggcaggggtctaatgggcggggacgccgcgcctgcgcaaagcggacccgcggacggtggcgctgggtggccacggaggtcccgcgctccccgaccgagatagggcgggccctatttcggggagatgttgggcaccaacattttttaaagccccgtgggtggttctccgggatctcccagaccgagagggcctgaacgtccagacctcagggaatggggtcgaaggggcggcgctcgtccgcggaggtgggcgggagcggcccggggcctccggcctctagagagcgggagtgaccctcggtttctggcctccgaggggcgggagcgatcctcagccatgtccctagtgtctggcttccggctgatttttaaatttttggtagaggcgggatcttgctctgttgcccaggctggtctcgaacttgtggcctcaagcgatcctacctcctcggcctccccaagtgcggagattacagacagagccactgcgcacggccgtggtcagctttgaaagctgggtagatccctttggctcatacgcctttctgctagcttaccctgattctgcttctggttcagatagtattttaatatttctagtgtgtctttttctaagatatctgaaatctttttgtggaatgaagtggcatgaaaaataaaccaataatcattagtaagtatgtttcctgtcttttcactttattaaaatcttcgtcttgtgcatcatgtttaacaattttattttagtaaatttgcaagggttcagtcccattttactgatatttgggttgtttcccatttttgctcttaataacaccatacagaacatatttgtgaccataactttctctttaggattatttttttagatgtatgccccagacgtgacctttattggcttgcagggaatgaacatcatacctcctagacttatttttttaaagttacgctgttttagtcctgggttagttacctaattttgtttggtttgagacggagtttcgctcttgttgcccaggctggagtggaatggcgggatctcggctcaccgcaacctctgcctccagggttcaagagattctcccgcggagcttacagtgagcggagatggcgccacttcactccagcctgggcaacagagcaagactatattgctttaatttactctgccggctatctggagagatgcaacctcatcagcagaaattatttccaccctgctgctttttaaatgttatttcctatagccaggtactgagcccttcaattgaggtctaaaccctccaccctctccctccgggattgccaagcctgtggtttcagttccatgctcccaggtagattgtgtcaactcaaagtcaatgcgcttatgaaatactttttgtggtttttttcttaattttaagaggtttttttttaaaatatgtttttgtttcatggaggcgacaccctctgtctctgagttgtgggagccttcctccttcagtctgcatgtactgaagccagtgtttgccgtaccagcccctcagccgcagcagcccacagtgaggtgcaggtgctcacgccatcgccccagagagctcctccattcgcccctccacccgtagcccctcgaaaccactgccctgctccccgacacggtacactgtcttctccaagatgtcatgtgttggcatcctttggcctgtgcccaccgaaactagcttccttcaacgggcatgtagcctgggagacctggggcatttgggtgcatctttccactgctggttggtgccccctgtgtggaagcatccgcgttagttcacgccttctcctgctcctgccgacggacattttgttttcttccagttattggcaatgaggaatgaggcctaaacacttgtgtgcaggtttgtgtgtgcacgtttaagttttcccttgggggacatttcagcagtgg

SEQ ID NO: 1881341 - DNA, 4001 bp, Homo sapiens; identical to SEQ ID NO: 316285

SEQ ID NO: 1881342 - DNA, 4001 bp, Homo sapiens
gagggttgccacaaccttcctcagatgggtgtcccaccccaaccacaccacccggagtccaggcaggggcaaaggggcaggcccagctggtggccaggggtggggaggcaggtgctgagatttggcacaacaatccaggtttttccagaaggaaaagccaaggccgtggtaggccatgccactgacaggcagccccagagcaaggacccaggcaggtctctgcccatggaagctccctcaaaagagagaggtccagggtaggagtacaggcaggaaaagggaccccagctgccttgcctggtttgccccattctgttgagactcaggctcaggctgcctgattccagaatcctcgaggagttccagcccccagtgtgacccacaggcagtgaccttgctcctggagtgctgacctccatgggggcccctacccatggcctggcacactggacctggggctgaggaacagaaaggggaccatgtggaatcagggacaacttgacctcccatccctggagacctccattcctactcaagggagggtacacatctagaggacagaggacagggcacagcactcaatggggacagagacagtctagtccttttggctgggggttgactcccaggctattggaaagataatggcggtggcgggggggtttctgataccgtttcccagagtgaacacaggtggaggaaggtgcggggtgatgaaacagagacagggcccctgggcctggaaaaacataaggcagtgagggcctatgggggcacagtgggagtggatgggagcctctgaggcacttgctgatcctggctgcttgggtggaaagctgtaaacagccaaagaatgttgtctgcttgcatggagccaggagagcctgcccaggtcctctaaggctagaggcagctactcctggagtaggaaaaggccacatccaggaagcccacgagcccaggcagggatctgtccttccacttgccctcctgaagggccctgcggctcccactggcccctgttatttacctgccagctggccaggccaggccaggtataccaggtcctcaggctcaggaaggaggggcatagccccacttccacttccaggggacttggagatgtgccccccacctctgtccttgcttggctggaggcatccagggctgggcaacagaactgcaacacttgaaatgcccacactgccccatcagccttgggaggtggtaggaaaatgccttttgcggggatggaaggatcaaagcccattctcaagccctggtatattcactcaggtggacttcagggctccactctgccactgtcaacatacagtccctccagagaagtacccctcatgttacaaatggggcacgttcaccagactcagcttcaggacaagaccccaggtcattcccaactgaggctccgaggtgcaggagctccgtcctgtctgtaaaactccctcagttttcggctctgggtttggtgggggttgttcctcccacctccaacctagaaagagaagccagaggaagggaggtcacatggtctgccccccaacctctcagcagagatgcaaagctacctgtccaggatggcggactccagatgggccccgccctgtggtgcagaagtgagatttgctgctcctcctgcgtctgcccctctcctgccctcctctccctcccctatctggctgtcatggtagaagccactgctggccaggccactgaagtactaagtggcccaagtgttgaggaaggatggggactgggtcctgagggcccatccgacctccagttgagagcccctcccctgacctccagctgcccggccaccccagccggtccctgggaactgaggtggcagctgagctccccattatctttccccacagctccccacctgtggagggagaggttgagatattggagtccacgggtggtgcccccactcagtgattccctttgcctgctgagcccctggagctggggtttcttcctcccttgccttggctggccacctggcttctgggaccgccacctggggcacccttctgctttaaggcccaatatgggaggggtcgtccctaccagcccctcccttgtgcccattccactcccgcctggctgccgtctccagctggtcccggctgcctgcccggtcacccgatccgccctctaaactttacggcacggcgggcggtgcgtggggcggtggctggcctggtgggggcgggggctgcttcttaaaggagccgtcagagggtccccagcggccccagggtgggaaggggccagagtggagagatgctgctgcggaagtcctcggtggagtgtgagaaggcagccagtgttggcctggaagacctctagaacctgagaagaggcagcggcaagtgtcagcggagggaaggagggaggtgggggtcctggcctgggatggggccaggagctgggcaggagtgtgggtggaggggcctggaacctgcctcagcagctgctccacttgcttaatcccacctggaaccttgtcccactccctgggctcctgtgtccagcacctgcccagctgacccctgggaaggagggtgggcatagcagccaggtctttgccccagctgagggccagggggaggtgtctggctcctagagtgaaggggctcaaagatggggaagaactcaaggggtgagagaagtgaagggagaggctcagagaggctgtggaggcgttgagagggaaggccagctcagcgaggccaggaggctggggtgcaaatgaagggctgcctcaccttgcccctctttgattcctcaggggtgtggagagagagccctcaagctcaaatgcagaggctgcttcagctgggttgggagcagtccccaagtcagaggctgaggcttctgcccaggtcttgggtctcctgggtagcacttctccctctgaggaatggagtgattgatgctgcagttggatttgctcacttgcatgcccagagacatgtctattcttatgggtgcacacgtttgcacatgcacaaatgtgcaacacatctgtgtgcaaaatatgcacatatcacacatatgtactgcatggattgcacagtgccacatgtgtgtgcacaccaacccatatccacacatgtgcaatatgacacactatatatttgcacatagatgtgcacacacatgcacatacacactacacacatgcgcacatcacaaggggacactcggaaacacattcacaggcacccacacccttggctccagcctcaaaagtgtctctgtgtttttctgcgggactgtggggacactgccacctccagaggcctgaccccctcctgtcactctcactcttttgactggcttgttttgctcattgcacttggcaccctctgcatccatctgattccttgttggcactctgtcccctttcacatggggaccttgtctatgtctcccagtatccctcctcccaggtctaggctggcatgaagtgggtggcacattgtgaattaatgtctgtgagtgtgtatacaagagaggagattactgggaagggtgacgtggtgaggcgggcttgccagtgcagggtgaccctgagggtgtgcccagtggcgtgggtgtgtctgtgattgtggccaggcggggcaccctcggaggggagggttcggaagtggaatgcgaccccccagcctctttcccctaggggctgtaatctgatccctggggactccccccctagcctcccgccctcgccctcactgctgactcctcttccagatcctggggcagagtccagggcagctcaaggctcctccacacacacacccgctgaaccctgagcaccctgagctgctgagatggggcgggccggggctgccgccgtgatcccgggcctggccctgctctgggcagtggggctggggagtgccgcccccagccccccacgccttcggctctccttccaaggtaggtgcacctggcaggcggga

SEQ ID NO: 1881343 - DNA, 4001 bp, Homo sapiens
ctcccgccccgcgcgggtccccgatcccctctcccgtctgcatccctctctgtgcccgagcgccccccgctccctccctcctcgctggatctcccgcaggacgtgagcggaaagtgaatgggcagccccaaccacaaagacaaattaccatgagaaacataaatcgggaaatcgccgctcgcgtccctgcttccagctgccgcacccctctccaccctcccagccgggagtgcggggccctgagccactgcccctggagcctggtgggcagagttcacgctccgcaggcctggtcagggcaagagtgtcctggaggcgggtctgggaagaatccgggcggcggctccgcaggcggcggcggtggagcagggacgtccctgagcgggagatttcacactctgggcgggccacgcgttcccacgcgcctcgccgcccgcactctccctcagtgctgtttactagccggccctctctgagcctccatctccgcacctctgtccctccgtccctcagcctcactcgtccgtctccttctccaggcctgggtcccgggtccccatcgccgctgcagcccagatgcgccgaccacagccctggcagggcccagtgcaacccggacccaagctggctggcggcgggaacgcagcagcgatgagggctctcaagccgaggtggcagcgggaggcgcggaagccaggggaccccctgtcctcccgcccgcagcctcacctacctggcttcaacttgccagagcccggacccctacctctctaccccgatacccacccgagttgctgaagtttgcaagttgcagccccaacccgcgcaggggaagcgcccggggctcccgggactcacctcccagaggcgggtgcaggtgcccggttccccgcggctcccgactcccgggcggcgcggagcggcgggagctaaccagatgggctggcggccggtctgggaatggggcggccgcgcaggaacggcctccagctctcagcgctccggtgcagtccccacccgggcccgcgcccgctgcgctcgggctcccagcagccgctggatgcgctgccgacccgcccggctcggcggagctgggctctggcaccaacccccgcgctccaactagctcccgacccggcgctcggagagagcagggaggaggagaccgcgggagcagaaggagggagggggcggtgggggaggagttgcaagcaaagggagagaaggaggggagcgggagcgaaaaagaggagggggctggagcagacctgccgcggcgggcgctgcacccgccagcctcgaggcgcgcggaggagcgcgagggggcgccctgcatcccgcggctgctcggccgactcccgccccgggcctgccgagtgtggtgaccagcccggtgggccgaagccccttccccggccggcattccggcggcaagacctaggactccgagcacttgccgccgtttgccacatcccgccttgccgttctcggtcaccccatctcgaatgtgacatccccgagggccatcggcgcggcctgcccaccccaacactcagggcctgaggaagctcccccaaaccccactccggactcccacattccccagccccgtcagttcggaacgatcttcctgcctgtggatttgaaggggaagggacctcgtgtaaaacgggggagagccgttataacctgcagcggcagagagggaggctaggctgctgggctgggctggaaagccagaactggccggattagggttaaccttgcaaactgtacgataccgagcgaacctctccaagcctcagtttcctcagctgtaaactggggttagtaatacgcaccctacagaattgtgaagaacgagtaggggatacggggagtaaaataacatcaggaacagtgggagggcagccaagagatgagcgatccggggaggtggtggagcgttctcagctgaggacggaaggtttagcgcaatcacaaggagcgaggccgaattgtttacaagtttaagtgatctagtgtttctgatggctagaaggcgggagagaaagattcaaggggcaagcttcaaatcctagctgcccgggctgcaagagggatgggaagggagccctctgctgaacaaaaaatatatttgaaaatgtaaaaaaaggtgacctaagaacgagtgagaaagacaaaggatttgaaaaattaaaaccaggaaagtgtgattctaagagataaccaaagagaactatgaaataaaaatagataagttggaggaaggaaaatatcaaaagactttctagagtatgccaaaaattggataattagaacaaagtctgagtgaagcattttacataataaaattctgggtaaaggaaaacccagataaagcagaagaattgagacactaagagccccagagaagcacctcctgcctgccatcctcctacccctggaccatggcaagaagcagtttgacaggataatgggaaagaaagggtggttctgaatccaagaagggagtttatgagacactgtaaaaagagaaacagtgcaagatctcaaagatagactttctagggcaacagaaatgctgaaactcataatgtgcagaatggagagaaacttgcaaagggaaaacacgctctggacacaaaggcagagatgcagagaagaaaagaaaggaaacgggcatgtgtgggcataccagtctggtagcccagtctggggtaaaaatcaagttggaagaggcagcatgggatattgagtccaaatctatcattttatcaacaaggacaatgagctctggaccattctcccagagtcccaggctgagatagggataggtctcctgatctccaccgtggaacctttccactgcaatgagcgtgccccccccccaacccccattccctgcagagccatggggaatgtttttgtcatcacaaaaaatagaagtatgtgcaatatagagataccttttaattaacacaaaaaaccacgaagctattccatactgcaggaccagggaatgaacaggagagcttccaatttgtctggttgggagaatagacaaaatgccttctgagtggctctgtcagccacagctctcccttgaaagataaccaaaatattctccacccttcacacattctctcacctgccctcttgtttgctaccatgttttgattgtgttcattcttttcttcccactatcatgtcaaggcctttcctggctctccctctccatgttataaagtggagagggggtttgggggcttggcacaggaagggaagagaggagactccaggctggggacacaaagagggaaattttccttttcaggggaagcaggagccaggacaaggaggcacccaaagagacagaccaagtagcagggcagctagcaacattgggctaattaatcctaattgcatcctaaagcattgtattgattaacagtgattactcaagagctctcaatacaagagagcttcagaagcccaaccctccggaagagacagtttctttactggcctggcttaccacctgctctttggcaaacccagcctggttagaatctctgaatcatttacttggaacaaaacctggagcattgattccatcaccacagtatcacaaccagcttctgccaccttccttagacctttgcaataacctataagataattgcttctgttaggagcaattcttcttctaccgaaacattgtaattaagcagaatggaaatatagtaattaacacagtgttatctcaagcaaacaagctaaagagcggtgaatatagggggtgacggagtttttaggattcactcttgacctagaaattccaaacttatcttgaactaaggttgaaagagtttaagaaatagatccaaattctcatgctcaagagcaggaaagggtggaaaagctaggagcacaacactgtcttcttcctcccacctgagggcattttctgggagataaagctaaaaaatgagtgcagg

SEQ ID NO: 1881344 - DNA, 4001 bp, Homo sapiens; identical to SEQ ID NO: 316300

SEQ ID NO: 1881345 - DNA, 4001 bp, Homo sapiens
tttccttgccatatcttgaaattgccctggagggttgtctcttgtgggaaaaatccacattctatagagaatcccctttccccctctttttctttctttccacaacaaggagataatcaactaagaccgaggcacctttttaagttagataagaaacattttacaacctgctccctctgaagtcagctgggagtctcctccccacaattaaaacttgggtctctacatggccgggtgcggtggctcacgtctgtaatcccagcactttgggaggcccaggtgggtggatcacttgaggtcaggagtttgagaccagcctgggcaacatggtaaaaccctgtctctactaaaaatacaaaaatcagctgggcgtggttgtaggcgcctgtaattccagctactcgggaagctgaggtggaagaatcgcttgaacctgggaggcggaggttgcagtgagctgatcgcaccaccacactctagcctgggtgatggagtcaagctccgtctcaaaaaaaaaccctttatcttaacctaaacatttctattgatcccaggtcttcagacaaactcaaccaattgttaaccagaaaaattgttaaccagaaaaattaaaatctacctatagtctggaagccccccccaccactttgagttgccccgccttctgaaccaaacccatgtacatgttaaatgtatttgattgacgtctcctctctcccaaacatgtataaaaccaggctgtgccctaaccacctgggacacatgttctcagcatctcctgagggctgtgtcacaggccatggtcactcatatttggctcagaataaatctcttcaaatattttagagtttgattcttttccttgacatctttgaaagctgctattgaatctcttatcttatctgatcctcacaaaaacccctaggaaaaagaaagggcagatagggttcattgttgataatggatgttaaaggggctatgcatttttaaattattattttcattttgcagatgaagaaactcaggctctgggaagtagctaagatgtctaagctccgaaccatactctccaacttccacgtccagcgctctttccacttcaaaatctttggtcattccttattccttgggtaacgctcaggccaaggtcggagggataagaaagtcagtagaggctgggagcgtggctcatgcctgtaatcccagcattttgggaggccgaggcgggcggatcacctgaggttgggagttcgagaccagcctgaccaacatggagaaaccctgtctctactaaaaatacaaaaattagccgggcgtggtggcccatgcctgtaatcccagctactcgggaggctgaggcaggagaatcgcttgaacccgggaggtggaggttgcggtgggccgagatcgcgccagtgcactccagcctgggcgacagagcgagactcagtctcaaaaagaaaaaggagagtagaaagggctttgaggtagttaatagaagcaaacatttactgagttcttacagcaaaccggaaagtgtattttccttgccattttcaaagcactccggaagagaggtactgttccactgtacgctggaagactctaaggctgagccacagctaatttacactcgcccaagagcccacagcgtgagggagaccacagctaaggctgactcgaggggctgtttttatgcacgacaccggctgcgatccattaataggccccacggcttatcctacctgtgagagacacctgagaccagggaggtaaatgactccccccgtgatgcctccttgagttctgaggacaggactggacaaaaagccaggttctcacaaggcctccggttctgcgcttcagggaatggactgaaaaggacaacacccttgctaaggtgatgccgtgggtcaacagaaaaaggcccaggccggggcatgcacacctattcccgcgcaccaacgggtgcgctgtaagagaagacaaaaggtcgcgactgggaggccgtcccagcgaggcggcttgaggagaccacgtgggggagccgcgcgcccgcctcccgcgccgcctggccccgcccctacctggaagggcgccggcgcggcccccgggggccacgcgcccaccggcaagttttcctggccgcacgcgacatccagctgctcagtcggggcctcaggcttctccttaaactccgccatcccacaaggccgtgtcgtctttgccgcttccgcgaacatttacccgcctcacgcaacgcccactaccctgacagtcctgggccgcgcggtggatgctgggacttgtggtcccgtggccccaccgcctcatgggaattgtagttcgtttcttctcaggagtggcctggaaggcgcttcccttccttgactttttgggtctggctcccgttttgatttcagccagaggcaccacagataattacaaaaccatgtaaggtacggacgaaacaaagtgaggtgctttagtttttcctgggagcatcagagagggggctttcgaggtgaggtcatttgtccaggtttttgagggctcactgcacgtttgtggagtggaggcaggggtgcgttctaaaccgagcggggaaacgcacaccaaggtttctaaaggtctgcggcttgccgggaagttgactgacatgtgatagggtttgtgccaaggcgatagcctcacagggtgccttaaggaatttgtgtgggggcatgctcactccctgatggaggtatccgtgcccctttgcctgtccttttccctcctctccatccctctaccctcacccctccaaacccctgccctgccaaaggattctgatagcctcaagactgctgaatccggtggagcattttcaacctcactgaagctctctgacatgattgtcctgcttctccttgaaactgtaaaccaaaaataaaattccaatcctccaaaccatctgaagggacccctcctctctgccaaggttaacctgagaaagtggttcaggccatgatgggaaggggggtccaacatgcctcattatgcccttcttccttttggaattcaggaaaagccagccagcatcaacatcaacacacaccttaagtctgataagaaacatttacaatctgttctctgaaatttacctcttggaggcttcatctccacgatcaaatttggtatccacaacctcttattgcaacccagacattcgtttctattgattttaggtctttagataataaccagttgccaatcagaaaatctttaaatctacctatgacctggaagccacccctcacccgcttctcgttgtctgcctttccagatccaaccaatcttacatgtattgattgatgtattatgtctccctaaaatgtgtgagagtaagctgtatcccaaccaccttgggcacatgtcatcaggactgcctgaggctatgttgggggcgcattcttaagcttgggaaaataaactttctaaattgagacctgtctcagataattttgggttcacaaacccttctgaccttgcagcttctgaggtcccattggcctaaatgtgtttccatcttgcagacctttccttgttagtatcctcttgttgttttcctgcctgactgtttctgaaaagtgggtgtgattcagggttctgcccttgacctttttctttgctccccttccctgaactttctcattaataacatccactcccatggcttcaaatataaaggattaggtcaccagtctccaacccagatcagacgtttctcctcaaatccagttacgcatattcagctaatgattgagcatttctgttttctgtcctacaggctcctcaaactcaaaataatctgaattgacttcttctgccagtcttgctttttcttctttaaagttaactgggaaaataatttgtgatctacagagccactaaagcaacaaaccagttactctgtattccttcacttcactagactcatatagctaaggacgtggtgggta

SEQ ID NO: 1881346 - DNA, 4001 bp, Homo sapiens
aatatctcacatgaagaagtctagatgttaacagctagcatttaaaatcaaagttgaactccaaagccatccctttcttactacttttaaattgatatgtccatgttctcaagtgtcaatctcctccacttgaaccaagcattgaagaaaggatagtatttgaataagcaaaaccagacgtcgaaggaaggatagtatttgaataagcaaaaccagacatagccccacttttccttaaaatacaaattatatttcttacctgagaagctttctagttattcaaatcttatttatttttcaaagaacaacttagctcccactttctcatttgtcccactttggaatatgcggttctacttctctgaatctgtactcaatgatacatatagactattcattttctttaaaccaagagcacataaaagcctgttataattttttttttttttgacagtcttgctctgtcgcccaggcttggagagcagtggtgcgatctcagctcactacaagctctgcctcctgggttcacgccattctcctgcctcagtctcccgagtagttgggactacaggcacccaccaccacgcctggctaattttttgtattttttttagtagagacggggtttcactgtgttagccaggatggtctcgatctcctgacctcgtgatctgcccgcctcggcctcccaaagtgctgggattacaagcgtaagccaccgtgcctggcctataatgtttttaaagattataaagattgaatgtcccttatccaaaatgcttgggaccagaagtgttttggatttattttttaaattttggagtatttacattatatcagttcatcatccctaatttgaaaatctgaaatccaaaaccctccagttagcatttccttggagcatcatgactgcactaaaaaagttttggatttcagattttcagattagggatactgaacctgtacaagattctttcacatgtcagatataagccatcagttgatcactgacaagtaaatagatggtaatatttaagttcccaggtttttatttacagattttataatgtaggaaaactacagaatgaccttttggtcattcacttttttagtttgaattctaaagttcttgaaattcaaatttccacaaagtaaaactacttttctcatttattttttaaattctcagatcagatacctactattcctcaagacacactgggagttgattttgattcaggtgaagctaagtctactgataatgtcttacctagaactgtatctgttcgtagcagtttaaagaaacattgtaacagtatatgtcagtttgatagcttggatgattttgaaaccagtcatttggcagggaagtcttttgaattcgaaagagttggatttttagacccactagtaaacatgcacatacctgaaaatgtacaacacaatgcttgtcaatggagcaaggaccaagttaacttatcaccaaagctgattcagccaggaacgtttactaaaacaaaagaagacattttagaatctaaatctgaacaaactaaaagtaagcaaagagatacacaagaaagaaaaagagaagagaaaagaaaagctaacaggagaaaatcaaaacgtatgtcaaaatataaagagaataaaagcgaaaataaaaaaactgttccccaaaaaaaaatgcacaaatctgtcagttccaatgatgcttacaattttaatttggaagagggtgttcatcttactcctttccgacaaaaagtgagcaatgactctaatagagaagaaaacaacgagtctgaagtgagcctctgtgaatcaagtggttcaggagatgattccgatgacctctatttgcccacttgcaagtacattcagaatcccacgagcaattcagatagaccagtcaccaggcctctagctaaaagagcactgaaatacacagatgaaaaagagacggagggttctaagccaacaaaaactcctaccagtaagtgatctacttgtttacctgtatttttaatgttcgtgataaatgatcactcctgatgcttatatactatacttaccatctgtttctctggtggaggttggagacttaccatctgtctctctttggtggaagttatggtctgattaaacagtggggggctgggtgtggaaatcacagttgtattgctctgacctaattcagagattgcttgttatggagacagaatttttattttcagtaaattaggactcccaaggggacagagggacttttttgtagacttaggttgaattgaagtagcttttatacacttaactgaagtatccccttgaaagtgaaatcaaatttgaatccagtgacttgttattttaatggccttgttttatattaaatttgacaggaaccgtgatttaaaataatcttctagttagtgaagatttcctcaattgataggcttagtattcttttgtacgacatctctaaaaactggctcagaaaatattttattagatcaaaagtaggcatagttcaaatgttcgtaatacaacctacacctgtccacaaagattctcatttggcaattttagttaatacaagtaaaactaacatttatagtcaagttgtatcattttcaaaatattgtcacatcattttatttgatcctcagaacaattctgtgaagtataggtgttatgatgcttattttgtttgtaaggagattaaaaccttaaaaaccaaaccaactttctaaatcggccagttagtcagtggtagcaggcaagtatcttttttaaaaatatgctgtaagccgggcgggttggctcacgcctgtaatcccagcactttgggaggctgaggtgggcggatcacctgaggtcaggagtccaagaccagcctggccaacatggtgaaaccccatctctactaaaaatacaaaaaaatgagccaggcctggtggtatgtgccggtaatcccagctactcgggaggctgaggcaggagaaaaagaattgcttgtacccaggaaacagaggttgcagtgagccgagaccatgccattgcgctccagcctaggcaacaagagcgaaactcagtctcaaaaaaaaaaaaagcaaaaatgctataatgatgttagaataaatcaaacatgattgtcaaagtgttgataattattggacctgggtaactcagagtttattatactgttattgccatctttgtgtacatttaaaaatgtccagaaaaagttgggatttttttgttgttgttcactttttaattgagacagggtcttgctctatcacctcggctggagggcagtggcactgtcatggctcactgcagtctcaacctcccaggctcaagtgattcttccacctcagcctccccagtacttgggactacaggcatgcgccatcacacctggctaattttttttttttttttttttttttactttttgtgaagatgaggtctcactgtgttgccagggtggtctcaaattcctgggctaaagcagtcctcctgccttggccttacaaagtgctgggattacagatgtgtgagcctgtatccataaaaatacataaaatacataaaaaatacgtttttaaacgaaaaaaatatactctaaaatggtattactcagagtttaatccctagacgtcttttaagaaatgcagaatctcaggccataccccataccgtggagtcagaatctgcatcttttttttttttttttttttgaaacagagtttcactcttgttgcccaggctacagtgcagtggcacgatctcagctcatcccaacctccgcctcctgggttcaagcgattctcctgcctcagactcccgagtagctgggattacaggcatgtgccaccacgcccagctaattttgtatttttagtagagacaggctttctccatgttagttaggctggcctcaaactgccaacctcaggtgatccgcccacctcggcctccctaagtgctgggattac

SEQ ID NO: 1881347 - DNA, 4001 bp, Homo sapiens
ggccaggccttggagaaccggatgaagcagctctccctacagtgctcaaagggaagagatggaattattgctgacataaaaatggtgcagattggctgattcatcctgggccctggccgatgtgcatatcaacatttatacatggaactggagaacattgtgccaataatcatttaatatatgccaaatcttacacgtctactctaaactgctctaatgaagtttcagtgaccttgagggctaaagattgttcttctgggtaagagctcttgggctggtttttcagagcagagttcttgttgtgggtagactgtgactaggttcacagcctttgtggaacattccgtataacggcattgtggaagcaataactagttcctatgaaagaaccagagctgggaagatggctgggaagccaggccaaagtgggggcaacagcttgcttctctttctcttctcaccctcagtttgtatgggaaaatggagatgtcctctccactttatcccacgatatctaaatgaaaaagaaagaaaacccacacacaaagcaaaaactcaagtattaagagcacatatttttgacccagtggaggcttaaaaaaaaaaaaatccaagaacacaattcattttcaccacctctggtgttcagagggggcttttaaaaaagcgtgtatgctgggatacccattaaaaccattttctagaaggctaccatgagctgcactttttggggtgggaaaggtgaatgccagtggggatgcggggggatgagggtaggagggacttatagaaggggatttgtggctgtgggggagaaggttctacagcataagccttatcctgccagccaaggggatttattctaagagaagtgcatgtgaagaatggttgccactgttattagattgacaagatgttaatttctctgtaggttgtaactttaaaaataaatgaaattatttaagggttatgctgcactagtattccttagaggaaacagttctttaaagttaggaaagggagtaggcaggcatgtgttggcaaaggctgttaatagtagttaagtgttaagactgcttttctttaacgttttcatggtaatgcatatttagagcactgtatttttgtcttgttaagaaaatttagcatttctaaaagaaaaaagcaaccctctttcaaactgttaattctgtcacagcctgtatattttagtcatttgtaaatctcttcatacaatagtgacttcttttttgactgatacagtatcttaattacaaggttattttgtacttgtcttaatacactaagtgtaataaaaacggcttgagaaaagtttctcctttctgtgacttcaaataagaactcccagtattgcctaaatcttctaggcaaccctttttccataaggaagagcatggagtgctgtggtcaccagtaatcattttcaattaattaaggtcatgaacagtaataatttaagccttgtttaccaaggtttgaattctacttttgctgttgctaaagctgtgggcaatgaggagacacagtggcagataaagacgaggtggtgacgctggaggagtgggcctcggctgcacactgcagtctcgaagcttaagtgttgctgtcagtcagttctcatccccagagaattatttaattaattaactggggggggtacactggggcattagacttttaaaagctccccgagggaattcaaatgtgcattcagagttgagaatcagatggattctttcttttgtggaaatgttttataatattggactcttaatccgcatttcattattaaagcatgctgtggagaaaaagttcttggttggccaatcatgaggtttaagtttcagaaataaccctttgcagtatcaaacaagtgttttacctagtagttaataaatatttcatctaggaaagttcatagaagtcccttgtgctatttaagaacattaaacagccggctgggcccaagggctcatgcctgtaatcccagcactttgggaggccaaggctggtggatcacttgagcccaggagttcgagaccagcctgggcaacatagtgaaacccagtctttaccaaaaatacaaaaattggccagtcttgtaatttgggtctcaagcaagaacacttaacagcatacctgaatttgactagtgaccttcagggttcattcagttctcataaaatctccttacacccttttacctgtagtaaagacactgagacttgcttgacttaccattagcaaaaacttccctgcaattgaggcaattctttttcctcctagaagaaacaccatctggaaaatagcccaagctaggataaagtttttacagcagagtcaagttatacagtctaataactagaaatttctaggtacttctcgcagagaatgaaagtgggaaggagttttctaacactggggctttctttcccttgtctttacaaaagacaaagcctaggcagtcagtcagtagcactagagtattccttatgggcattaagaatttctcttgtttcctgcctcaatccccctttcccatcagcctaccacttgcttgtctcctacaccagaaaaggatgcagaccaccttttgaccagggctcccttctcacactatcacctagtcaaatttctagttttacgtagtctgcccctactgctgtcactgtggcctctttatctccaccacatctgacatttaattatactcttctgggaattctgttcactgggcttcttaatcctcccccaaccctcgttttcttgtatctcctgttagtctatgtatttttttctaaattagaaatactttctaaaaaacttcccccaaatcagttcttaaccatctttagttcacgtgactcttgactttttgggtgatctcacttactataccacgttgattccagatctggattttctgggcaatttaatgtgtcaaaacttacctttcactgaagctatgagcatctgtccatgtgctgaattagaaacttgagtcatcctctctaacaattcaactggtctgtctgttatttagaacctccaaaaggcctggattgtttttcctccctctacaatgggtctagatcttgtccctccctcgactagacggccgtgactgtgggtgccattagacacacacagcagctcaatcagggctcagggaagaaggcttgtgaaccctgggcaaaatcttttaatctcttaggcttatttcctcaattgtaagaagtacaaataatagtatctatactttattcagctattgggaagattaaaaagaaaaatatacacattgggtacatagtaaacactcaatggtcagtaacctgtcttttgaagctttaccttcaaggtccaagttaaagtatcaattcttcaaatacaattttttatattggtccagccaaaattaatctttcccttattcatacactggtggcatgtttttagagctctattatagaaatcagtgcctttaagttgttcatatataggtctcttctaataaatttgatggcagggattaggtttttagtttgcatcctgtacaagatctttaccacaacaggttcaaatcatgtgttcataatatagttcttatgttctggattttttctttttaaaaagtaacagaaaacttgttaaatttgtccacctaaaattaataggctaaaactgaaagcatgaagtatttaccaaagtgaaatctcattagtgtaataatctaccactactctgttaaagaacagatttttgttgaagtatatattttcatgcaaataatctgttctcatttacatgaaacacgacagatgaaatctttcaataaatctaacttaaactatgcaatatccgtaagtataaacattttatttcaatttaaggtagtagcaatacaaaataagttttgataattataaagtagagacaatgaaaaatcccaccctatttttagaattttaaaatattga

SEQ ID NO: 1881348 - DNA, 4001 bp, Homo sapiens; identical to SEQ ID NO: 316324

SEQ ID NO: 1881349 - DNA, 4001 bp, Homo sapiens
gcagcaaggtggccgacgggcagatctccaccgaggtcagcgaggcccctgtggccaatgacaagcccaaaaccttggtggtcaaggtgcagaagaaggcggcagacctccccgaccgggacacgtggaagggccgcttcgacttcctcatgtcctgtgtgggctatgccatcggcctgggcaacgtctggaggttcccctatctctgcgggaaaaatggtgggggtaggtgctggcccggggacctcctggctgggtctggaccctgcaaaaaggatcctgcttaggcatttttctggggcaactgtaggagaaaagcccccctaaagactccagagggagcaccaggccccatttcttgtttcttgtccctttatcaaaagattcctgaaggacaattgtcctctgttaatgataccaagaaattcatctattcacctgcaaaaaatgggatgtatttcacatatggctttccttgggcctgtggttggctgtgggtcctgcttttgaggcaggtataaagaaatactggatggggacccagacccacgacactccctctaccagggcgggtcttgaaagtcttggggccacgagctctgtcttctttacctgcaggagccttcctgatcccctatttcctgacactcatctttgcgggggtcccactcttcctgctggagtgctccctgggccagtacacctccatcggggggctaggggtatggaagctggctcctatgttcaagggtaagtctgcagatcagggacctgggtggtggtgcccctgcccacacacacctcttgccctctggagagagcgagctgtctacccagaccagggctgacatcacatatccatccaccaggtgcatatctgagcagagtgagggctgttgcaaggggccaggtggcagatgacagtgctggtcagaagctagggaggtggaggtggagaggcccaatccagagtcccccgcacatcagcctgctctgtcctgttagcccatctatttcctctgcaagggctgggtgtgactttctttgcctcgtgctcagtgcctgacaggcacccaggtagatacatggtgagtcatgctcactgaccgagggcctgggcctcacctcgtccggcaagctgagaccccagccctgcctgccaccagtctgcactgggccccagacatgagtcctggccccctggcttgtcagatgtacatgaccttcagcaagtcactgcctctctcttagcctcagtgtcctcagtaatgcctgtctccgagatcaataagattgtagaggtcatggaacatgccacgacagttcatgttaattccgtattaaatggacgcgtgtctgtgttccgctcccaggcgtgggccttgcggctgctgtgctatcattctggctgaacatctactacatcgtcatcatctcctgggccatttactacctgtacaactccttcaccacggtgagtggtccctttgaccaccccatccagcagaagccacacccagagcccacccttggcccaccacggccaccactctgctgacaaggccattcctccaggagtggggaacttggtttgtcttttgtgggccttggtctccccacaacagccatagcctcacaaatttagcatctcctgtgagacaggcactccttgcaggctcacatccaatcctcatgacacccctctaaagtgcgtattgttagcacattttatatggacacagacagcctgggttcaaatcctgactctactatataccagctgtgcaacttcagaaaagagacttaacctctctgagtctcagtgccctcatttataaaatggaaataaaattagaacctgccccagttcctcaaaaaattaaacatagaattaccatatgatccagcaattctgcttctgagtagatacctgaagaattacaagcagctctcaaagagatatttgtacactcctgttcacagcagcactattcacagtaggcaaaaggtggaagcaagccaagcgttcactgataaatgaattggtaagcaaaatgtggtctatacatacaatggaatgtaattcagccttaaaaggaaggaaattctgacgcatgcatcaacatggatggaccttgaggatattatgtcaagtgaaataagccggtcacaaaaatacaaatagtgtttgatcttgcttatatgagttccctagagtaatcaaatttatagagacagaaagtagaatgatggttgccaggggttgtgggtagggggatgaggagttgttgtttagtgggtggagttgcagttttgcaaaatgaaaaaagttctggagctggatgctgacaatgttaggcaatacatttctcacaatgtactcccattgttaagtgacacatgactgtatttgcagaggtgtggcagggttcagggagctacattatgggtatacttaatgcttctaaattgtacaggcaccaatagttaagatggtaaatgttgtgtgtattttatcaaaattaaaaaatgaaagaaaacaaaaagtgaaacccacctcatagggttcttgtgaggattaaggagcagatatgtgtaaggaacttagaactgcgcctggcagagaacaagccctgtaagtgtttgctggtgtcgttgcagtgagagttagatgggcaaggtctcttgcccaaggtcacatggtggggaagtagccccggctgcagcttggaaggctgttctcacagtgaacaggttgaggttcaaatctcagctctggcacttagtagctgtgcattctcaagcaagtcactgtccctctctgatctgtcaaatggggatcataatgctacttgcctcccagagctgctgcgaaggggaggtgtgaggaggcttggggaccatgagggtgggcagggtgcactgggaccactcatgccagcccctgggagcccagcaggatgcgtcctcatgactgtgtccttgcagacactgccgtggaaacagtgcgacaacccctggaacacagaccgctgcttctccaactacagcatggtcaacactaccaacatgaccagcgctgtggtggagttctgggagtgagtatggggccatcaggggatggcagggacggggcatgtcagccagagcccggcaggagacagaggcccctcggaggggtaacagaagaggtggataaaggggctacagtcatgtgtcacatcatgacattttggtcatcagtggaccacatatgcaacgatggtcccataagattataataccatatttttactttaccttttctacgtctagacatgtctagtaccgaaatgcattgtgttacagttgcgtacaatattcagtacagtcatgtgctgtacaggtttgtagtctaggagcaataggccacaccgtatggcataggagtgtagcaggctagaccatctaggtttgtgcaagtacacgctatgatatgcacacaacaacaaaattgcttaagaacgcatttctcagaacatatccctgttgttaagtgacacatgactatacttgcagagttgtggcagggctaaggcagccacaagggatgctgaagaccttttctccccaaaaagagttggaccacagatagagccatgagacacacaaactctgacctttgatagcaaaacccagctactcacaaagccaaggtccagcaggaagaatacattccccaacatctctgcctctaatctcctgccagctcctcccaatggtcaaacccagctagaagccagagggcaggggaccagataatgtggccatagtcgtcagcatcctggggcctggcacagagtggtcaaggggaagagtggatcagagaggcaaacggaggggaataaccagcatagccaattagaatcacctggagaggttgaccacatcctgattcatcctgaaaaccagcctgatctacttacgaacctagagtcactcggaataaacatgcacacaca

SEQ ID NO: 1881350 - DNA, 4001 bp, Homo sapiens; identical to SEQ ID NO: 316344

SEQ ID NO: 1881351 - DNA, 4001 bp, Homo sapiens
gcaaataaactcttgcacccatatgaaagctcggtagtcatagaagctttcccaaataatatgccttcctctgccaatacacaaagtaacctttgtcagttaataatgagctaattgttaacctgaacaacagatgacatcagagaaaactggcataaattattccaaaatgaactgtaagtgaatctgtccacttaatgaatctaatttacatgattcttctccctgctgtttcctttgtaaataatattttatttaaataattgccagcccaaaagatagaatcataattattctgggagttacatggatttgataggtaaaccactatttcagccataacttgcaagctggttagaccattgatcactatacctgggtgttagtttagatagaatattgctgaggtagtcagctcagtacattgttgaggtctcaagagcacaaagactccttgttgggaaactcctgagacctagaaccatgtttccaaggcagcagtactaggtaaatattctaggtgtatattctctgtcatttttaatgtatgaatagcagactaaaagtgctgctttttatacctaaccaggaatcatctttgacaccatctgaagaatcagtggtagactcaccatcttcagagtccttcagcttccactagaccatttaattcattttgaggggacaaaatagggactcctgcagttttctctctgtagtattttcttgctgaatccaagaccacattaggaaaccatgccgttgattttttcgactactgcttgtggcagttcttgcctagctgttgaaagttactttttttcccctctttacatcttggtagaacatcttattctgaaaattgactatctctcatcctccattcccacgctttgcctagaaaatgaaaagatgtttaaaagaatgccctcctgttcttgccactacaaaaaaatcaaaacatttcctgtcatacactcacacacaattagtctccttaacaataaagaggaaaagaagtgggaaaaaaatatccatgacctctgttggtattaagtctataggatacactcagcagagtcaaaccatctagcacaatcaaaaccattatctcctcctctgggtgtctaaactgcccatatcagtcatttcagtgaataaagaaataaacaaacactagaaaataggatagttgtagatttgagaaacagtaaaagtgtggtgctatgtatagcaatgatatcacttgtattattacagtcatttttatattactagcatttggggattatatcatctagcatttgaggttgttttgacaatttgttcacatatagataagaaagaaggaatgatcttttcaaagagagatgcatggttaaaagcgtggcgcgtgtatatttgcatgcacatgcacctgcacctgaggttgaacatgcaccagatacaccataccccacctgagtgattaaatagatcactcaataggaatttttcaggtcattttcagttttctcagtcttttgaaataaggtgatattttatggtgcccacagtggtttgtgtctacaagcattgcctaattttaaaaccttaagttaatcttgacaaatctggctattggaagctgtttggccttgaaggttattttatttgtgagtcctgctctagttgctacatagatggtggcattgggtggggtgtttaaaatctaagatagtccaataaataaactgaaatacatcagcaataaggtttataagtgacctcatgaggaatcatctagcttcttagatcagggtctgctggtcataagggtggatcacttgaggtcagcagttcaagatcagcctggccaatatggcaaaaccctgtctctactaaaaatacaaaaattagctcggtatggtagcacatgccttgtaatcctagctacttagaaggctgaggtaggagaatcacctgaatccaggaagcagaggttgtagtgagccaagatggtgccactgcactccagcctgggtgacagagttagacactgtctcaaaaaaaaataagaagctctaatgtttgtttcattgagagatcccttcctaagggacccaacaagcagcttcaatgatggtcagtaaagtatgaaccttataaccatagtttccacgtttccacctttgcctcctactgaggcggcagcagagctgggtcctgactgtgatgcggtattcccataacacagctccacatccagaggtagtttcacccggaatcaatgaaactcagctttcagggctcttcatctgcatgggtcctttgtaagggaccagtgttgatattcaaaagtgtgcattctttttattaagaatagcctccaaaattaggtaaccttcagacttcatgaaatctggatctatccccgtccatgtgagtaaacactacagggaaaatatgataaattaacggtcttatcataatattaagtattacaataaattatatgattgtaaaaaatttcagtccctagcacctatataacactgtgttctgtatttgcatatcggagtcattttggtaaacaaaattttaatttatttgaacagggttcgggaaatcctcaggaagtttaacttgcaatttggtatctgaagctaatgttattcctctccacatttctcctcaaacatttggcacagcttttcctaccgtggcaagcaacttgtcccattctgaaaagtgtgttaaattcacagatacccaataatgattattgcagggtgttctccaacacgtttcatcccttggtctaaatttacattgtatgactatgacctgggatgactctcttgccctcccttgtaactcaatacagttatgaatggatgattatttttataaaatcctactctggagttcccaaattgacaggcattggaggctcccaaaccgaccccatctcaggtatatattctcaagaccaaaagtttatgaaagctaagcccccttaagcccccactactccaaaggaactgcaaaacagcacatgaacagtgaaaaagatcctaaagaaattcacctcccgatcacaccaaattaatgctatcctgagatacatccagcgaaaggaattcatcatattccacataagtgccaaaagacatttggacagactttcagcctaaaggatagtgagagggatagtcttaaaaattttaaagatttctttagaactttcttagaattaagtgtcctattcagcttaattgttctgctaccagcaaaagtgataaagttcaggtgatcctaaatgcagaaaatatgtggaagtgaataaagccttctgcactaatgactagcaaatttcaatagatttccaatctctctttttcacatttcttgtaccaactcatttatattgtcattctagaaagagcacataaaagggtgtctggagatagatttctggatgttaagagaatctttagtgagtggagataagacctgaccaggagaccttttatgagtatattcagaaatgtaaactgatgaatatggtaagggcaaaaactcaatatgattgcatctaagataggataaggagttaatgcccctttccaagagaaatcttgaagacggtaccaaagtgagccccaggaaagatctgaactgaaacctctctaagagtctcttcaaagcctccactagctatagagtggttgcaatggagaatgatcttgttttccattaagaaattccaactactcattagtacctgttttatttttcccactatagcctccaggcctaccactgtgcctggcacaaagcaggtgttctaataaatgtctagttaatgttgaatcagcaggtaatcaaaatagtccttcagttaaatgatagtaaaatcccgaatgtattcctgtgagagacttgccttatttcaggctggtgttgagcattgtcttttgacctctgcctactgttttatttatttatttatttgcttt

SEQ ID NO: 1881352 - DNA, 4001 bp, Homo sapiens
cttttatccttagttacttgtatgttaatatttccttgaagtatttacaacaccttgcagataaatggtttagaaagtacatatagattatttcatcattgtagtaattctaagaggtaatcaaagtcaggtattatttatgctttaaggattacagaaaaagcaatgtctaacttcatggaacaagcaagttgctgagtgaacataaagactaattcttctgattttttgattttgggaaagactcatgtcgatcaaaataaaaaataaatatattctgtaaaaagtgctaaaaaaaaggccagataaatgaaaacataaagcaaaatgaaagatataagatgttttatcaatcattacagagattgggtatggactacaatttctcctgagaaagaaaaggtttatgttcttaaactggactttgaaaaatccacacagttacagagagacaggaagaatatgttttgatgttctgttacacagtagggtgactgtagcagtaacaatgtagtatatatttcaaggtagttagaagagaagttttttttttcctttttttttttttgagacggagtctcgctctgtcgcccagtctggagtgcagtggcgccatctcgtctcactgcaagctctgcctccagggttcacgccattctagatgagatttttaatgttgttaccacaaagaaatgataaatgtttaaagtaatggatatggtaactaccctaatttgatcattatactatgtatacatgcaccgaaacatcacgttgtgccccataaatatatacaattattatgtgtcaatcataaatttaaaaagtaaataaaaataaaagaatctagtttatactatttacaagaatcagaataaaaagaaagtaatgaaaatctaaaagtaaatgcaagagagagagaggttggaggagagagaggatggatatcaatattaatgttagaaggtggatttcggggttgaaagcactaaacagaatataaaataggccgacatgtactgataaaagtcacattttgtgaagcagatttgcagtcatagagctttgcaagacacattacagcagctcaatataaaaagtaagaactacatatcacactggcaacttgaagaaaatataatttgaataagaacatttaatatatttcttttgaaatttgagtaaatctaagcatgtcatgaaaattaactgacttaatcctcacaataataactctgtgaacggaacacaattataatctgtatgtacaattgagaaaaactacaaatgataaataagtcaacaggttttttttttgacatatccaataagaattacaaatccttcatatgcttgattaaggacaaaagaaagggagtaaaatataaaagaatagagataagatttaactacagagagtatttacagaataatatatgttatgatatgcaattctatggcagcccatttgaaaaccaaaataaatgaatgaatttttggcaaaatatgtaattaccacaattgaatgaaaaataaatggaaaatctgaaatgatcacttagaaaagtattgaaggaacagatatattcacaggtaatttctattaaatatattaaaagtatgtacttcaggtgcattaaagtaagggatgaatattcatgatcagaaaatgtatggatggtgatattggataagcatttgataaaattcagtagccatgctctctctcagatacagttccccttcctccctccagggggcgccatggaacgcagagccctccctggccctggggactgggtgacgtcaggggtgagcctctcgtgattggctgcatcaccctgcgtaagatcaaagggatgaaaggacagccgcgacacccggagccattgtggctccggccggttgcgcctgccctcgggccttcagggaggcgagggttcgagagtgcgagttcgaggccaacacctggtccacattggttgaaaaaaaattttttttatcgttccctatataacaacaaaacataaagggaggacgccttgataggaagaaatgacatcttcctaagtgtttttaaattacttcaatgtatctttttttttttttttttttttttggaggggggagactgagccttgctctgttgcccaggctggagtgcagtggtgtgatcttggctcactgcaacctcagcctcctgggttcaagcgagtctcctgtctcagcctcccgagtagctgggattacaggcccaggccgcgtgcctggctaattttggtatttttagtggagacggagtttcaccatgttggcgaggctggtctcgaactgctggcctcaagagatctcgccccttggcctcccaaagtgctaggattacaggggtgtgccctcgtgctcggccgtctctcccgtctttcttagactccttgatctctgtcctggcccccgggatctttgtcttcgtcccctctctagttcgctcccatcagattcactgtcttctctctctggtcctctcccctttgcctcggactgtatcctcttcgtcgctgttgatcccacttctgcactgtcctcgctgctgtcttcccccagtcctgtcgccatccccatcccctgcctcagtcccctgtgccgtcggccgctccacctgtgaccgtggagtctttttctgtcacttccgtctctgtcacatcccctctggtcgctcctggtcggaggccctgcctccctcgcctcagggcccttccccgtctccttctcttcctgtcatccctggctccttcccagcgtctttccttccttctccgaatcgtcctctgctcctctgggtttgcgcctgctgggagctctgcccctgggagctgtttcctccgctcagtctctgggtgtttcctagggggtcacatgctcttctaggcctgtcctggggcagaggggccaccctgaggtccatcagtcagtctgaccatcgccttagaacctcgagcctctcgcctcgcctcgcctcgcctgacgccctttcccaccctttatctttcccttcaggataaaaaataaaaagagtcggaacagctccctgaggccagagatttgtgtctgttctgtccactgctatatgcccagcacctagaacagtgcctggcccagtgaagagtgaataaatgaactggacccagggaagaaacagacttgcccccaggccactcagagagtgagctgtgcccatacccgctcctggggccctgagtgatcacgaggtggggtgggtactcaccagtcacaacgtccacaggcagctgggccagcagggacccaatgggtgtgagggcctctgagctgtccagggccccctggtcccggaggtagaggatggcggtttccaggctggctggtggtgggggctcgatgaaggggaaggttcgggggtcccccacactcatgctcttcatctagaatgagaagcaaaaccccccaagattggggaacacaagagccaccgtgcagcacacggggctcagagatcacaaattcatgacgttttaaaattcctagtgttggccgggcgtggtggctcacgcctgtggtcccagcactttgaaaggccaaggcaagcggatcacttgaggtcaggagtccaagaccatcctggccaacatggtgaaaccctgtctctactaaaaatacaaaaattagtggtggtgcatgcctgtaattccagctactcgggaggctgaggcaggagaatcgcttgaacccaggaggtggagatcgcagtaagccgagatcatgcctctgcactgcgctccagcctggcaatacaccgagactccatctcaaattcccagtgtcagccaagcacagtggctcatgcctgtaatcctagcactttgggaggccgcagcaggtggatcacttgaggtcaggagtttgagaccagcctggccaacatggtgaaaccccatctctactaaaaatacaaaaattagccgggt

SEQ ID NO: 1881353 - DNA, 4001 bp, Homo sapiens
acagcacttatatcttttagtccacaagtatattattaaatgatagagaacatctaatacaaccatttctacagaactaggaaataaatttctaagaaagaaagattttacagaccccatcttttatacccaccccaacagtctaactctaaagaggataaagccaatgactttcctcacaagagctcacgactaacgtcgctttgctatcaaaatctgtatttctgatccgttatgagcattgagacaagattcaaatattcccaaagaaagaagcacaatgcacgttgtgatcgcctattcagcaacagcgagcactgcatccaaaactctcatcccaggaattaaataaggtcagccacattcatgggcatctcctccactgtagtattgtagaaagtctcaatgtcacgaagaatcctcttgtcttcttcagtaacaaagtttatagccacacctttcctcccaaatcgaccccctctgccaattctgtgtaagaaaaagaatcagaacgttacttctcacataatgtataaactactgaacatgacgatccacttgttaaccaccagctgctgtttacttatcaaggttatagttcgtgcttctaactggagcactagctgctaatgcatatctagagaaaaaaatcttcctttgcagttagtgccaaaaggattcaaggcttgtctggctgcaaaatgagatttttatcaggcatcttgagcattattataaagcagatgacagtatcgtgtttggggtagtgaaattaaagcccataccaaagtgggccagccaagagcaggtgtcagcctgggacagatgtgaacaccaggaataaaagagcagttatgtaatccatttcgacgcacttctggaactgtaaactgtaaacaaatgctgcaaaggttaactattttctaaaacttacttttttccagtgggaaaacaaatatttggtatggtaacccaaacttatcactgcttttttgctcagtttcacacgttgtaactcaaattactctaaacgtgtttaactgccaaacagctacctgcatgttagaaaccagacaatacaaaccacctaataagaaaggttccctaatagaaatactaatacaaaaaaatgccttagctggagcaacttaaaaatcaaataatcatgacaaaagaaaaacaaatataaataccgactcgctctttattcaaacagtgtgctgtttcgcttatgattccacgtcctaaattacgtcaacgccgtttctgagtgccatctcgtcaccaactgctgctatcgactcctgtattttttaaaaagtctttttttacatcatataacaaagtacaattcaatttatttagggataaagccactataactaaaccagggttcactcaaattgctaccaggcgacaccaagaaaatcccaactatagaaaaaatcaccaagaaaaacacatggacacaagaacatcactaaaagctcaagcataaggtaagaccaacaattgtggaaaaaaaccctatgtccacaatctgggcaatgtttacaagttttcccactttgttctcatcaaccttccctagtacaaatttaattacatcatcttactgaacactactgactttactgaatctattccttgatttgatgttacctttcatacaaatcacagtagaaaaacgtatgaatttttttcaatacagccaagatgctggcttctcacctgtgaatatagttttcacgattggtaggtagatcataatttataaccaaagacacttgttgcacatcaatcccgcgagcctgaaacacaatggcatgttttaaaaattgattcaaaaaaacttgacacctgtcatgtaggccacaaaatagtagcgaactatactaagtggtatagcccactgtggagtgtggtcttttactcttccaaatagcccaagttggcaaaggttacttaaaaacctgccccccaaaaagctaacttttggtagatttttaaaaagcattaagagacttaccaacaagtcagtagtgatcagaacacgacttgaccctgaccggaattccctcatgataacatctctctccttctggtccatgtcaccatgctgcaaattaataaaccttaattcaagaatcaccagtcaggtcggtatttaattttaatcaacatgtatgagaccaagcgtccctggctgctacaggagaatagcagacaggtatagttaagaaacaactttattttaagcagggggaacgacaacacagcacttagcagctatattgtagtctgaatcctgctttagtggaaatccagacattttagaacacctcttaccagagcagaaactgtgaagtctctggcatgcatcttctcagtcagccagtccaccttgcgcctcgtattgagaaaaataacagcctgtgtaatggtcagtgtctcgtacaagtcacaaagtgtatccaacttccattcctgtaatgtttagaagttaaagttaacagtcatttagtttttccaactcttcagttaaaaattcattctgggccagccacagtgctaatgcctgtaatcccagccctttgggatcctagcacttagagcccagagttccaaccagaccagggtttcaagaaagtgaaactgtctctacccaaaataccaaaattggccagtcttagccagtctcataacccagtctcaaaacgtagaaattataaaaattaacttcattctgttaggtctaatgagatattgcaccaaatcttaagacaaaggacattggacattaagaaagaggtccaccccagtctttacaatctagtgctgttacttttcttcttgtgtgtactctgctagcattattgcaaaaaccaagacatggtcctagtgtctgcaattttagcacagtgcttatacaagaaggtaaaataatgtctaacaatcagacagttacctctctctcaacattaatataaaactgtttgattccttcaagggtcaattcttcctttttcaccagaattcgaattggatctctcatgaattttttggtcacttccaacacatcagttggcattgtggcagaaagcaacacaaccttaaaaagagaaaattatgttgtagcacaacttacacattaatacccaaaggaaaatgtctgaagccaagcgtctctgtcttactacggaatgaaggtagacagagttatgcatcaagtgctttaagcagggggaacgacaacaaaacacatcagttgtattgtaacagtacctgcattaaataaaccccatctctacctttaagaggggggtgaagtaatgcttacctgaatacttgtgtttagtttttggaaaatctcatagatttgatccttaaaaccacggctcaacatttcatctgcttcatccaaaacaaacattttgatccattttggagctgttagaaacaaagtcatactgtcatttctagatctactcagtgatacaatttgacttttcaactatgttaacagttttaaaaaaaatactctcttaaagacaatacttacaaaggtatcttctgtttaacatatcaaacactctcccgggtgtaccaacaacaatatgtggtgcttcagcctgcagtttttgcatttcatttcgaacatttgttccaccaatgcaggcatgacaagtggctcccatatagtctccaagtgccagaattaccttttggatctaaaacccaagccttaattattattccgcagaactccaggatcaatgactaatttttaaagcataaaggcaaatataatctggtctgccaacagcttttatgcatgcacagcacaaaactacttccaagcttaaaatgcagacgacctaactgctgcaaggtaaaattcccttaatgtctttcttatgccttgtcaaacttgggatgctgctgctccacgcatcagctagacaatccaagaataacgtttcctacattattcttcactg

SEQ ID NO: 1881354 - DNA, 4001 bp, Homo sapiens
tatacctgcttttaaacccatccattctgtgtcctctgagaacttcctctaaaattcccatcccctgagtatctcccttgagaagccactggattctcctaccttcttttcccttcatatccctcctcgtctttcactggaacacaaactgcttctccttctctcatcaaccatccactctctgcaatccatcttcctctccaattactctttggatttcactctgaggttaatccccaaatcccaaatccaagtcttttactaaaacagttttttattatggaagttttacggaatattcaggagcagagagattaactcaataaatccctatgtatccatcatccagtgttgaacaataatcaactcaaggcctatttatttttttcatctgttcctctcctctgacaactccaatagattattgtgaggcaaactccagataccctatcatttcattcacaaatatttcagtagagatctctaaaagataagaatacttttgaagaacaaaaccacaataccattatcacaacctaaaaaatttagtaatttcttaacatcggtgtttagatttctataggatcttttaaaatagaatctctccacagggttttcctctaccccttaacgtcccgctcctttccattgtcatcatttcctccctattttcctgcttccctaatgttctttgagaaatctctttcctcttgctgcctctgattctcttctcactaaggtttaaaagaggggttggcaaactggcctgtgctggccgtatgtttttgtaaataaagttttattgggatagagtcatgcacactaatttacatattgcctatctccaatttagagctgtaatggcagaataagttagttctctcatgggcaagagagaacataatgtctgcaaacctaagatatttacttcccattctttgagaaaaagtttttagacccctgaagttattagtaataagctggagttccataatcttgcactctggcaagaattttgccatgatcccattctacagatgtaccaaccatatccaactggaagtacctcagccattcacttgcagtgtttaagaaacaaaccaaacatctctcttccttcaagttatcctaccacagggcagaattcccaaggtggtaatctaatcacataaatttgtactctgctttaaaaaaaaacaagcaaacaaacttagatggttccctagtaatatttttagcttagaatatataaggttttttataactggatccaacctgacttccaaacactgaaaaatcttagtcatagcagattactccatgagtccctaaataagccactcttccatgcctttgttcattttgttccttctgcctcaaacacccttcatactacattgtctatcttcccactattgtcatgaaaaaacaaccaagtattcaatatcaagttgcatcacctgtgaaatattcgattttttttttttttttttgagacagactctcgctctgtttaccaggctggagtatagcggtgtgatcttggcttactgcaagccccacctcccaggttcaagcaattctcaggcctcagcctcccaagtagcacctgcaaccacggctaattttttgtctttttagtagagatgaagtttcgctatgttggtcaggctggtctcaaactcctggcctcaagtcatctgtccactctagcctcctaaagtgctgggattacaggtgtgagccactatgcccagcccaaaatatttgatttttaatttttaaaaatcaaaatccatactctaagtagaggtttttcaattagaaccatttccaaattaagttttctttttttcttcagggaaatgtttagagtcctgcaatttatccagccactgatgaagctggttagagctggcaggaactccaaattattcttgcatacactgtcccccctgcctggacatgagcacagtcaggcaaggtctacgagtatgccctccaaattaagttttcactttctctctttatgctctaagaagtttaagtgacttgtacatatatcactcaaaaaaccagtaactgtgtaccaaatggagaaaggacacttgacttctttaagaatacacccaaatcaggctacatttttaaaatttaataaatagaagtgggggtgggaaggtgaagaaattactggtttaaaaagcagcttctctgttatggtaaaatggagattcacaggaaaatggagattcacctgggtttctagctaaaatcaacactgagctgaaatgaacctataaaacagattagaattaagatgaaatcgggccgggcatggtggctcacggcctgtaatcccagtactttgggaggctgaggcgggtggatcacgaggtcaggagatccagaccatcctggataacacggtgaaaccccgtctctactaaaaatacaaaaaaatagccaggcgtggtggcaggcacctgtagtcccagctactcgggaggctgaggcaggagaatggcatgaacccaggaggcagagtttgcagtaagccgagatcgcgccgctgcactccagcctgggcgaaagagcgagactccgtctcaaaaaaaagaattaagataaaatcttttaactgtgataaagtattactgaatataaaagcaaaatgtctaaatcaacatcaaaagaaattctggtaggatataataatcactttactatgctttagattcaaactatccaaatgttcttagttttaaaacaaacaaaaaattctaataaacaaaaaagaattaatttttgccaaaacatattacatgtatataaaaggcttattagctagctgacaatctccctcaagattagcttttaactcatgatgaactaatatggcacaaacattttaatcttttactatagcttctcctcatttcagcaaactcactcagatgtttcctacttacttgcatttccacatagcatctctactgaagatccctgtaaagtgcggcagtcaatttctacccaattcagtgttgctgtctaaacctacttgatcagtgatgaacaggtgctgagcccacaagtcagtcatggtggaattttccagttgcttggtgttccattcacatagagttagaaggtggcatggaatatcaatatagctgttaactctttaggacgaatttgtgacagcatgacctgaaatgcaggtatatgatttctgtctaaaaaccataaacttcccatcaataactgggaacatttttatcaacaagagtgcaaggagtgcactgcttacggcttttctgacatcaaatctagctcatttaatagtacaaagagtcaactgtgcagtgattccttcaatttcccaactgcactaaataaacccagaacaccacatttgctgtcctgggcacactctgttcttctcaaaaaagaaaacacaaataaacaattctacaatatcatgaaaggacacaaattttctgaaggtcttcagccacataatgttcttcaatagattagaaagccatattgccatgagctatgaatctactgtcatgtattatttctttagtatagataagggtgagttatgccacttggaaaactgaggaattattttttggaaacagatttttagaattgaaagaaaccttagaaaccatttagcctcagaccctcaggttaaagataatgaaatcgaaatccccacaagttaagccacttgcccaaaatcaaatcgctggaaatggaaacatccagccacgctttcaacccaggtcatagtgcctctcaagaaacagattagaagaaaaatattaaaatattccagcaaatcggagaggtatgaagccatttcaagggcatcctcattactctgcaaattccagatacaatagatagtatgtgatcttaaaattacctagagtgttttgtaaagctattactttgttacataaaatataaaggcaaaacttaatgta

SEQ ID NO: 1881355 - DNA, 4001 bp, Homo sapiens
ggaataaccctctgcaaaaacacacatgggaacccgtcctgtcaacattgaaataaagtcttactacataatttttaaatctgtcaaaatagttaagatgaataaaatccctgttagaactcttagaattcaagaaatctactagttttctcaacagaaaaattattaaaatagagctgtggcaaaaaagattcaagttttactaactagtcatttcttaaaaatacaaattaaggtatttttcattcaagttggcagaggttctctttgagacaaggcctcactctgtcactcaggctgggatgcagtggacagtcttggctccctgctgcctcaacctcctgtgttctagcaatcttcccaccttagcctcagctgagactacaggcacgccaacaccacacccagctcgtttttgttaattttggtagagacggagttttgccacgttgcccaccctggtctcgaacttctgggctcaagcaagccaccagcctcagcctcacaaagtaccccatattacaaaagcatgagccacccatgactggcttttttaagaaacaggatctcactctgtgccccaggcttggagtgcagtggcaaaatcataacttactgcagcccccagctcctggacttgagggatctcctggctcagactcccaattaacgggaactatgggtgcatgccgtcatgactggctaagattcttaaaaaatttctgtcccagtatttcattgttttaaggtaaaaactttgactatgggaaaatgtgataagccactttaatagaatttctagatatttagtggcacaagtctacacaaaatgaaattataaagttcaacatactgccagatgcccagcatgtatgttgaaaaggtcttacaggctgggcgcagtggcttacgcctgtaatcccaacactttgggaggccgaggtgggaggatcacttgagatcaggcgtttaagaccagcctggccaaatggtaaaaccatgtctctactaaaaatacaaaaatcagtcaggcatggtggcacatgcctgtaattccagctactcgggaggatgaggcaggagaatcccttgagcttaggaggcaaaggctgcaatgagccgatatcacaccactgcagtccaggatggacaacaggcaacagagcgagagactgtcttgaaggaaaaaaaaaaaaaaaaaaaaaaaggaaggtcataggtcataagggcgatttctatggctcagtccaacttaagatctcttaacagtggagtttgagttttctattttctttttttttttttttgagacagagtctcggctctgtcacccaggctggagtacagtggcgcatctcagctcactgcaagctccgcccaccgggttcacgccattctccactttggcctcctgagtagctgggactacaggcacccgcccccacgcccaactaattttttgtatttttagtagagatggggcttcaccgtggtgtggatctcctgacctcgtaatacgccggactccacctcccaaagtgctgggattacaggcgtagccaccgcgcccggcctgagttatttctgttttcttatgtctttctatgtctcacaatgtctgtaagctttatttctataatataaaaactaaccactgttccacaaacctggccagtattcctggaggatataacactgacatcagcagggttttcaatggcaacaattgcacgagctgccagcagaagcttctcccaggtcctcttgagatttatgatatagatgcctaagtgagggcagaaggatttgtaacacttgacctggctgtgcaaacattcttctcaagtttactctatgtggcagcgagtactaccaaactccagtcatagaggcaagctctactggtgttagcgaaaatcctgccattgatatagcacacttccgacactcagaagttcatgagccaagactggcctccaccctgagctttaatagtgtgcagcctagattcagttggctaaatccatctttcctttctctttccctgtacttattccatcattggttcttaataatccacttcctggctttctgccactctttcccttttataatctgcactgatgcaagattcatcctaaaactcctttacagcatgtcactcccaagtccttggtagctttatctctaaaataagtaagtgccttagccaacttaatgccttccatcctctggttcttccaaaccatattgttcattcccacctcttaccccactttccactcaaaattcagttcaatagcctgtgtaagtacctatgaagttgaaggcactatgcgagctattagaaactcagccaatgaactttctcatgttcatgacccaacccaagtcccgtaactcagacaactgacatattcctcccctggagcagaaatcttttctctcaataacaagaacatttatttaaagtatgttttcaacgtaggggtctggcttcatttaaggaagatagaaagaaattacccagaactaaccacgagaatagcaagctcaaaatttgtacttacagctggagtaacaaaaaattaaagcaatgactaaccatcacttttccttttatagatgtactgttccatctggaagtcaagattggtgccacctaagtgggttcctgctgcaaggaacttaaggacatcctcctccttcatttgcaggacatcaagggctccggacattgtgaaaatttccctttaagttacgacgggaatctgaaataagagagcaacctatttcttttcattccattgagttaagtagggcacacccttaaaagcaaccaaaaactccatctgctatagtgtcaggcattgagcttacagtgtagtgaagggtaaacagaaagttaacccatacatgtcgtgtattacggaacagcgcacatcttactgaggaaatagtgtggacggcagagtaaccgagtaataaaactacacgaaattagcgaatggaaattcaacacttctcaagataggaattaaggaaaagttgtggatgcgccaagttaacaactagatacaaaagagcagccatgtttggaatatgcaaactaaaggcaaaaaaggcatgaattgttttcagacattttcaagcagattgtaggcggatgctttggaattacttcgctgtgctgtcaccacttgtttgtctaaaaacccgagaaccttaactcctgacccgcacggcgcgaagggaaaacccgaccagcccaagtagctggtgtaaatcagcgcctgggcctagactcaccgccgtgtgggactccgaagggatagcaacacaggatgttagcccgctttctgcactcccgcccacccgcggcctggtccgaaccccagctcggagcctccgctggagggcggcctccacccgctcccggggcactctgggaacccgccagcccgagcctggccacgtgcgggccgcaggcctaaggtggggcgcgccgggcgggagacagatccagtctgaccggctttcatcactagtcttctcacccttcatttgagcaggaaaagctcatttttctagccctggaaggcgccagggacgctacacggaactcacccagaacaacgccgtatggacccctctgcaggtagcacggaaaagacaggcggcaggaaatgacgtccttatgtactccgttgtcagccaatggcaaagaaagtcgagcggaagaagggcggagccggagaagaacgctgccgggactgggctttttcttcaggaaggcgggcttgcgccgcaggagcgggcctctgggctgtagccggtagcggcatcctggtcggatctggggcgcttgtgactttggggtttctagtgccacagcgacgccctgtgcataattcctgtccagagcgcggaactcaagttagtcagccaggcggggcgttcttacccagcccttgtacctgcgaatatgagcggctttctag

SEQ ID NO: 1881356 - DNA, 4001 bp, Homo sapiens
ccagctacgaaggagcctgaggcacaagaatcgcttgaacccaggaggcagaggttgcagtgaactgagatcacgccactgtactccagcctgggcaacagggaaagactgtctccccaaccccctccccggcaaagacaaatatggagaacatcacatttttaaatacatacatacctctcctctcccagaacctgtaggcaagctgacaagaggggcaattaatgtctctcaatgtggggaaggaccatcgcctctccagggcttccaggaatagttaacctaagtgacaggaagactctcaaaaataaaaacctaagctctatagaacttacctacgcaaatggtaataaaagcaagatcatcagggcctcggaaaagtattcctgaggttaccaactaagtatgtgtaaccacttacatctattttcacagcacacatgttctccacacaggaaggaagctcagggaaattctgaagtgaaaagcaatatacactatctacagtgggctttagaagtacaactcatgtcgagacatgtatttattattatgctttgatatgcaatcccaggtattctgatctggagtaaaaagcaaactaaatgaagacaacttttagaaactgatgtttattttccatcaaccatttttccatgctgcttaagagcctatgcaagaacagcttaagaccagtcagtggttgctcctacccattcagtggcctgagcagtgggagctgcagaccagtcttccgtggcaggctgagcgctccagtcttctgttaagagaataccaaaaaaagccatcagctctgtcctcaatgtagtatttttccttaccccactcccaacagcagtctatcagatgctgtagcacactggaatgaaaacctcttaaagctagtataaaagtcacagagatcattaaagttagaataaaactgagaagttgcaaaatatcagcttgattcacctctatcctgatacataccagtagggaattgctgaataggcacagagggcacctgtacaccttcagaccagtctgcaacctcaggctgagtagcagtgaactcaggagcgggagcagtccattcaccctgaaattcctccttggtcactgccttctcagcagcagcctgctcttctttttcaatctgggttacaaaaaaaaaagaggaaagacttacagggactgacaagttttgcttcctagaagcacagtccaagtcgtccaatttgcttatgtaaccacaagcctttggagaagcttacctcttcaggatctctgtagaagtacagatcaggcatgacctcccatgggtgttcacgggaaatggtgccacgcatgcgcagaacttcccgagccagcatccaccacatcaaacccactgagtgagctccctgccaagagtggcagattattaaaaagtgacacttggtcaaacccaaacagcaagcaccttcctggctcttacatcatctaggtaccaaaagtacagacatctcttagttgaaaagcaattgtaacagggagcattataaatagggattttcaaccttgtctgcacactggaatcatagggattgaaaaaaaaatgcctggacactggcatttaaaaaaaatatctgggcaattcttatgcacaactagggttacaaatcaaccaatctgaaccacacacaacccacctttttagcatcttatagtagaacccatcaagttggtgtgaaaacaaaggccaagtgcctgaggcctgagcaagaaacatggacaaaggcagaagaacacactattttccaaatgttttcatttctccacaaagctgtcatgcagtaatgttatacttgtagcaagaattactatcaaactccactcattgggccagagacccttgtggtgttagcgaaaacttgcccctcatgtagcacactacctacacttgcgagttcatcggccagtcagtagcctcaactccaagctctaacaatgtgcacaggaatgttttttctagagcacgcattcacaaactctagatcctaaaatcattaccttgttgttgcatgggatggcaatgtccacatagcgcagaggagaatctgtgttacacagcgcaatggtaggtaggttaacataagatgcctccgtgagaggctggtggtcagccctggggtcagtaaccacaagaagccgtggctcccggaaggctgcctggatctggttagtgaaggttccaggagtgaagcggccagcaattggagtggctccagtggcagcagcaaacttcagcacagccctctttgaagaatttaaaagttagtggtactcgatattccacagcaacaatcctggcacccagtaagcacttctgggcactggccaacttaatcactactactccatgtaaagcaggcacatacccagctttccttaacctctcttacttctccagagatttcctgcatacattaaaaaagacaggcttgtttttctactatatatcccgagcacctagcaacactacctggcccaatctagatgctcagtatatttttctcaagcaagcaagaactgtcactcagttcattctacagcaataactaactgccttttttctactgtgtaccaaactatgtggtcctagtaacaagtcagtttcaggaataaccctctgcaaaaacacacatgggaacccgtcctgtcaacattgaaataaagtcttactacataatttttaaatctgtcaaaatagttaagatgaataaaatccctgttagaactcttagaattcaagaaatctactagttttctcaacagaaaaattattaaaatagagctgtggcaaaaaagattcaagttttactaactagtcatttcttaaaaatacaaattaaggtatttttcattcaagttggcagaggttctctttgagacaaggcctcactctgtcactcaggctgggatgcagtggacagtcttggctccctgctgcctcaacctcctgtgttctagcaatcttcccaccttagcctcagctgagactacaggcacgccaacaccacacccagctcgtttttgttaattttggtagagacggagttttgccacgttgcccaccctggtctcgaacttctgggctcaagcaagccaccagcctcagcctcacaaagtaccccatattacaaaagcatgagccacccatgactggcttttttaagaaacaggatctcactctgtgccccaggcttggagtgcagtggcaaaatcataacttactgcagcccccagctcctggacttgagggatctcctggctcagactcccaattaacgggaactatgggtgcatgccgtcatgactggctaagattcttaaaaaatttctgtcccagtatttcattgttttaaggtaaaaactttgactatgggaaaatgtgataagccactttaatagaatttctagatatttagtggcacaagtctacacaaaatgaaattataaagttcaacatactgccagatgcccagcatgtatgttgaaaaggtcttacaggctgggcgcagtggcttacgcctgtaatcccaacactttgggaggccgaggtgggaggatcacttgagatcaggcgtttaagaccagcctggccaaatggtaaaaccatgtctctactaaaaatacaaaaatcagtcaggcatggtggcacatgcctgtaattccagctactcgggaggatgaggcaggagaatcccttgagcttaggaggcaaaggctgcaatgagccgatatcacaccactgcagtccaggatggacaacaggcaacagagcgagagactgtcttgaaggaaaaaaaaaaaaaaaaaaaaaaaggaaggtcataggtcataagggcgatttctatggctcagtccaacttaagatctcttaacagtggagtttgagttttctattttctttttttttttttttgagacagagtctcggctctgtcacccaggct

SEQ ID NO: 1881357 - DNA, 4001 bp, Homo sapiens
gcactgcatccaaaactctcatcccaggaattaaataaggtcagccacattcatgggcatctcctccactgtagtattgtagaaagtctcaatgtcacgaagaatcctcttgtcttcttcagtaacaaagtttatagccacacctttcctcccaaatcgaccccctctgccaattctgtgtaagaaaaagaatcagaacgttacttctcacataatgtataaactactgaacatgacgatccacttgttaaccaccagctgctgtttacttatcaaggttatagttcgtgcttctaactggagcactagctgctaatgcatatctagagaaaaaaatcttcctttgcagttagtgccaaaaggattcaaggcttgtctggctgcaaaatgagatttttatcaggcatcttgagcattattataaagcagatgacagtatcgtgtttggggtagtgaaattaaagcccataccaaagtgggccagccaagagcaggtgtcagcctgggacagatgtgaacaccaggaataaaagagcagttatgtaatccatttcgacgcacttctggaactgtaaactgtaaacaaatgctgcaaaggttaactattttctaaaacttacttttttccagtgggaaaacaaatatttggtatggtaacccaaacttatcactgcttttttgctcagtttcacacgttgtaactcaaattactctaaacgtgtttaactgccaaacagctacctgcatgttagaaaccagacaatacaaaccacctaataagaaaggttccctaatagaaatactaatacaaaaaaatgccttagctggagcaacttaaaaatcaaataatcatgacaaaagaaaaacaaatataaataccgactcgctctttattcaaacagtgtgctgtttcgcttatgattccacgtcctaaattacgtcaacgccgtttctgagtgccatctcgtcaccaactgctgctatcgactcctgtattttttaaaaagtctttttttacatcatataacaaagtacaattcaatttatttagggataaagccactataactaaaccagggttcactcaaattgctaccaggcgacaccaagaaaatcccaactatagaaaaaatcaccaagaaaaacacatggacacaagaacatcactaaaagctcaagcataaggtaagaccaacaattgtggaaaaaaaccctatgtccacaatctgggcaatgtttacaagttttcccactttgttctcatcaaccttccctagtacaaatttaattacatcatcttactgaacactactgactttactgaatctattccttgatttgatgttacctttcatacaaatcacagtagaaaaacgtatgaatttttttcaatacagccaagatgctggcttctcacctgtgaatatagttttcacgattggtaggtagatcataatttataaccaaagacacttgttgcacatcaatcccgcgagcctgaaacacaatggcatgttttaaaaattgattcaaaaaaacttgacacctgtcatgtaggccacaaaatagtagcgaactatactaagtggtatagcccactgtggagtgtggtcttttactcttccaaatagcccaagttggcaaaggttacttaaaaacctgccccccaaaaagctaacttttggtagatttttaaaaagcattaagagacttaccaacaagtcagtagtgatcagaacacgacttgaccctgaccggaattccctcatgataacatctctctccttctggtccatgtcaccatgctgcaaattaataaaccttaattcaagaatcaccagtcaggtcggtatttaattttaatcaacatgtatgagaccaagcgtccctggctgctacaggagaatagcagacaggtatagttaagaaacaactttattttaagcagggggaacgacaacacagcacttagcagctatattgtagtctgaatcctgctttagtggaaatccagacattttagaacacctcttaccagagcagaaactgtgaagtctctggcatgcatcttctcagtcagccagtccaccttgcgcctcgtattgagaaaaataacagcctgtgtaatggtcagtgtctcgtacaagtcacaaagtgtatccaacttccattcctgtaatgtttagaagttaaagttaacagtcatttagtttttccaactcttcagttaaaaattcattctgggccagccacagtgctaatgcctgtaatcccagccctttgggatcctagcacttagagcccagagttccaaccagaccagggtttcaagaaagtgaaactgtctctacccaaaataccaaaattggccagtcttagccagtctcataacccagtctcaaaacgtagaaattataaaaattaacttcattctgttaggtctaatgagatattgcaccaaatcttaagacaaaggacattggacattaagaaagaggtccaccccagtctttacaatctagtgctgttacttttcttcttgtgtgtactctgctagcattattgcaaaaaccaagacatggtcctagtgtctgcaattttagcacagtgcttatacaagaaggtaaaataatgtctaacaatcagacagttacctctctctcaacattaatataaaactgtttgattccttcaagggtcaattcttcctttttcaccagaattcgaattggatctctcatgaattttttggtcacttccaacacatcagttggcattgtggcagaaagcaacacaaccttaaaaagagaaaattatgttgtagcacaacttacacattaatacccaaaggaaaatgtctgaagccaagcgtctctgtcttactacggaatgaaggtagacagagttatgcatcaagtgctttaagcagggggaacgacaacaaaacacatcagttgtattgtaacagtacctgcattaaataaaccccatctctacctttaagaggggggtgaagtaatgcttacctgaatacttgtgtttagtttttggaaaatctcatagatttgatccttaaaaccacggctcaacatttcatctgcttcatccaaaacaaacattttgatccattttggagctgttagaaacaaagtcatactgtcatttctagatctactcagtgatacaatttgacttttcaactatgttaacagttttaaaaaaaatactctcttaaagacaatacttacaaaggtatcttctgtttaacatatcaaacactctcccgggtgtaccaacaacaatatgtggtgcttcagcctgcagtttttgcatttcatttcgaacatttgttccaccaatgcaggcatgacaagtggctcccatatagtctccaagtgccagaattaccttttggatctaaaacccaagccttaattattattccgcagaactccaggatcaatgactaatttttaaagcataaaggcaaatataatctggtctgccaacagcttttatgcatgcacagcacaaaactacttccaagcttaaaatgcagacgacctaactgctgcaaggtaaaattcccttaatgtctttcttatgccttgtcaaacttgggatgctgctgctccacgcatcagctagacaatccaagaataacgtttcctacattattcttcactgtaggtagggagtacgtagtgaaatttatgttctgtaattacagctagggcaaatgatttttttcccccagagggtattgtgccttatataatcctgacctcaataaagcctacagctttattaggaaggtttacttcaaagccaatatagcagtgagctttgaaaacatagcatgcaacagatgcatcacgaactacggagacagtcaaatggtaacatgtcactgcagttttcatgttgcacaactgcattcaaacttaaaaaatggggacagatctagtacatccaagagagcgcttcggattctcaatcta

SEQ ID NO: 1881358 - DNA, 4001 bp, Homo sapiens; identical to SEQ ID NO: 316244

SEQ ID NO: 1881359 - DNA, 4001 bp, Homo sapiens
cagagtagaaacgtctctaaaaacaaaccgtaaacactacctagcactaatgtcctgtgacccctccttgcactctccacctttgtgtaaagtactctctgtccacaaagtcttcctcttattctccctctagttcacatttggttgtaaagcctccgtacccctgaaaataccccttaccaaagcataaagggcctcttaaagtctgaggcctatgtttgatcttccccaaattccctcataaataaagcaacattctggaaacaacagccaaaagatattatattgaaaaccggtgattactgctgtgttcactgtgtcaagcaaagtccatttttctggtcttgggactccacagctatgaggacaaaagtctctcccctctccaacaaaggaaacacactgaactccccaagaagcattctctttttccttttgggatggagtttcactgtcgccctaggctggagtgcagtggcgcgatcgtagctcactgcaacctctcctgctggttctcccacctcagcctcctgagtagctgagattacaggcgtgtaccaccacgcccagctaattttgtctttttagtagagatggggtttcgtcaagttggccaggctggtctcgaactcctgacctcaggtgatctgcccacctcggcctcccaaagtgctgggattacaggcatgagccaccacacctggccccaaacaagcattctctaaactcctgtaaggaatgacttcacattccctcagagaatgtcagcttcccaaaatgcatcccaagagtttccagagttcctgccagaagtgcccgcacagatgcaaacttcagacccctgaaaccagagatggacccaactcacttgttgcatatcagcagcactctcagctccttgacattgtggaccaggaacttccggaagccactgggcagcacgtgctttctggttttttttttttttttttttttttgctcctataaccaatgctgggcatcatatcaagacctggcccttgaaccttctatgaaccctgttgtcaatgcctctgggtttccaccagttacgctgaaggaaataatacacaggtgggttagcatctgtgcagactgccaactgttccataggggagggaaaaaaggaccaaatgaaaaggaagtatgccacacagtagttgcctttggtaataggacttcactatttccttacatgcttttttggtgggaaaaaccaggagctcgtggcttttgccactaggaaggcaggcacccccgccattctcactcccaagaaatggagacaccaatgggatgcgaggggactgtgtagatattgagatggcgagcacaggtgcagacactgctctcagcacctctgagttttcttgtctataaaatagggatcctgctgtcataaggcaacccaaaatacatgatacaaatgcaaagccctccaaacatatcaaaatggccaagtgtcccttttcattaaagtttcacttcacacatcaagagacgtaagtaccagcactagggcacactgggggagacctgtatttccacagaaagctcttccacaaaccagttcatcggtcaaaggtaatcctgactaggtgatgtcagaactggcagcctgttggaaactcctttcttcaccccacacccatttccatcccaggaccacacaccttgattttgacatatcggtctgactggtgccggatgaatttcttggttctctttttgacgatcttgggcttcacaagggatctgagggcagccatgatgccttttggggaagaagtagccccaggtgaggaagaatcctggaaggaggctttcccgcccagggactgaacactgtcgcagagtgtcttccaatcaccagctacggagcaagctgggaatggaatgggtgcctctgccaggcttgctttccctccctttccgaagctggcagaatactaggcagtctccagatgcgatcccaggaggtcaagggtcacctcacccactcagagcccaaagaatgccaacagctgagcaaatcaaaactgaccccaagacactctcaatttgcaaggggcagcaaatcccaccctgccagtgtctgaacccccagatggtccttccggtagtactggccttgaccatctacttgaactggagtctcagtttcctcacctgtaaaatggagacgacattgtgtgctgaatgcctgcagtacctgtcacagggtaaatgttcaataaagaaaaccttctaattccctaggtagcagctgcgctaccacacccccaacacacacaaaaccatcatatccctctaaggatgcctcaaacctggagatcttccattatcaactcacaacttcctcagtgtggtcttctgagccattcatttatttcctacagcagcaccccttctgttctctttgcagccatcagttggcacagagtgggtactcaatgaaccacgtattcaaaacaactttgccttctggcccatgatatccttgaaggcaagggggaagtttcatctttatattcccagagctcctgacgatcaaaatctctgttaacaactgagtgagctgacctgcaccccatctttttttttttttttttttttttttttttgcagtcccaccacagcagccctagggtcacaggctagaaggaaaggaacgtggggtcatggcaatgaatgaatgcacgtgggccaacatcagtaagcacggtataaaccgaaaaataaattctaagccccccacccaactgaatggactcctgctcttggccaagggcattccaaagttaacctgaaaaactagttcaagccataatgggaatgtggggtcgaacttgcctcattatgcccttctccctatggaattcaggcacagctgaccagcgttagcattaaaagagatcccaagactgacaaaacagactttgtagcaataagacaccaaatttcaacctgactctagtatagcatcacatgacagattgcaggccctgaaagaaacagaagtactttacccaaaaatatatttctttgacatattctgacatggccctgtaaagctgtctcttgtggggacaatctacgtcctgtagtgaatccccctccctttccaggtcttctccctgagccaggagaggctccactaagactttggcaccttttcaggcctggtaagaaacatttacgatctactctctttgaagcccgctacctggaggcttcctctgcataaataagaaccttggtctccacaacctcttatctgaacccaggcattcctttttgttgattccaagtctttagacaaactcaaccaattgtcaaatctaccaacagcccggaccaggccccccaacacacctccctaaaatgtacaaaaccaagctgcaccccaaccaccttgggcacatgttctcaggacttcctgagggctttgtcacgggccgtggtcactcatactggactcagaataagtcttttcaaatactttacacagtttgactcttttcgtcaatagacgcaaagcccaaccaccaccccggctgcctgcttcactctgttcgtgtacgcgctccagcaagccgacaatacccacagacacagagtggtagggaaggcctccttaccaggggaccatagggccagatgaagcctgcaggaacgcagatggccacggattaagactcactcaggccgggcgcggtggctcacgcctgtaatcccagaactttggaaggccgaggcggacggatcacttgaggtcaggcgttccagaccagcctggccaacatagtgaaacccactctctactaaaaattcaaaaattagccaggcgtggtggtgggcgccggtagtcccagctacttggcaggctgaggcaggagaatcgcttgaaccccggaagcggaggctgcagtaagctgagatcgcaccactgcactccagcctgggaagcaaagtgagactct

SEQ ID NO: 1881360 - DNA, 4001 bp, Homo sapiens
ttccagtgggaaaacaaatatttggtatggtaacccaaacttatcactgcttttttgctcagtttcacacgttgtaactcaaattactctaaacgtgtttaactgccaaacagctacctgcatgttagaaaccagacaatacaaaccacctaataagaaaggttccctaatagaaatactaatacaaaaaaatgccttagctggagcaacttaaaaatcaaataatcatgacaaaagaaaaacaaatataaataccgactcgctctttattcaaacagtgtgctgtttcgcttatgattccacgtcctaaattacgtcaacgccgtttctgagtgccatctcgtcaccaactgctgctatcgactcctgtattttttaaaaagtctttttttacatcatataacaaagtacaattcaatttatttagggataaagccactataactaaaccagggttcactcaaattgctaccaggcgacaccaagaaaatcccaactatagaaaaaatcaccaagaaaaacacatggacacaagaacatcactaaaagctcaagcataaggtaagaccaacaattgtggaaaaaaaccctatgtccacaatctgggcaatgtttacaagttttcccactttgttctcatcaaccttccctagtacaaatttaattacatcatcttactgaacactactgactttactgaatctattccttgatttgatgttacctttcatacaaatcacagtagaaaaacgtatgaatttttttcaatacagccaagatgctggcttctcacctgtgaatatagttttcacgattggtaggtagatcataatttataaccaaagacacttgttgcacatcaatcccgcgagcctgaaacacaatggcatgttttaaaaattgattcaaaaaaacttgacacctgtcatgtaggccacaaaatagtagcgaactatactaagtggtatagcccactgtggagtgtggtcttttactcttccaaatagcccaagttggcaaaggttacttaaaaacctgccccccaaaaagctaacttttggtagatttttaaaaagcattaagagacttaccaacaagtcagtagtgatcagaacacgacttgaccctgaccggaattccctcatgataacatctctctccttctggtccatgtcaccatgctgcaaattaataaaccttaattcaagaatcaccagtcaggtcggtatttaattttaatcaacatgtatgagaccaagcgtccctggctgctacaggagaatagcagacaggtatagttaagaaacaactttattttaagcagggggaacgacaacacagcacttagcagctatattgtagtctgaatcctgctttagtggaaatccagacattttagaacacctcttaccagagcagaaactgtgaagtctctggcatgcatcttctcagtcagccagtccaccttgcgcctcgtattgagaaaaataacagcctgtgtaatggtcagtgtctcgtacaagtcacaaagtgtatccaacttccattcctgtaatgtttagaagttaaagttaacagtcatttagtttttccaactcttcagttaaaaattcattctgggccagccacagtgctaatgcctgtaatcccagccctttgggatcctagcacttagagcccagagttccaaccagaccagggtttcaagaaagtgaaactgtctctacccaaaataccaaaattggccagtcttagccagtctcataacccagtctcaaaacgtagaaattataaaaattaacttcattctgttaggtctaatgagatattgcaccaaatcttaagacaaaggacattggacattaagaaagaggtccaccccagtctttacaatctagtgctgttacttttcttcttgtgtgtactctgctagcattattgcaaaaaccaagacatggtcctagtgtctgcaattttagcacagtgcttatacaagaaggtaaaataatgtctaacaatcagacagttacctctctctcaacattaatataaaactgtttgattccttcaagggtcaattcttcctttttcaccagaattcgaattggatctctcatgaattttttggtcacttccaacacatcagttggcattgtggcagaaagcaacacaaccttaaaaagagaaaattatgttgtagcacaacttacacattaatacccaaaggaaaatgtctgaagccaagcgtctctgtcttactacggaatgaaggtagacagagttatgcatcaagtgctttaagcagggggaacgacaacaaaacacatcagttgtattgtaacagtacctgcattaaataaaccccatctctacctttaagaggggggtgaagtaatgcttacctgaatacttgtgtttagtttttggaaaatctcatagatttgatccttaaaaccacggctcaacatttcatctgcttcatccaaaacaaacattttgatccattttggagctgttagaaacaaagtcatactgtcatttctagatctactcagtgatacaatttgacttttcaactatgttaacagttttaaaaaaaatactctcttaaagacaatacttacaaaggtatcttctgtttaacatatcaaacactctcccgggtgtaccaacaacaatatgtggtgcttcagcctgcagtttttgcatttcatttcgaacatttgttccaccaatgcaggcatgacaagtggctcccatatagtctccaagtgccagaattaccttttggatctaaaacccaagccttaattattattccgcagaactccaggatcaatgactaatttttaaagcataaaggcaaatataatctggtctgccaacagcttttatgcatgcacagcacaaaactacttccaagcttaaaatgcagacgacctaactgctgcaaggtaaaattcccttaatgtctttcttatgccttgtcaaacttgggatgctgctgctccacgcatcagctagacaatccaagaataacgtttcctacattattcttcactgtaggtagggagtacgtagtgaaatttatgttctgtaattacagctagggcaaatgatttttttcccccagagggtattgtgccttatataatcctgacctcaataaagcctacagctttattaggaaggtttacttcaaagccaatatagcagtgagctttgaaaacatagcatgcaacagatgcatcacgaactacggagacagtcaaatggtaacatgtcactgcagttttcatgttgcacaactgcattcaaacttaaaaaatggggacagatctagtacatccaagagagcgcttcggattctcaatctattagtatacaaccctacaaaccatacctgcatacccagttcttttaaaactttcaacaaaaactccctgcatgcatggacaattaaaaggagggatctggtaggaccaatttatactaagttttaaattcttcacagttgtgaaacctgaaacctatgcaacacgcaagcagtttttttgaactacactatcaatacctgttgagccagttctctggtgggggccaatactagtgcttgggtctccttgaactcaatctccaactgttgcaggatggaaatagcaaatgtggctgtcttgccagtacctgactgagcttgagcaatcacatcataccctaaaaaaagtaggatacacatttaccgatcccacatcaaattgtcacttctacttcacaccatgtattccatttggaacattatgcccaaataatcaagtgatcagcaatgagtattctcttcatttcaggtcagtcccgaaagatgattgccatcatttcactttaaggaatacaaacaggtgctagtcccccagaggttactttcccttttatggttcatgtctatgtagaacaatttcctaaaaatgccagtttcttttacctttaatacagggaataatagc

SEQ ID NO: 1881361 - DNA, 4001 bp, Homo sapiens
tgtgtgtggttatgtgctttcagtaaggtataagcaagaagctagtatttgagtgagccttttacttgacaacaactccatacactgctgcttgggcacttggagagctggctaaacttcttaactatttcaacacttaaaaagtaaaaagtaatgaactgaaactcaccaattactccaacccgaatggctttgctgcaagtttcctgaaaacctccaagaagtttccaaaggccctctttcccaaagcagacttcacttctgaatggagcagcattcttctttgccttcacacgctaaaattccaaatagttgaattattctggcaacttacctgataaatttcaacaaaccccaagcaatcaggctccagagcccagctcttaagataactacattgcctttcagatgatctctggctgaaatcagagttggatcttgtaatttttcattcacttaaatcaagattttgtacactcatcatatttcaaccaaaatctgaaagaatcacatttcttaccactaataaaggataccttggttatcttccctttatcctttggttttgttgaggctctgaacaccactgttggcaattctttcttcaaataatttagccagctctccaaattctcctttggtaccagatctgatagcaattagaaataagacatttgcggccaggcacggtggctcacgcctgtaatcccagcactttgggaggccgagacaggcggatcacgagttcaggagatcaagaccatcctggctaacacgataaaaccccgtctctactaaaaatacaaaaaaattagctgggcgtggtggtgggcacctgtagtcccagctactcgggaggctgaggcaggagaacggcgtgaacccgggaggtggagcttgcagtgagctgagatggcgccactgcactccagcctgggtgacacagcaagcctccatctcaaaaagaaaaaaagaaaaagacatttgctccaatgtggctattttgttgagatgcatttgcaaaatctggcaactatagattttactctggtttacattttcccagtcctttcaaaaggatttaactagaaaatcagggcagggtaagctcccctaccatactgcccgtatcttaacagagctcagcatctgcacttctctatttcaattccccttgtattgctcacttgaaaacttcaggacagactcaacgtctggattacaaccctactaaccctagagctatgtttccagaatttacctttagctagcagccaattgtttcttcatttttgagacgaagtgttgttgcccaggctggagtgcagtggcacagtatcggctcactgcaacctccgcctcccgggttcaagcaattctcctgcctcagccttccgagtagctgggactacaagtgcccatcatcatgcccggctaatatttgtattttagtagagatggggtttcgccgtgttggccaggcttttctcgaactcctggcctcaagtgatgtgcccacttcagcctcccaagcagccaattgtttcttaaccccaacaacaattttagatctcattcccattttctgctttgtaattctctgttctgggttttctttttcctgctgctcaaactcagatgcataattatgcatttcatttaaatattttgtcacatacgttccaatttatttcactcttgaactaatacccgacattgtgtaggtgtggggaatttgtcacactgtcatcacttcctagatgaaatatactacacaataagctgggtatagcagcttacactctttatttaaaagatggtaaatactgaatggcaaaagaatagtagaaaccagttgagtcagttgtaaaagtcacctggctccccactgcctagcactgtctctggcaaagtgcacgtactctggctttgctgagatcagagttggatctaatcagtcttcagtgactatcagactgtttcctcgtacctcacccatgtacacagaagacaaagggtaccctctttactcacctgatttatttaatataagtaccagctttttctgtccactctggacaatggcctcttctacctgaggacatctgcaaccaagaggatctctggcatccaacacctctaggacaacatcggaggcttcaatcacctatcaaggaaaaaatgaccagaactacattatcaaggagaaaatgatcagaactacatcccttgttctggtaataccttccacaagagagtactggcattatccatttagcaacagggtgagctcagagttggatctcatgtcttcactttggtatgaagaatgttgaccctcatcatttctcacacaggaaagtaaaacataggcttgctcagcagtctctgatcaagatggatttcaaaaatgcaaatatccctgtctgaatcctcccatagtgaattatatagtttgataggtccttctggccttgccaaaagctgctgaggggcagtcaggttctatccatgggggagtgagcttgggaaaatggatgttggggatgggagtgctggagagcaactacaccaagttgtcctccttcacttaggtttcaacagagtactttagagacctttagcctgacactgcttactccaatgtacctttctcaatctcaacactatgtcaacgtttttttttaatgttgtaaatcatgcttacaggcagaaccagttttgtgcaaatatttagaaccaaagaaactatttccgtcaggtaaacatagcaggaaaggcattaaacagcataagctagagtcgagtcacgaaatgatttgttggtgaaaaggtgggaggagggagaggatcaggaaagataactaatgtcgtactaggcttaatacctgggtgatgaaataatctgtacagcaaacccctatgacgcaagtttacccatataacaaacctgcacatgcacccttcatcttaaaaggttaaaaaaaaaatgacttgagtcttttaaacctcattactactgtcagacactgacctaggctaagatacctttttaagttcttggcagtacagcttctttgaattctgtttgcccgacttggctttgttctcagttttgcaaagcccaaactcctagaggataaagggggaaataacacaaaattagaagtagagcaactgtaacctctaactccattttccacagctgagtagcagcccttgcagttgttaaataggtaagatggagtctgaactcagttgtcttcctcccaagaagctcagcagcctgtggatgtgcttttatttctgcatcagaactcatctctcagccaggcacaacagcccacacctgtaataccagaaacttcgggaggctgagttgggtggatcacttgagaccagccttggcaatatagtgaaagcccgtgtctgctaaaaaaaattagccaggcgtgatggtgtgcttctgtagtcccagctacttggagactgaggtggtaagactgcttgagcctgggtggtccaggttgcagtgagttgtgattgtgccactgcactcaggcccaagcaaaaaaaccaaaatcaaaacccctgatctctcattcataaagagacctaatcataccttttccataggttccacatttgatggcttaatatcaggattagtttcaagttttcttttcttttctagttccttctgcctgtcaagtttctgctgctgttttagttcttcaagctgtcagagccataagggaaataggtgaaccagtgactagtgttgttaccttactctgaaaaatatcacacataacacactacaccactcaatgaaaattctggctaacataacttaccctctgtttccttagctcagcttccctaagaagagcctccttaaagggagcactgtttggaactcctgggtctttcctaggcttcttgtgaccccgctttttagcctcctttcttaattttcgatgatgttctcgaacctatta

SEQ ID NO: 1881362 - DNA, 4001 bp, Homo sapiens
atttatctaaaactgtaacagcatacccgactgttctaaagagaacactacatgttatagcttatatatttacatcaaccaaaacacatgctatttcctttgctataaatatgccaccttctggctgggcgcggtggctcacgcctgtaatcccagcactttgggaggccgaggtgggtggatcacctgaggtcaggagtttgagaccagcctggccaacatgatgaaagccctgtctctactaaaaatacaaaaattagccgggtgcctttgatcccagctactcaggaggctgaggttgcagtgagccaagatagcaccactgtactccagcctgggagacagactccatctcccaaaaaaaaaaaatctaaaagttggccaggcacagtggctcatgccacccaacacaagtgtaatcccaacactttgtgaggcctaggcgggtggatgacttaaggccaggagtttgaggctagcctggccaacagtgaaaccccatctctattaaaaatacaaaaactagccaggtgtggtggcagacttctatctggcaaatttctattaatttctcaaggccaggttcaaacatcacttcctctgagggagctttcctctctctcaatctatctgctgaacttgtctttcaaactaaattgtgggcagctgtcccactccaatcagttctagcactggcttaaatctctgctttcaccaaaagctttaaaaaataaaaataggccgggcgcggtggcttggcctgtaaccccagcactttgggaggccgaggcgggcagatcagctgaagtcaggagtttgagaccagcctaaccaacatggagaaacccgtctctattaaaaatacaaaattagccgggcgtgggggcacatgcctgtaatcccagctactctggaggctgaggcaggagaatcacttgaacctgagaggtggaggttgcagtgagccgagattgcgccattgccctccagcctgggaacaagagtgaaactgtctcaaaaaaaaaaaaaaaaaaaatcaccttccttgagataaccaaaataaaatagtgtgtcactataatattacaattatggacacctccatttaccttgtaagccccatggatacaccaacattacacatctgttcttgttttaagctattgataatgctgcttttccccacatttgggaaacctacaaataaatgggaaatccagatataaaaagcattatatgttggcacttatgaaattttcactgcctaattttccatttccctgatgtttagggcaagatcagagttggatctcagtgtcttcacttcaatactaagaccaattttagtttcttcatttcttgcacaagtaatgcaaaggcaggaaaatactataaattcaaacaaaccaagaacttttagaaaccagcttcctacagtaatcagtcccaacaaaaaacctgaatctggcagcagttgtgtaagtttttttctttaaattgtgtgtggttatgtgctttcagtaaggtataagcaagaagctagtatttgagtgagccttttacttgacaacaactccatacactgctgcttgggcacttggagagctggctaaacttcttaactatttcaacacttaaaaagtaaaaagtaatgaactgaaactcaccaattactccaacccgaatggctttgctgcaagtttcctgaaaacctccaagaagtttccaaaggccctctttcccaaagcagacttcacttctgaatggagcagcattcttctttgccttcacacgctaaaattccaaatagttgaattattctggcaacttacctgataaatttcaacaaaccccaagcaatcaggctccagagcccagctcttaagataactacattgcctttcagatgatctctggctgaaatcagagttggatcttgtaatttttcattcacttaaatcaagattttgtacactcatcatatttcaaccaaaatctgaaagaatcacatttcttaccactaataaaggataccttggttatcttccctttatcctttggttttgttgaggctctgaacaccactgttggcaattctttcttcaaataatttagccagctctccaaattctcctttggtaccagatctgatagcaattagaaataagacatttgcggccaggcacggtggctcacgcctgtaatcccagcactttgggaggccgagacaggcggatcacgagttcaggagatcaagaccatcctggctaacacgataaaaccccgtctctactaaaaatacaaaaaaattagctgggcgtggtggtgggcacctgtagtcccagctactcgggaggctgaggcaggagaacggcgtgaacccgggaggtggagcttgcagtgagctgagatggcgccactgcactccagcctgggtgacacagcaagcctccatctcaaaaagaaaaaaagaaaaagacatttgctccaatgtggctattttgttgagatgcatttgcaaaatctggcaactatagattttactctggtttacattttcccagtcctttcaaaaggatttaactagaaaatcagggcagggtaagctcccctaccatactgcccgtatcttaacagagctcagcatctgcacttctctatttcaattccccttgtattgctcacttgaaaacttcaggacagactcaacgtctggattacaaccctactaaccctagagctatgtttccagaatttacctttagctagcagccaattgtttcttcatttttgagacgaagtgttgttgcccaggctggagtgcagtggcacagtatcggctcactgcaacctccgcctcccgggttcaagcaattctcctgcctcagccttccgagtagctgggactacaagtgcccatcatcatgcccggctaatatttgtattttagtagagatggggtttcgccgtgttggccaggcttttctcgaactcctggcctcaagtgatgtgcccacttcagcctcccaagcagccaattgtttcttaaccccaacaacaattttagatctcattcccattttctgctttgtaattctctgttctgggttttctttttcctgctgctcaaactcagatgcataattatgcatttcatttaaatattttgtcacatacgttccaatttatttcactcttgaactaatacccgacattgtgtaggtgtggggaatttgtcacactgtcatcacttcctagatgaaatatactacacaataagctgggtatagcagcttacactctttatttaaaagatggtaaatactgaatggcaaaagaatagtagaaaccagttgagtcagttgtaaaagtcacctggctccccactgcctagcactgtctctggcaaagtgcacgtactctggctttgctgagatcagagttggatctaatcagtcttcagtgactatcagactgtttcctcgtacctcacccatgtacacagaagacaaagggtaccctctttactcacctgatttatttaatataagtaccagctttttctgtccactctggacaatggcctcttctacctgaggacatctgcaaccaagaggatctctggcatccaacacctctaggacaacatcggaggcttcaatcacctatcaaggaaaaaatgaccagaactacattatcaaggagaaaatgatcagaactacatcccttgttctggtaataccttccacaagagagtactggcattatccatttagcaacagggtgagctcagagttggatctcatgtcttcactttggtatgaagaatgttgaccctcatcatttctcacacaggaaagtaaaacataggcttgctcagcagtctctgatcaagatggatttcaaaaatgcaaatatccctgtctgaatcctcccatagtgaattatatagtttgataggtccttctggccttgccaaaagctgctgaggggcagtcagg

SEQ ID NO: 1881363 - DNA, 4001 bp, Homo sapiens
cccagtctttacaatctagtgctgttacttttcttcttgtgtgtactctgctagcattattgcaaaaaccaagacatggtcctagtgtctgcaattttagcacagtgcttatacaagaaggtaaaataatgtctaacaatcagacagttacctctctctcaacattaatataaaactgtttgattccttcaagggtcaattcttcctttttcaccagaattcgaattggatctctcatgaattttttggtcacttccaacacatcagttggcattgtggcagaaagcaacacaaccttaaaaagagaaaattatgttgtagcacaacttacacattaatacccaaaggaaaatgtctgaagccaagcgtctctgtcttactacggaatgaaggtagacagagttatgcatcaagtgctttaagcagggggaacgacaacaaaacacatcagttgtattgtaacagtacctgcattaaataaaccccatctctacctttaagaggggggtgaagtaatgcttacctgaatacttgtgtttagtttttggaaaatctcatagatttgatccttaaaaccacggctcaacatttcatctgcttcatccaaaacaaacattttgatccattttggagctgttagaaacaaagtcatactgtcatttctagatctactcagtgatacaatttgacttttcaactatgttaacagttttaaaaaaaatactctcttaaagacaatacttacaaaggtatcttctgtttaacatatcaaacactctcccgggtgtaccaacaacaatatgtggtgcttcagcctgcagtttttgcatttcatttcgaacatttgttccaccaatgcaggcatgacaagtggctcccatatagtctccaagtgccagaattaccttttggatctaaaacccaagccttaattattattccgcagaactccaggatcaatgactaatttttaaagcataaaggcaaatataatctggtctgccaacagcttttatgcatgcacagcacaaaactacttccaagcttaaaatgcagacgacctaactgctgcaaggtaaaattcccttaatgtctttcttatgccttgtcaaacttgggatgctgctgctccacgcatcagctagacaatccaagaataacgtttcctacattattcttcactgtaggtagggagtacgtagtgaaatttatgttctgtaattacagctagggcaaatgatttttttcccccagagggtattgtgccttatataatcctgacctcaataaagcctacagctttattaggaaggtttacttcaaagccaatatagcagtgagctttgaaaacatagcatgcaacagatgcatcacgaactacggagacagtcaaatggtaacatgtcactgcagttttcatgttgcacaactgcattcaaacttaaaaaatggggacagatctagtacatccaagagagcgcttcggattctcaatctattagtatacaaccctacaaaccatacctgcatacccagttcttttaaaactttcaacaaaaactccctgcatgcatggacaattaaaaggagggatctggtaggaccaatttatactaagttttaaattcttcacagttgtgaaacctgaaacctatgcaacacgcaagcagtttttttgaactacactatcaatacctgttgagccagttctctggtgggggccaatactagtgcttgggtctccttgaactcaatctccaactgttgcaggatggaaatagcaaatgtggctgtcttgccagtacctgactgagcttgagcaatcacatcataccctaaaaaaagtaggatacacatttaccgatcccacatcaaattgtcacttctacttcacaccatgtattccatttggaacattatgcccaaataatcaagtgatcagcaatgagtattctcttcatttcaggtcagtcccgaaagatgattgccatcatttcactttaaggaatacaaacaggtgctagtcccccagaggttactttcccttttatggttcatgtctatgtagaacaatttcctaaaaatgccagtttcttttacctttaatacagggaataatagctctctgctgaatagcggaaggcttctcaaaaccgtaagcatagatgccacgaaggagagactcctttaaattcatatcatcaaagttatcaacaatctcattccagttgctctgtaagttagaaaaaataatgcacgcataaatgagatgaacacactcacctttccaaagcttcaagatccacaaccgtttcttacctcgatgacaccatcggggtccattccctctgggccgccatgttctctgctgacaagaatactgcagtcagacaccccttccaggccacctcaactgcaccttaagcgcatagccctttgcaacccgtctcagcacgttagcctcccctgcacaagctaaagcagcagcctcagggcgaatatccacactgtgcgccttccctaaaggttggggcctgcggatgcccggaaaggcagccccccaggcccgagcgcatggcgatcccgtttcaactgcggagcgtctcgcgagagctcggagcgccgaactccgcccccaacaatgcgcaagccgggtgattgacgcgggcggagcggcctggcgagggcgatgccaacggttcaccggcaccggtcctgtcccgtcgcctccgcgccgtggccgagtggagaccgctgcctccaacccttccccaagtaaagcctaggaccctcccccaactcgtgtggatgaccgaaaataaagcttcgggtcctggttacagtgtaccgaactcggactgcgccacggctttttactccatgtttcccgtgctctacactgggaaggaaagcagccgaagtttcgtaatgtcttagagaggaaaaacgccctttagccactgctttcgcaccaccgtcctatctccccacaatccgggccctacccatcatggaagcttctggaagggcacaggagtgctgtaccctaagaaaacgtccattaatttagagtttttgcctccgtgccatccactatcatctcccctggcgccctatgaccttcactacagaccgcgaccgccaacagactgcatacctgttataatccgcggagccaccagacatgatccgaaaaaccactcagcgcccgactgaaaagacagcggcgcccaaccacccgttttttataggctcgtggccggaacccgtttcttgcggaggaattttctcgccgtgcttcggtcagctacaaaattgtgatcctggggtcgttacctcggataaaatcctaagcaagttggtagaaaaacccaaatgtggtaatttctcgatattacagggtcgctggaaatcctagggcccggggttgggttgggactctttacctcgcggcggaagaatatagctgcggagttagttaaacctcgctttccccgcccgccctgctcctacggggtttccgcgtccctgacgcagaggcgggccgggggagccgcgccggagccggaggcggaaaccggagatgctgttcgtcgggcggccggggcttcccgcgggtgacaggtcccggctcgcggctcgctgccggcactcaggtgcgggaggggaactcggttattccgcttgctcccaccgctgtttaattccacaatgaagacctgcctggcatttagcccgaccgttaacatccattcagatcttggaaacgtaaaattcctgctagggaaaatgtcggccacccagcgagtcccgggaagtccggtttaccggtacattttgcagcgcgagaaggaaaaatggagtgtcatttgcagatgtctctggagtggccaattctattctcatatcatttccggtctctcgctttctttttaagagtgttactgattttaacctaacaggtgtgaggaatgcctgaaaaaaatcataaacttttgcaa

SEQ ID NO: 1881364 - DNA, 4001 bp, Homo sapiens
cattgagatggagatattcctcaatgatagccttggatttcttctctaactcctcctcagagagagccgccttcagggggctcactgggggtagggcagcttctcgcttcactgtgggaagagaacacagattagagggacttttcagtcttcccagcaaacaagatttggagctctcaaaaagctggggaccagctagtcccaaggcagccaatgcctttccctccattcctctcccagactctcaccggcatcccgcccacggtcccgatcctccgtgaggctagctgccttgcgcagcccctcaggctgggagggccgttctctactccgctcctccacttccttgctgaagctccgcttggtagcaggtgtccgcgcacgatcaagccggtccccacggtcccctccccgttcactccgctctaggcggtctcctcggtctccagctttctcgcctcgttctcggctcaagctactcctggaagacagacagacaaattttcactcacttgcactgcccaggcactcatgtaattacacaacatgctgagcaactgttgggccttgttcttagcataatgagtatgccccaatctaacccaagggctccaaccaggacaggtatgaagaaatttccaacctatggcaacaaccagaacccaatcacggtacccccagtgtgaataacaaagatgtccaggaaacctcacctctgcaccacacgtctattatctgtgctttctgtgggtaccgcttgttgaagggctgagaagcgattcaaagtactagtagctgggcgagcagcttctgatgctggggatgcagaaaatccgtattaaaatctttttctcctttcctgcattttatcccctacttgccagtttaggacacttggtcccagtcccaaaagtaaagcagttcaatccctggaaccacaacacaaacctcctctattgcccgcattgcctaaccaccttgtactgaaggcctccctaacagaaaaggctctgtcctcaagggagctctgacgggtaaccacccagctcctgacactgcctccatacctgcgtctgagggcttggctcctgagcctccgctgctgcccttgccccagctcagtcgccctccaggtgcaaagagctggttgttagaatcgatggagccaggctgaagaagaaaaggggagtagaatcataggtccaacccggctgagtcccttggccagcaccaccatatgcaaccaaacaggtagtgaatggcccagtccaggggtcagaaaatcttttttaataaagggccagtctctattgcaactactcaattctgccacagtagcatgaaaccagctgtagatgataaaggcatgctgtgactgtgttccaataaaacttcatggacactgacatttacattttatttaatttccacagcataaattaccattcactttttgatttttcgcaactttaaaatgtaaaaaccactactgggtcctgggatgtatgaatgggctggatctggcacgtgtgtgtgtgtgtgtgtgtgtgtgtgtgtgtttgccaaacactggtccagactaatgggagtaccaccctccctctacagctggcagtcctgtctccagcaatccaaccagttagtctaagaggaaacattcagctgtcaccttctcaactttagaaaagtgaagggactaagatctaaacctgagctgaatcacccactcccacacacacccctaccttggtgatcttggtgagtcgtgaggtgtcaatggggcggctacctttgctgatgggaactgtgttccagccaccatcatccacaaggggaagtccacggcctgacacaaaaagaggggcatactggaataatgaataaatcctagcagccccttccccttgggccacccccagcctcccttcctcagatcctcagttccatcatggtgtctcagtggcccagacacgtggcactaacaggaagtcatcagaggaaagtataacctcccggtcccttcactgctcccttctcaatcccagcttggaactcactgatgggagggcctggaggaccgccccgacgcttgtcactgcccttggccatgagctgctgcactttgatgtgctctcgatgttcttccatctcagcctccttatggatctggtcaatggtcttgggaccctgatcccctcggcgtggcacccaattgctctgtggagacagagggccagtcacgatgatgtcagggaaggcaagacaaggcagtgtcagaaactggaggcagcaggctggcagtggggaggagggggacacacacccctcgcagatccagcacgtcctgcagcataaagcggatgcgggatgacgtcttcttttctttaatgattttttccatctggttgaaatactgatccattcggggctaggaaggagaaaggcatcagaccaggaacttctcatgtcccacctataactgcaggccccacccctcctcaggccttccgccccatcattgtgggctcagtgagccccacatatgcttcagcccatccccctccagatgcaaggacctctaccttggctttttcaaagtccaggtctttgccaatggtggtgagcagacgacaaaggcactcaagggactcttcatcatggttcttaagcagtttgaccacacagtcatgcattattgcctctgttaacatcttcagtttgaacaactctccaataaacttgatattccctaaagagcgccgccgggctatgtcccgagcctcttccagctcttccttcaggcgtcctcgttcctctgcctgccattcacaggacagggattgtgtcaaaaagataaccagccactcggctaaaacccttttctacctggatatccaaacctagcaataagcactcagtcctgaggccggctggctgggcatagtggctcatgcctgtaatcccatcaatttgggaggctgaggcaggcggatcacttgaggtcaggaggagtttgagaccagcttggccaacatggtaaaaccccgtctctattaaaaatacaaaaaaattagccaggtatggtggcacatgcctgtaatcccagctacttgggaggctgaggcaggagaatcgcttgaactcaggaggtggaggctagccaagatcacaccactgcactccagcctgggtgacagagcaagactgtctcaaaaaggaaaaaaaacgtcctgagccagagaaatccccaagacaccactacctccattccaaattctacagctgagtagcatctgggtaagggaaggaggtaagtggtgagtggaatcgatagtgggttttctctcaccgtagcagcttcatccatctctttttgcttcttctcaaaaacctcatcatcatctttgtctttctcaaactccttctgacatcgattcaacaacagctttcggaagttcacagtcactgttggcttttccgtagtgggcactttcagctgtaggtcagagagaatgtcacactcaagactagtcctgggcagggaaggccctccaagagcctttaactacctgacccaggaagatctctggccccagctctgcctccttccagctggaagaggcacaagttggaggggaaccaagaagctggactcaaggagtcttgggaataggaatgggcaaccagaccattagatttagaacccactggaaactaaccgccatgaggcagcggcacatgttggcataggccacagagaagttgggctctgaaatggccttctcaaaaatgaggtcaatgacccctttgaggcgttcctcggtgtcgatggccagctgcgtcacttgcttcatcagctgctggaacatctggggtgtcagtttattcaggatggagcgcaccctgcggaataggtcctggagggagaagagacaagagttccagtgagggtctcagaacaggctgttgggagggacaggagagggtggtggggacttagg

SEQ ID NO: 1881365 - DNA, 4001 bp, Homo sapiens
aaaagatgtgtcagctaggtaaagatgacaaactgccctgtctggcagtcagcttcccagacagactatagactataaatatgtctccatctgccttaccaagtgttttcttactacaatgctgaatgactggaaagaagaactgatatggctagttcagctagctggtacagataattcaaaactgctgttggttttaattttgtaacctgtggcctgatctgtaaataaaacttacatttttcaataggtatcttctttttttattccagataactacttccactcacaatgagatgaattgtctttttacagaatttagggattccaagttgcctggttttaatataatacatattcacaaaatttacacagctcatgcataccataacttatacagagaacagtttagcagtctgcttaaaatgttaaaaaaaaaatcataaaaagccattgttctgttacacataatctgtactgaagtcataagcatcatcctcttcaatgattttatccaagataaaagaccttgtagactgttcacctatattgcaggaaaataaagagattttcaaaaagtaaaagtgattctataccatgctgcttcgttagaaccccttttgcctgcctcacctgctgtagtctcctcagacagtgcctcccctgtctcttctgcagcaaacatgcctgagctgttttcctgtgtgacaaagaaaaatagtgctggattagtagcccttgtctgctcatttaatccaagtagttatgtacctgaaaaattaactctttggaggtacatataacgggatgtgcaaaattaaggctaatggatcacaagcctcaaatatttcctatcttcagttccttccattatgtattataatgctagaaaactcacttcagttttaactcatggaggacacacttacatcaacttcttcatcaacagtttcctggtcactgtctttgtcatcctccctctcctcctgcttcctttctttccgttttggcaattcttcatgtatgtccttttcttctattattccatttgtcagaccggaagactggaaaaggatgctattggccaaatgagggcccttgatggctgggaaagaaagcaagcccatgtaaacaggtaagagctccactggcctgtcagctgatgaagacagcagcgacacacaattctcacctcttatgctctgtgcattgttcttttccagttcttccagattgaagccgcttttcatgtctaccacaatactctcattaaaatatggaggaggagtccaagatgtagggggatggcaatagtaagctaatgaggcactgatattaaaaataagatgtgtcaaaagaaggtttattctagtggtcaccaaaatgccaacagaaaagaaagcttaccctgtccactcagaccacagcagtttggcagcaccttcaacatttgggattccacctttttggtgcatacctcttctctgagcaagcacagtaaaaaattccagagaattcctgtagcctgggacagtatatttcagtactaccttaaaaaaaaaaccaaacaaaggagctgtccttcatctgacatgccagtactttaaaacacttccaagatttttctactcaaaatgcttatgatgaaagaagatggctccaaggagctcatgagaaggggtccttttacctgtcgagcatcagcctgggaaaggatggcactggcagcctccatcggttttactacttcaatacttgctggacttcgcagagcaagcgcagaggaggaattaagtggagatacgatgaagctcggactatctatgattgtgatctgtttgtccaaggggacaacttgcatgctcctgaaagaagagcgatggaattgatgggggcattggtctatttggaggttaagagacagaacatgaagctcagggttggattgaacagactcagcacagtcagtcagatccagtttatcatcatttgcttcacatttatctaaaactgtaacagcatacccgactgttctaaagagaacactacatgttatagcttatatatttacatcaaccaaaacacatgctatttcctttgctataaatatgccaccttctggctgggcgcggtggctcacgcctgtaatcccagcactttgggaggccgaggtgggtggatcacctgaggtcaggagtttgagaccagcctggccaacatgatgaaagccctgtctctactaaaaatacaaaaattagccgggtgcctttgatcccagctactcaggaggctgaggttgcagtgagccaagatagcaccactgtactccagcctgggagacagactccatctcccaaaaaaaaaaaatctaaaagttggccaggcacagtggctcatgccacccaacacaagtgtaatcccaacactttgtgaggcctaggcgggtggatgacttaaggccaggagtttgaggctagcctggccaacagtgaaaccccatctctattaaaaatacaaaaactagccaggtgtggtggcagacttctatctggcaaatttctattaatttctcaaggccaggttcaaacatcacttcctctgagggagctttcctctctctcaatctatctgctgaacttgtctttcaaactaaattgtgggcagctgtcccactccaatcagttctagcactggcttaaatctctgctttcaccaaaagctttaaaaaataaaaataggccgggcgcggtggcttggcctgtaaccccagcactttgggaggccgaggcgggcagatcagctgaagtcaggagtttgagaccagcctaaccaacatggagaaacccgtctctattaaaaatacaaaattagccgggcgtgggggcacatgcctgtaatcccagctactctggaggctgaggcaggagaatcacttgaacctgagaggtggaggttgcagtgagccgagattgcgccattgccctccagcctgggaacaagagtgaaactgtctcaaaaaaaaaaaaaaaaaaaatcaccttccttgagataaccaaaataaaatagtgtgtcactataatattacaattatggacacctccatttaccttgtaagccccatggatacaccaacattacacatctgttcttgttttaagctattgataatgctgcttttccccacatttgggaaacctacaaataaatgggaaatccagatataaaaagcattatatgttggcacttatgaaattttcactgcctaattttccatttccctgatgtttagggcaagatcagagttggatctcagtgtcttcacttcaatactaagaccaattttagtttcttcatttcttgcacaagtaatgcaaaggcaggaaaatactataaattcaaacaaaccaagaacttttagaaaccagcttcctacagtaatcagtcccaacaaaaaacctgaatctggcagcagttgtgtaagtttttttctttaaattgtgtgtggttatgtgctttcagtaaggtataagcaagaagctagtatttgagtgagccttttacttgacaacaactccatacactgctgcttgggcacttggagagctggctaaacttcttaactatttcaacacttaaaaagtaaaaagtaatgaactgaaactcaccaattactccaacccgaatggctttgctgcaagtttcctgaaaacctccaagaagtttccaaaggccctctttcccaaagcagacttcacttctgaatggagcagcattcttctttgccttcacacgctaaaattccaaatagttgaattattctggcaacttacctgataaatttcaacaaaccccaagcaatcaggctccagagcccagctcttaagataactacattgcctttcagatgatctctggctgaaatcagagttggatcttgtaatttttcattcacttaaatcaagattttgtacactcatcatatttcaaccaaaatctgaaag

SEQ ID NO: 1881366 - DNA, 4001 bp, Homo sapiens
gagacgcatctggtcctgtaattcagagagtgggcacatcaccaaagaactgcattgctgtggtcactgtttcttcaagtacacactgactctgctactttaggataaatatattttactcagaactctgaatttcacagtatacttactaaactaagtaaaaatgatacttaaaatacttattttactttctagacctaggctagatgttttaagctacagctctagttcattgtgatatttataatttgaaagctatgagaatagatgtgtgggtgaagccatagaacatatttgcttgaaattcttgagcagggatcttataaagggccagaaataagatgtgtggttcacatagatagtgagcgtaacatctgtattaaacataggagagaagtttataaagggcattggcaataaactctttgttgcagctgttttccaagcagtgtaaatactttttcctgtgattatgtatagccttggaatggcaccttttaactaacccatatgtgtttggtttcaatggttttttatattcagatgtatatatggtgctcactttaggatcagcagtgttgaccatttatgctgcatagctgtattatagccttattagttgtgtggttgacccttggggtatacaaatgtcagtctgagtggtgtcttactcctttgtttataagtgaatgattgtgcatgttttgtatgtcatagtatgtcgtcacataaaagggagggagcgaaaaaccattacattaagataatattggaccaaactacttacttgctctaaacagttacttgtaccccttaacctgtcttcaaaagttgcatatagttacagtagtgtataaattaaatattgtggaaaaacagtcttgtatttttctgtatgtgtgtatatatatataattatgtacttctggcaattctatctgtatttaaagatgtgacaatcttgacaccaattttaagaatagctgtgagaccgaattaaagataatccctaccaagtgaaaattgatgtgtgttaagagggtacagaattatcaactgatttggtcagttgcttccaatgctggttgatttccctcattgtgtaaacattgacaggtatgtgacaaatgggaaaaaaaatccaaataataaagtgacatattggtgttcagcaatataaaccgtgtcctgtgttgtattgcttctcatgagtgtagctttgtgtgatcccacctcagttagacccagccttctccatgccctgtgcctgcaccaccagatttggctgaaaaagtacagtcattattatgtttaaactcatggctacaaatcataggtggggccagggtgcccattaagtatacttactttatttctctatttcatctcctttcctcactctgctggtcaccatgctgcctaattgaataaagggaagcaatgagaactgccacaagttcccacctctgccttcctcccttccttcatacacattcacatgctctgcccttcctcctgttactgtgattccaaggtcagctactcttactcagttctcacaaccattaccataattgacttttacaacccccccccgcccgccaaagaaatcttgtgccctttggcatactttaccttgtccgcaactccctttactccagcctcatgcaaccacttcctgtgatcaattttcaatcccatgttagaatttgatgaattgctcactttcttccttatgaacttcccatctttcagtatctcacttctgccttgctgctcttcatgtccactggtccttcctcattcttccaacctctaaatttggaatgtcccaatgttcaattctggacccctgctctatctgcagtgactcctgatctcagttagtctagtatctatatgctgatagaagcccaaaatatatttagcccacataccctgggaacactggatttcaactatctatttgacttttcttcttggatgtgtctgtgtgtctacagcatctcaatttttacaagttcaaaacccctaatctttcccctcaaatccttttactagcgcacccatcttaataaatatcaactcctagccttcaatagtttcattcaagctgaaaatcttggtgtcatccactttttcatcccaacattcagtttatgagcaaatcttaacttgcctttcacagttgactccttctcattgccaccaccactaccactctagtccatgacactcaactgtaaatgcctcttaaagggtttccctgcatttgcccttgtctttctcatttattttccacttagcagtatgagagatcattttaaaggctaaatcataccatgttttgaaacgtgtttagtttccaaatatttggggttttcccacataggtttctataatttttagtttaattctatttttatcagtgcatgctttctatagtttaaatcttttgaaattactgaaacttgttttatggcccaacatacgacctatcttggtgaatgtttcctgagtgcttggaaagtgctattggtggagtgtcctatacatgtcagttcgttcaagttggttgataatgttcaagttttctatattcttactgattttctgtctcaattattgagagaggagtgttgaaatctccaactatagttgtggatttgtctatttctccttttagttctagcagtgttattttagaaaatttgaagctctgttgtttggtacataagcatttaagattgttacgtcatatcaatgaattgatccctttcctcatgaaatgttccttctttatgactggtaaactatttgttctgaaatctactttgtgtgatagtgatacagtaactccagcttttttttgacttgtgagaatatatctttttccattctttactgttaacctattgtgtctttatgtttaaagtttgttttttgcagatatcatatagttcgagcttgctttcttatcccatcagcaaatgtctgtctttgattgagggtttagatgtattacatttagtgtaattgtcaatatggttgagtttaaacctacctagttttctatttgtctcgtctgttctttttccctcttttgctaccttgttttggtttaactgagcaccttttgttactccattttatctccgctattggcttattggctgtaactcttgtttttcagggggtgctataagatttgcaatacatgtattttattatatcacagtctatcttaatatatcacttcatgtagaatataaaaaccttacaactgtatgcctctattttcctcttcctgttccttatactactgttgtcatacattttatttttgtatatgtataaatattgttttaactagtttttaagggattaaacagggggggggggagtattttagctacatatttgtcatttgcagcactcttcatttctttgtgtagatccacagtttggttttccttctgcctgtagaacattctttaacatttcatataatgcagatctgctggcattacattctgtcagcttttgttttgaaaaattacttttcctttatgaaagatattatcattgggtataaaaattcttgattcatttttattgcaatgctggacactgaattttgcattgttgaatgctggaattttttgtattcgtgtgagaagtattggatttcattttggactgcagttatttaaaatcattggatccttcatgtctcacttttaaactgttagggcagatcctgagcagtcttcagtctagggctaatttggcccactactgaggcaatacctctctagggactctattgaggcttttctactctggctggtaggaacatgaactattaccagccttgggtaagttctgagcattgttcagcctgctgctttccagtggttctttctccagcctcaggtagttttctcataagtactgatcagtactcaaccaaagaccacagattttcttttggagcttgc

SEQ ID NO: 1881367 - DNA, 4001 bp, Homo sapiens; identical to SEQ ID NO: 316358

SEQ ID NO: 1881368 - DNA, 4001 bp, Homo sapiens
agttaatttatcctttagttctaacccttcacacatactccctcaaatgaacaaaggcttggtcaactgcatgctaactactttaaaatataaatctatatccaagacaactgtatatcggatattgcaaacaaaaataaatctcagtatggaaaatttcaataataagctgtggaatttgacggattattgttacattaatgtaattttaattgttttttgttttgttctttacttgctttttttggtttagttggtttgctgttatttttcttgccagagcaatagtatttaatcactatgttctccctctcacaggaaaaatatctgatcagtgaaacaacctccctcccagaaaagtatcagcatatttttatttccattagcaatgtaatacattacaatttatgtagtattagagattatatttcacatgaaaatacaaaatatatacatattctacatttttatctataatatacacttaatcctagacatgaaaatccaatttaaacatttttaaaactcaatgataattatagaactgttaggaagggcaagttgacatgaagactgatacctttggtggaatatttctctataaatcagcccagaacattttaatttattaatcatcaaaatattttttctttcattaaaaaattctcaattctgacatcctttagtgctttatgtgtaagctttaatatatttaatattagtaactaagatatttgcctatttccttaagaaagctaagattaaatacttgtgtaagtacatttcttgttaaacacagtactaaacataatctttatattaataaagggaaaggtgaatagtatattaagacccaattgaaagttttcttcccttcaatagagaatgttgcttgacaaagttacttattaaaagagggagaaatctcaaaagatggaaaattttaagctttattgctaacattcaattattgccctaaccactttttgaggagtgcaaactattaatttacaaatattaagcctttcccagtggcaagcttccaaaatgcacaggatgtctatgattctattcaaaatcacaacccatggcacattaagtacagtaaatatacaaactaaaagccaactgaattccgatgttgtttcaatccaatcaattattttcataaacaaatacaaatttcacctgcaaatgggaaaagttcttatgtgcatataagacactcaacaggcaaagttcctcaaagtaattccaataatttcagtaatgtcaaaatctgaaatggaaaggtaaagttatagagtagagaaatttcattcttattattttccgatttttctgtgtaagcagcaaaccctaagaggatcaaccatattttatgtcatcagcattttataagtgccatatttaagtacttccctgaaaatgccatgagtatgtataaagatgaaaggcttatgaatataaataaagctaagtctccaactgcaaaccttatcattttctaaaatgcattttgttagaaatagctaaggatacttgaattttgctttctgggttcatacttataaggtacaaataccaaaatatgcattaaagaatttatcataaagtaagcgaaaaagagaaaaatcaataagtagccccaattcaaaataacaaaaggtcacccaaagcacagcaatacgtctggcaatatcatacatgatggcttcaaatctaaaaacaaagtcattgatattaaccttggttattgactaataagaaagctattaaagtcaggttagtgtaccaacaaggaagcccaaactttcaagactgttgtctgactgcccttgagggttcacctttatctcccctgaaaaatgccaatataaaaattctaaaataccttcataagccccaaggaaagcctgtggacagacagatgatgtgatatatttcttcctttccattcttgggcagcttcttctctctgcggctgaaagcaaatgcattgagactcagtcgcatatttaattagaagcaagctgcttgcactatcactgtgtgaatctacctctccaatctctcgtgagtcaatctttcccatctctgattttcttttatatttatgctagaatatttaattgtagacaaaaggttactctggctgtattcactgcacagaggcagaataatctgctttaaaaggcttgacatttcaggcttttcaaaaaggctgaaaaaattatatccctgcttttgttaatcaatgaagtagaactctcctgaacaaaagaattaaattgcttggttggtttaataaaaccaacagaaatagctgcttcctctgggctttattgtgtaggcatggcacacgcacccagcactgtaattccatatgattcaggggcaaaactctaatttctgcacacagttgggtttttaaatcctattcagaccctatccattctggctggttctctaaggccagatttatcattaaacttgactctttttctgaagtgcagcagccatacagcaattttatttttgttcctctgcttgttacccccccaaaaaatgttcattaaaagtgtattaatctaaatattacctttttcattttatttagcctagagctaatagttttacacattttcccagctatttaattgaaaaaaaaaaggatctgagggaatgaacaagcgctaagaactttgctgtgaacatgcaaaatagtagtttaaaaaaacaccccaagatcaagtcagaaaacaacattttgttaaattcttattttcagcctaggcttactagtaataaggaatgtatttttggcaaaagactggacaacttctaaaaagataactgggaggattaaaaaagacaatagagacacttctcttttctagtcttaaggtatctcacaattttactgagaacccagaattttaaaaatcaagggagatggcccttagtcaaatgctttcatctgggttcttttgctctgtttatgttcccagacaaccagacttataaaggggtatgttcttccatgcttctacatagaggcagctaccatttcaggtccctaatgacacagtctcttccccttgtacccataatgttgcaacttgcagagatagctagggtctggccgggagcactggttagaccaaccattactacccgagcttaagctttttatacggttatagctatagaggatattttccagagaaaataatggaagtgagagccaacaaaatacattacaccagacaaattatctattgctgtttcctaactcatagagtcatagggccagaaggacctatggagatcatttaatccaatagcctaacagttgagtcaatcccctgtggagataataaatggatagaacagtatctggttatagtaagtgttcaataaatggtaactatcattgtttttcaagaaagagatttctcctctaatccatctcacattggcagcgattcacaatggccaggctcattaccaattggtagacaagccactagctcagctgggagcactgtatcctgaagggtttttctaacaaaaatatacatcattgtaaccatgaaaaatatatttcctatctctgactcgtatttataaaaactgcatttcccctgtgcctatcacaacaaacgaggatttaagttaagttacatgagggtagcaacttcttttgtgaaaattctttctctatttggtttaagaaactgattccaaatgtttttgtgcatagaagccttttctagtctccattcagtatcaaggccttataagaacactgaggaagaacaaaaagagagttttctctgttgaaatccctgtgctggcagcatgtgtgacctggcctacacaagcattggccaagatactgaaatctggaataaattccaagggtcaaggttaaggcagcataggacaaaggaatgccagaggaaaatccaatagtaggtggagctaaagttaaacat

SEQ ID NO: 1881369 - DNA, 4001 bp, Homo sapiens
ccctagacaaaccctcttttatattgcacttttctgtcaatctaacattacaggcaatcactacagtgacaatgtgcaggtcatctagagcatcatacccatgtagacaacacaacaacccaactcgctattgcaggaagaatcacactttgatccatcaagaagtgcagcagttttgttctccttcctgtctcctatcccctcgggttttgataatctcttttgttgcaattgttataaattatcggtaacaaaaactttgcaacttcaacaccaatacaaaccaatatgccactgccaccgtcttggcaggctgccatgcatgctattttaaagttaggcattaggaggcagcaaatggctcaaaaacacaggcaaagataaatgtaggaagttggaaaagagacctgcagctgcaaaagctcagaaaacagacgtcatcttaaatacaaacttccaggaatttatattcgatgtgaggaatagttagaagggaaagggtttggccctcgcagagacctctgtgaaataatctgaatccttttccccatttcagcatccctataaatactgactgttattttaagggttaaacaacataggacttggttttaattaatctttttttttcttgtctccagaaacaaggatctcatgtttgcctacatgaaattcccaggatctgcttgctttagcagtgccagccctaatgcaaatactgttcaagctacctcagagatttcagaactaattctgccccatattgcttcattctaaggcatttatatatttaaaatatgcactgtagttactcagaaatgccaatgctgcatctatgttttaaaaaatacttgtggcatgtactctaatccaaggtatcatgtcttcagatagcatatgtctgtcttatttttaggaaggtaaaaatgaacttttcactttcccaaatgaaaaaaaaagtctctaatcaaagctttgttattttaattataatgcttgattaaattataagaaatgtcacttaaactgcattaaaaatgcagtttaataatgtcagaataattcttgcctctctctggatattcattttgaagaaataagctcacataatttatatgagaatttcatttcaggcataaatagaaaggtctctagaaaacattattactatgaattaaaactataaatgtgtgaggaagattgtgtggtatataaaacaagaaaacttagcatctccaaagacagttccctgcaatttttgcattgtttcttaaactgttgcactaagaatgcatatattatatggcacaaatacttagttattacagaatatactgggtaaatttagcaatagtgaataacacattcattatcacaacagtaattgtgtgataaacagttaaatcacaccaaaggtaattcacaccaaataatgcaaatgtttcacaaaacccattttccttcaaggcatgcatgatgatttcaaactcctccagtaatcaaatttcagctttattacaattagtaacagtaattgaaaaataaatcacacattacttactatttttcagatgtgtatgccatccttccaaattcaaaagagtgaagaggaatcacaaccatgaggaaatctagcaggcaaaaggagggaaaataggaagtattagttgtctaaaaattagcatcttcaggttttcttgaggtacttcccacaagatcccaaagcatagaagaaaaagaaaaagttggagaaaaacatcacacacatcacgagccgactttctccacaaacccatgcagctccaaactttaaaggctcaaattgttgagcatcctgattgagcaaatatccgacttcggtatcactggttacgtacatattttcaataagatgaatgcatctccaaaattatggttactttaatgtattatccagatttcccccgtttctctccccttctcctttttccattcacagttttcttcctacaaaatgcacataggtctgttcttccttgtaccccgaatcaggcctggctttgaaatgcatttcagtctctcaacacagactgctttcattgcatttagagtcccactaaggcccagctttaaaagctactgattctttttttctttagccttcctcacaaaggaagggtattttgtaaattaccagctcgttcagatcaacaaaaggtactttcatagaaagccccatttgattttgctcaaatttgattactaggatggagaaaaggaaaggaagtcaaaaagaaaaaccccagatggctttttcattcatctcagtgaatgagctttatctgtgccttttgaaactgtagcagtggaaaagcatttctgttggcttaaaaaacttgacaaaaattattggtttgccatttctcatgtaacagccattgggaactggatgaaaagactttttcatgggatcgcctgcttggatcaaaataatggagattaggtatttcattataaattacagtgggagatagagcaggctgtcatattaatagcaacctgctcatggccttcaatggtagctattctcctagacaaaggaccaagggggatgtctattgaacttgtactttaggcctgatcaattttctatcatcaaggcaaaaggtgagatgactaacaaaggaattcacacatgagtgacctcataagcctacagataaaacagcttaaagaaggaaaatacatcctgaaattgtggatgataaactacataaagaagaagacagagtatgagaatgagagaggaaagagcaatagtctgtaattctcctccctcttcttggccaaatggacacattaaaagctacttgttttcagctgcagataattgcaacatttggtttgcagtggtctgctataaaccttcagcctactttttttcccccagcacagttccagtcatttcattcgctattaacaacagcattgtgttcaagacaaagcttctaccaacagtcacgcttaaaaataaaaagaaaaggaatcacaaccaacacaggcttccagatagttcacagtaagtgtgcatttgttatttgctccaggttaccagcttcttgcctgatttatatacttagaatctaaagcaattcaaagtccaagcggtacctgcacagacacagaaccttaatgaagcacagtgaaacctctgattcaatcaagattctttcagaaaatagtgaggacgaaatactaatccaaagtgccagtgaagggtgagtgattaattttcacacagtcacaaggaatattttcaattcctcattgaacttgtccaaatcactgtagaaattaccaaaatcctttttccctgtgatatttccttggaatttttttcaacttttctattaaaaagtctaggggatttctgcctgataatatcagtttttcactgggagtagtaaagaaattatcttcgaacgataaaaaccagggttactaaaagttactattacctggaaatgcagatgcagtgtaacattttatgtacattctataacgctaatcaagggaaaaaatatgtgagcaggatgcatttttacaatgccattttttaaaccaaagagtaatataagatcattaatgtaaaattacttccaactgcctaaaagcttgagaaaataccataaataccacccatgacagcagttgtcaaaatagggctacattttgaaaggcagcctcgacaggtgtaatgaccttcagacttgacacaatcagtcgtcgtacacactcatgttagcaatttctcacatctactgatgataagataaggaagttcgtttatgtatggaccaataaaacaaagatgtagtattatctgaggtatatatacaaatgactccacatttgtataaaattggactttctatgttcttaagggagccctggatccttggattctcttaaccattcaggaagatcccaaattcagggttattaaagaggaattaaacaac

SEQ ID NO: 1881370 - DNA, 4001 bp, Homo sapiens
gttctttgttgggcaagtcaaaatgtgtctgtttgataggcaaaaatgacagactaaaaatgggagaagttgaatctaaaaaaagaaacacacacacacgaacacacatgaacacacacacacacacacacacacacacacacacacacgcacgacttttaaaaaaggcccataatgtacttgaaggagaagacctgtagggtaggaggcaatatctttaggaagtcaccaagcagcactaaaaggcaatgtccatggccaatcaaaacgatttctgagactgctggggctcttgcatctctgtctttacactagactggaaaccctttgtagtaattaccagactgtaccagattttctggttcagttcaatcttataattgactgacagtgatgggccaggagggggaaaaattcaggctcaccactgcaagcagaggatcagaaatggtttcacagagagctagttacagcctggcactaaaagcagggttaagcaagcatcatcagcaagttctcctaattcccaggttagaaaggaagttaggaggaaaaaacaacaatccatgggtgctctcatcttacagatcaatccttagcatgcaaccattttacaaaaaatgaatggagaatagccttaagtgtaaattgtaattttagatgtcactaaattttagatgatttttattttgcttttgggaaaagataaaggtttgtctcccaaactcaaatacggtcatcttgcttaagttaaggagacttttgttctatttatactaaggaagaaaaacaatgctgctatttcattcctagggctcaaaaataattgaagtgcaaggcatatttcgcctatgatatgttacataatcaaagttaatttgaaagcacttaacatcaaaattctcacatcctttccttatttgtaattcactgatttggatttactgtgtatccatagttagtaaattgttacccataaatccatactgtttaaaaagaaaagattgaataataatttacatgaactcagagttaatgcattaaaaaaatcgaacacgttgagcgctgtattaaagactcattcggctggctaccatttgttatttacttagaactgttctctacccactttatttctaaacaaaagagcaaccatagctttagctacaccaaacattaaaaacgcaggtgtcagaatcagggtcaaaatgagaactcaggccatttggtaggcaagtgagaattatgtactatcatgttgaggtcaattgacttgaaatttaatcacagtttaaaccccttttctttccaggctaaagagtaagcaacacctgtgccagcagcagctcacattgcagctgacatagcagctagttcaatttttagttacaagtcaattacttactggaatagaaagagaacatttcattcattccatggatggccacttttccgaagaaacctgtcaggctttctttctccaaaagaagaaaagagaaaaaaagtgaaagttaaaaataagtgatgtactgcaaagttttagagctaggccagtacactacagcagagaagttgtgcaaatagcttaccttccaaatactgaacagagctgtcttgtaagtgaggcctatcccagctgataagtcctgggactttccttatcagagtatcaaaattaggtaaaattataataggtgatctacacctgagaagagggaccagctgactgtatgaaaggaaagagcaaatgagtaaaatgtcttcccccagctacagtcagccctggtgcaaggggagttttcaaatgcactggctatagacttttgtccaaagctgtggttctcttttttttcttttctttttttttctttctttctttcttttctttctttcttttctttcttttttttttttttttttttttttttagagaagctagattagttcatacaaaactcaacaatacagcactgaaacccattgttgatattcaacatttttcacatagcggaacagaatagacaatacggtatctaggaaaccatgggctggattacaaactgatgatatctcatccttctgggggcctgtaatcctttttattacctaccacggtaaaaaaaaaaaaaaaatcactatgtgtgtggggaactctctcagaataaatcaataacattgccattcttaggaaaataggataaattaaaatgaaatcttgcttacagcactaagtccctaagtgtgccatttgccttttatgcaagttaatgattttttaaattgctcttatcttaacctttatataaacttccataggttcaaaaaaattaaattatctgtaaatatttgcttaaaaacagtgttcacaattagcttgtatgttctatttctcataataaatacttggaaagttatttatttcaaagtgtccaagattagaacctaaggcatgagtgcaaagtaattttcattaatttgttttaaatacatgtgttgggttattagtaaactatatttattcctccattaggaacacactgaaattcaaggtcttctgggcttatttacctgatctaattaaataaataatttttacttttaaacttttcattgtctttaaaatttttcatttttaaaatgcatttcctgattatgcataactgcaaagccatcctttacaaagaagttatgcctattaacctttttgaaaatctggtccaatccctttttaaaatgcaatccagttcccatacttttcttatgcctccaaatggtctaggtagccacagaagtgattgttcctaccagtttcttttcatcacttctgcaattgaccaattgacaactgattgatggttatcttttcacttcaacaatgaaagaaattaccatcactatagctatgtacagtaaatgcctccagagtaaattgcatgattctaaaattctccttagctcacttagtaaaacatcaacacaaaaaagtttcttttttgcgcctcctttcctgtaccacagatttggcctttcctgtcaactgcaaaaaaagaacttgacagcttctttaaaaagaggagtataaaggaacttgaataaaggatggcactgggcctgtctcaagcaagtggccattcttttgcacttggaaaaaaattaggcatgtgagcacagataagccctataagaatactctaaggactattcctggtgaccttgagattctctttcctgccttaaccattcctgaacattagagaaacaatatagattctgaacatggagttgccaacttatttcaactaggattttttttattgaaagtgaaacatccttaaattttttaacttccttttttctttagcattgcgaagactcccttgctctaacagtgctccaaaaaatgctattatgcaagcgtcacattcattcattacatgttgatggacaagagtttaaattctaccccaaatctaaatttactgtaaatgtatattttattcttacatgaaagctctgaatcttgtcaaggaaaggtattcaaatatctttctttctatccctgtgcaattaaagttattttttctaagtgaagtgaatatgctgctataaaagattgggctgatttactgtcttattctcccactccaactttaagatcactttttttttttttttgagatggattttcaccctgtagcccaggctggaaagcaatggtgtgatctcggctcactgcaacctccgcctcccaggttcaagcaattctctgcctcagcctcccgagtagctgggattataggcacctgccaccacgcacggctaatttttgtatttttagtagagatggggtttcactatcttggtcaggctggtctcgaactcctgacctcgtgatctgcccaccttggtctcccaaagtgctgggattgcaggcatgaggcaccaggcccagcctaagatcacacttttaaagtgaaaaaagaaaaaaaaaataaacctac

SEQ ID NO: 1881371 - DNA, 4001 bp, Homo sapiens
tttgagaccagcctggccaacatggtgaaaccccatctctactaaaaatacaaaaattagccaggtgtggtggttcacacctgtattcccagctactagagaggctgaggtgggaggatcacttgaatccgggaggttgaggttgcagtgagccaagcagagattacaacactacactccagcctgggcaacagagtgagactccatctcaaaaagtaaataaataaataaaaataataaataataaaaagtaaaattaaaagataaaaaattcaataaaatgaaataaaataaagacagcttttatgtactcctaaatcagcggtgggaaatagtttctacctgatgtgccaactgtgctggattgcagtgacagctggcggtctgtgttgagaagtattctgaggctgtgtcagggtcagcaggagagtatcagatctgccctgggcttggggctgggcatggtgtatatggacggtgtgtttattttctctgctaagcgtttatgcttagattctgccatcatgctttaggtgacttattccctcattctctggtctctttttctggccacacttcagcttatcaacatttaaaaagccatctggctgccatctcttctccctaattcatttctagggtggatttgaccaatctggctggcccagctgtggtctctcctagagcattgtttcctgcaatatcttcccaaatagaggaggaccatttttggatctgcagtctgctaataaaccttccaaattattaacgggtctcttaaaatctggagcccaagctaagtaagcactgtctttcagaagtactctcaatggttcggaggctagcaggactaataatacatcccttgatcctgttaatgcggcttaaaggttgtgttagctttttccctgtgtttgtaaagccgaagctgtagtgtaccccctgctgcggatggtgagggcaggagagccagatgcagtgggggcaagatctcctcctgtcccctccctgcctctgtgactcttggtggcttggggggcctggggcctgcaggggtgacatatggccccaccgaggtccaaaggccacaggtctcattctgtcacaatgaagttgtctgccctaaaggtccctggatcactgtcagtcttgacactggagcaacctgaaaaaaataaggacaatgtagacattttctcataaacctaatggcacacaattcaagacctgctctttattacacaaatgatggtcttcatttcctgcgtgtggtgtggtgtggtgtgtgtgtatgtgtgtgtcagaaattatcctttcttaaacaattgaggtagttcttctccctgccccgaataccctttgaaaagttggccaccctctgtagatccccttccttttgcggggaggagggagtcttaccaggctgtgaaagctggtctaaaaaccccagccttgtccaaggtgaggcccatcagaatttgacgtgcccccttggagggtcttgaagaagcaatctggcatctcaatgaggcccctgtggcacaggattgggccattaatagttaaagtagttaaatttctcacagcccaatgtattggaaaggcagcaatgttttcatttagaccttagggctggggtataatttaaggagagtggattttgatttaggaactcagttaacgagtgccagccttgtcaatttttttttattgtgtcgaaaagcacatcacataaaatttactatcttaaccgttttaaatgcacagttcaatgacgttaaatacattgataatgttgtgcaaccgtcaccaccatccatctccagaacacttttcatcttgtaggactggaactgcacccagtgaacaggaactccctgttcctcccccattccctggcaatcaccagtctactttctgtttccgtggttttggctcctctaggcatctcgtgtgagcggactcatacaatatttgtcctctgtgtctgctgtagtttagttagcgtaatgcttcagggttcatccgtgttgaggcgtgtgtcagaattcccttcctttttaaggcggagtaatatcccattgtatgcgtagaggccgcatcacgttcatccgctcctctggggagggacacttgggtggcttccgtggtgtggctcatgtgctgcggtcttgtcagtttttagccatggctcgggaaagtgacttggcccctcagtacctccgtttcctcatccattacatcggagcctgtcctctacgtgggactgaagtaagaatcgttgtttgtgacagtgcgtaactgcaacagtccatcgagttgaagttatttctgagagcactgggctagcatttcttagggtatctgctctgtggccattcagctttgccagcctgaagtgtaggaggaaggtgggagacggttcagagaaacgatacggagaggaccgggctgtggctgctccacagggtgttttgggtggggcagttcttcactgtggggactgtcccttatattgcagatgcttagtaccttgacccctgcccgttaaatgctggtagtactctccagtcattgtgttgacttaaaacgtatgcccataattttgtattccccttgtgggggatggtcctgcctccaggtgagaggcagggcctgagtgttctagaagggtctgtggaagtaagaagatgaagcacagaagagggaaagcataagagaatgacctggtgggctgatacatctgcagtgtgcatactaacagttggtgctcaggccctctgagtgtgcattagtcaggggcctccagatagaaccagctggagagtatatatacatatatatatgtatacatgtgtgtatgtgtatgtgtgtatatgcctatctatctgtgtgtctatctgtctgaggggagttattagggggattggctcacatcataatggaggttgggaagtcccatgctaggccatctacaagctggagatccagggaatccaggagcgttggccagtgtaagtctgaaagtctcagaaccagagaagccaatggtgcagctttcagtctaaggccaaaggcctgaaaactgaggggaggccgctggttcaagtcctagagtccaaaggctgggggacctgagttctgatgtctaagggcaggagaagaaggatgccccagctccaggaaagagagagaagcagtgtgcctttcctctgcctttgtgttctattcagggcctcagctgattggctggtgccaacccacatgagtgatcttccttactgggtccactggttcacatgccagtgccttccagaagcaccctcacagacagacctagaaataatgctttaccagagatctgggtgtccctgattccagtcaagttgatacctaaaatgaagcatcagcattgagcagagaggagcttgggtcacagaaggaccacagctctgggagggaggcagaggtctgtgttcaaataccaagcttcctcctaactagtgagggaggcttgagaaaatctcccacctctgggccccatctgtaaagtgagggctttggaaaaggtggtctttttcaactctgtggctccaggatttgaaggccgaacagcgtagatttcagtgagccgaaagtaagggctgctcgcctttgggattgggtggaaaaaggtaaaatctaacaaggaggctggagtgggaagagctgacctgctgaaattgcttcctagaccttctcattctctttcttttgatcgtttgttgaaatacagttcatttttgaatatgtaaaatagacacacagtatcatattcaaaacataaaagatattataagtagagtaaaaagtaaatttccccctccaccacttagctctccttcctcaaaggccacctcactttatcctcccaggaatactggactctcattttctttgaaccaggactcagaagattgtttcaaatgcagcttgcttgttgtgcctttgactttctggtc

SEQ ID NO: 1881372 - DNA, 4001 bp, Homo sapiens; identical to SEQ ID NO: 316373

SEQ ID NO: 1881373 - DNA, 4001 bp, Homo sapiens
caacagagactgttttaatcctaatcacccttcaagactagctgtattatctcactttacacctgacaaaaaatgaagcccactgtggtaatgccacttgcccaaagtcacacagcaggtcagcagaagaggtagcttttgaactaggttggggtcaacagtagtcactactggccactaccaaatatgaaatacaaacgtcacctcagaacagcagatagcctctctccttagcacactgctttgcagattcaagaagtccagaaggccagagtggatgaggtgaaatacagttttagtttttaagatcatgaacaaggggtcagtgaagaacccaggagaaattaaaagagcaaagtaaacctcaacaccaattagttcagatagacaaattccctaaaactctttcactatcctgatgtctcaagagccacgtttaaaattacaaaatctgtgtgggttatgtcaaaggcaatctgtagaaagggcaaagaatatgaattatctgaacccattgagttttttgtttgtttgtttgtttgtttgtttgttttgagacagaggctcgctgtgtcgcccaagctggagtgcagtggcgccatctcagctcactgggttcaagcgattcttctgccccagcttcctgagtagctgagattacaggcgcgcaccaccatgcccggctaatttttgtatttttaggagagacggggcttcaccacgttggtcaggctgatctggaactccggacctcgtgatccgcccgcctcggccttcgaaagtgctgggattacaggtgtgagccacggcgcccggccattttttttttaaagtaaggttgggaaaacaacaaatgatacctcctagggctgttattacaattaagacaaataccagagcactttggcaggtggaggcgagcggatcatttgaggtcaggagttcgaaaccagcctggccaacataatgaaacctcatctctactaaaaatacaaaaattagctgggagtggtaatcccagcctgtaatcccagctactcgggaggctgaggcaggagagtcgcttgagcctgggaggcagaggttgcagtgagccaagatcatgcccctgtaccccagcctgggtgacaaagcaagattctgtctcaaaaaaaaaaaaaaaaaaaaggacaaataccagaaagcccatcacagatgaaggactttgttccagttcgtgacacattgccaactttgaattacatccaagtccgtgggtcttctctctggggtcaattgatggcacgtgattacactgctcagggcccaaaggttggagctatgacttgaatgtttctagacaaggaattatttgacaaacacactttaaaaagtattcagagccatccaagtaagaggacattaataacgtagggttttgcctatggagagaaaagaaaacgcaaacagcacgttccaccttcgttctccctaaagtaatttatctccttcaaaagataaaaagtacgaacacatttgcccttgaagggcagagccccggaattcaggagctctctgaacactcctccccttctgatagggaccaaaccttctgctgagccttgtgtcacagtcagtccgcggcgccacaagcctcagtgtttacttctgccgcctgccagccgggcggggaaggggagtacccggccacccctcactttagctcctgcagctttccaaacaaaccagggcgggatgggagtgtcttcttggctgtggaaatcgatcctcctaccttgtcctgaagccacccgccgcctttcctcgtccctcccttcgcggtgattttccggtcccggcgcccggcgagggcgcgcggctggtgtccgccccgcccgaaaggtaggggttcggctgtgctcccgcctggtccccaacgcctcaccctccgggagacccgcagcctcccaccactttgcaccttcctcctcgaatttgggggcggccaccgtgcaactggcgccagccgcggagcaggaggagcttcccgcgactccggaggcgctcggcgcagtcgcccgggattggggctggcgggagcctgagactccgggcagggctgctccctcctctgctcccccgccagatccgcggggaaggaatcgtgcccgcgccgcccctggcccgcgccaccttcctttggtttctgccggcctcgggcttctgcggcccgatgtggcaggcgccgcgagagaggcagcagccggctggagcagcggcccctcaggtctcggagcccggtgcgcctctgcggtcgtcgctcctgggcctcggcgggtcactcttgccggccggcttcgctgcgggtttgcactgcccgggtgagggaaattgggggtgcgggaagaccggtctgggccggggtccgggcggcctggggtctgtgctgccccgaccctccggctttgcagcctctgaggctcagggttgggggtggggacacggagcgctgtttgcccctccacatatcctgccagcaccaaggaggtggcgtgcggaggcgtaaagggaccatgggcgctgggacccgcgagccagccggcgtgcgccgcagccaccgccgagagggcacccggggatcctggagccccagtgaagggcgggagggacgcgcagcctcgcgggtaagcccaggagccgtgggggccgagagaatctgctctgggaccctcttttgtcgaatcgccggcgaggttgtgcaattgggaagccaagaggagtgtccagctcctcgttcactattgttttcttgtaaaagggtctgtacgcgaggagggttgaggggtctggaaggttctggtctcttaccgtataaagtttttcgagaaaccctttttccctccacaatggaactagacctaacaaaacaagctccgaggcagtttaggagaaaggaggacggtgagtaaattgcagtgtttgggctgctgttaattttcaagataagggagaagcaacttgtcattttgaggccgccggctccggagatcccggcaatctcaagcctctttcttgtgtgctgttattttggcttaaaagaaaacctataaaaagcgacgcccagaaaccaaaaacaaacccaaagcaccttcttttaggatttttcagtagcgagggttggcggggacagtggggaggagcaggagggggagaagaggttgctgttgaaaggtaatgtttaaaaacagtgtgtgggggtagggatgaaaataacgtggtgactgctagtgtatcagaaatcacaccgagtctaaagtcgtaagtcccatttgccttacgaggaccagctgggtgctgtgagtaggtggatagttaaggaaactgtagatctgctgaaagctcctcgtggtctgtggtctcgtgtccacgctgacctttgaacctcgtaactcttcgggtctccagcggccacctcttttaggctagcccgaatgtttgactttccggtcctcaatcttcctcacctagctgcagaccataaaactgtctttttatttacagggagatgttaaatatttgggaacatctgctcaggctgccaggttattttccgtttgaaagcatgccgatttgacatttgcaagttggtttatgttgcttcctttttgtttcactaagaacgcttttcataccaagatctgcgaaaaacgatgcccttagactgttatttagtttattgtctctgagtaaggccaaattccacagagggtctttggataatggcaactttgcttataagaagataatttttctagaaagtgttgcattggtctggtttcctaagctgttcttgtggtcatgtagactgggaggggagatcttcattccttgtgatgtcgctttccttgaattgtatttttactatagttccacaatgtctcagtcccagattgcaccatatgttgtttacatggtgcagtaaaatgggactgcaattttgactacatttcagtagatttgtt

SEQ ID NO: 1881374 - DNA, 4001 bp, Homo sapiens
tgtttttattatatgcacattgcttagactcgcgtaaactctgtgaaagggaaataatcttgggactcccaaatcactaaggtaaagggaaaagttaaggtgggaactgcttagggcaaacctgcctcccattctattcaaagtcatccctctgctcacagagatagacgcacagctgattgcttcctttggaaaggccaatcagaaacccaaaagaatgcaaccctttgtgtcttatctacccataacctagaagcccctccttgcttccagttgtctcgcttttctggaccaaaccaatgtacattttacatatattgatgtctcatatctccctaaaatgtataaaaccaagctgtgtcctccaccacaccttgggcacatgtcaggacctcctgaggctgtgtcacaggcacgtgtccttaactgtggccaaataaacttcttaaattgattgagacctgtgtcaggtatttggggttcacagctccaaatgaatgttgcttttatcactctgattactgggcttaaaatcctccaatagctttgtgtccggaattggttccttcccgtgggttcttaatcgtctcgctgacttccagaatgaaactgcagaccctcgcggtaaagatggcgtgaccagaatttgttcctgcagatgttcaaatgtatctggggtttcttccttccggtgggttcgtggtctcgctgacttcaggagtgaagccgcagacttcacagtgagtgttacagctcttaaaggtggcccgtccggagttgtttgttcctgcctgtgggttcgtggtctcgctgacttcacgaatgaagctgcagacctttgcagtgagtgttacagccctcgaaggtggggcatacggagttgttcattcctcccagtgggttcgcagtctccctgacctcaggagtgaaactgcaaacctttgtggtgagtgttatagctcataaggatagtgcggacccaaacagtgaacagcagcaagagctactgcaaaaagcaaaagcacaaagcaaccacaacctggaaggagaccccaactaggggccactactggcgccggtgtccagcttttattcccttatttggccccaccctcatcctgctgattggtccattttacagagtgccaattggtccattttacagagtgctgattggtccctttttaaagagtgctgattggtgcatttacaaacgtttagctagacacagagcgctgattggtgcgtttttacagagtgccgattggtgtgtttacaaacctttagccagacacagagcactgattggtgcatttacaatcctttagctaacagaaaagttctccaagtccccacctgattagctagacacagagggctggctggtgtatttacaaacctttagctagacacagagcgctgattggtgcatttacaatcatttagctagacagagaagttctccaagtccccaaccgacccacccggcttcatctctcagctttacattgattttaggttaaggatagaacaaaacaaaacacccacaactccttaagggatggagagcctccaatggcctctccttgactcacctgaagccctgggctgcaggaacctcacctgtctctattcgttaaagtctcagctcaaacaccactgtcccagataggcctcgtgaccgcaggactagaccacggttctctgcggagggcgtcagctccgtgagccacccttccagcacccactgccatggcgaatatttgcttgtttggccatccagggactgtttgagccccaagaccgcagggctcggggtctgtctttgctcaggacgataacctggggactggacagtaggccctcaggccttgggaccgctcaaagtgaaccggggccgggtgggggacccagggctctgcagccttaagaacgcctgtgcccccgggacgcaggggtcaggcccggcccggcccagaccgcctctgcctcctcctccttttcctccccgcgcccgcttctcctctgacccctcctcccgctgctcctcctccgcctccttcccctgcccgcgcccgccctactgccccgtgccgagtttcctgtttaagatggcgtcccccgtagcagcgcaggccgggaagcttctgcgagccctagcgctgcggccccgcttcctggcggccgggtcccaggtgagcgtgggggcaggagctgcgggcgccagcagcggcgccggcctgcccgggcttccctcgccccctgctactcttggtctccgcctgaccccctgcgcggcccctcgggcgccccacttcgggaggtgacgcggcgccgggtccaggcgcagcagggaaccccgctccagtgtggggcaggggcggcgcggcggcagccccgggtgcctcggggtatgagcgacccaacgcactagagtctccgctgtctgcccgcgcagactcatggcgaaggcgctgaagcaggcgctggacgcaagtttaagaaaagtttcttggaccgggttttggagccctgaggttttattgtcagctctactaattctgcttttcaaacttctggcactaaccctgagcacgtttagaccacgtgataaacatgcctggaaacccgtttcagcccaactaggaactcaccccctagggtgaacttcctgcaggctacctgcttttgcagacttttaatgtgcctgagttggtcaaatccgtgggtcaaggagaaaaatgggaaacgatctttctcctctttccaatgaaaaatcagggctgtcactaaaacgcattagaccattgaccctgtccatgtcctccttgttgatggagaatgaaatcaaagagggtcagtggtgggctggatagcgattggaacttggcctctagcagatttttaccttctgcagatggcaagcgttaaaatagtcagaaggacttcaggaaagttttgagttggtgatgactcttgtagaaatcactcaaccactgaactggttagtctccgtagactatctctcttcccttttaaagaaagcacagtctgggattcagccacagcagagttaatgaccttgcctatttccccatttttaattgatgagaggcaaattatcactcatacaattttaaccaggatgtgcatagtatagttttttagaaaatttaaaaaatagtgattaatgattttttgagttcctctaaactttggttatgacatctgtgagctatttttacccctctcctttcatttcctgcctccccatttctctgttattgttaatgtaaatttaaaaggtgctaatacttactactgtaatattcttaataggtgcttgacagtatagtgaggtagcaaaaggaatggcagttttgtctaattaaaactcactaataactgttgtaatagagtaaggagaatagctctaggagatgaagtcctattcattatttaagtgttagaaaaaacaagaactagggtgcttaccatgagtgtagacttgaattgatgagaaacatggggcccagggcagtgaaaactcatgaattgtacagagaaactgaaaatgcagagtgtttagctgaaatatgtgaagcctacttccctaaccaagaaataagaggctgaacgcaacacaggagaaaatctggttggggagagatactcttggtttgtcaagaaaactgggtaaaaagatctgttagcacgccccatctggttactgtgatttacatatttgtggatgatgtgtttttctgtaaattcttagaaggtaaaagtaggtttttttaaagatagaaaggtacacagtgtccaagaactggaaatggacattagcaatcatttagtccagccagctcatttcatgggtagagaaattgaggcctaaagaagttcaatgacatattcaacgatacagtgagagtttgtggcattccagagtaaaggcttacctttacgtttccgttacaccatgctgtttcctggtgagt

SEQ ID NO: 1881375 - DNA, 4001 bp, Homo sapiens
aacagagaaggatttgtctttttcaaccttccagataatctgcactctcattccccatagttcattgtctccccatctgtttctaatgactggcacatgaagttcaataaatctttactgaatgaatgaatgacttgagcataatggagaagtcagtggcttggaaaacgtggaaatgaaatttgggtcataagtaaaacaactaagagctggtatcagaaagcctgagtgctaagttttccactactctgtgccaacaggtgatctttagtgattcttttgagatagctgagctccaacttccctatctgcataatgttggggggctacttggggggaaaaatgagatgcagtgtgtgaaagtgctacataaattttcaggattttgtagtggtttatgttgtgaatcacataagctgagtaagtaagagtgtatgtgtgcatctgtaaatgcacacacaaacacacttattacacacatacacatacatatggctagctaaagacaacgcaatctaaaagcagataagtgccaatatttcatatagggaagagagggataaaaatggagcaaaaggattaaagttcctgtcgactggtaaacagaattgaaacagggcctatcaaaaataatcacgtaaagagaaaacgtactcagcactacaatttgccaattgccctctgatcttgaattccagctaccagaaattcaatgacagcagcctgctcccccacaccttaatccttcccacatttgctcctgggctggatcactgcccttgggacatgtcatttctgtcttgcactgaaccaccgccaaatgtattggtaggagctttagtcctgtttccttccacaccgggtaaaaggttttgtcaataatttcaaaggtcttattatcagatgaccataatagtgtggtgctacctaaagataaatctgtgctttgttttacctaatgtctcactttctattaaaaaatcacaccacaattatcacaatttcacaacatggcatagtcaggttcatttaccctttacttgtttctgaggcaaatgttagaataacccaggacaagatttggaaattagcaagtttttaatggctttctatcggtcagtctacagggattcaactctatcactgctgggtaccttgtacaatgcctaattcacatacttcaaggtggtagcagaatgaacattggtttagaatcctattcagtacagactatcagtctaccgttagatgagatggcacgggaaagctggttgggtcatttgcttacaaatattcagctggaaatctaaggatgctgtaatttttaaagaagagaggcaggtatgcgcagtacttgccagtgtaggctccttctactcttcttacattcctgactcatctctgccatcttctagccacatgacctcaggcaaggtcattattctttccaagcctcagtttcctcctctgtaaaatggtaacagcaatcgtacccactgaagagagttgttatgagcattaaatgagatacaagtaggtaaagaacctagcacaatgcctaggttgaaaaatgttggtggttgttattacaaacatttctatcaataaagcaatgccacttgtcttgctccagtcccctgaaaggatagttgcatttaatattactccagaccctacaaacgtaactaaaaactatggggactcaatattttctttaacccaattgaagcatcagtgaaatgttttaaatgactccatttaaacattggtacatatttttttttaaaagaaaccactctaaaatggaggcctttcattgatagacacaatgcggttaaacccagtgaaattcgattacctcttgattgggtcgggcaagccaggaagagaattttacatttgaaatcaacaaattgaatttggtaccttttgcagcttcagcaattgctcgccgactagttcctcacaagatcagaggtggccccgtcaacatccaggttctgttgaatgacatgctctgtttagaaaggtttttccttgtttagattctgaatgaatatttgcttccaaagttattacagctacaaaacacatgctgactatacactttccccccaaaatacaaaatatatgaatttatacatatatataattgttgcttaaaagaacttatatataatatataaataaatatgtatgtatttatacacatatatgccttttgcttataagaacttataaagttcttatatataagctcttttaagcaacagttacatatacgtgtgtgtatatatagatacacaaatatatatacacatatgtatatacacgtgtgtttgtgtgtgtgtgtgtatatatatatattttacccagtatggctggtaggctaaatatccagctatacatcatcagtgttaataaggtcttttagtaattttttttgtcttatacagataagcacaattaacaatttctttaagtcaacatgctaagtcagcaatgggcaaaatattgctattcggctgactgcatatttttaaaaatattttattctctccctccccactgtctccaccacacacaaagattgcagacctagtttgtgcatgtcagctgaaggaacaggtgcattggagacatgctgatcctggggtgcagcctggcacctggaaactatcaagcgcagataattgcaacaggtgacatgtgtttttgttttacatatggtttattctaagaagatctttctgatctttgtctcaagattaaagccaaaatctataatttggccacctggccaagaagaccccacaatgggggcccccagctacttttccaccccatcctgcaccaccattccctttcccaccatcttccagttttccaggccacattttattcccccatgtgttacgccctttgcctatacaggagcttggtacgtgttctttcctgttttctaagctttatcgggacataattcacataccatacaatttgcccatttaaactgtacaattctcccatcctccacccagtcctaagcaaacactaacctgcttttgtctccatagatttacctattctaaacactttatagaaatggaatcatagaatatgtggtcttttgtgactagcttctttcactgagcataatgttttcaaggcttatccatattgtagcatgtatcagtactttacttttttgacaaataatattcttttgtatgaataaactacatcttatttattcattcgtcagttaatagacattgcagttgtttctcctgtttggctattatgaataatgctgctgtgaacactcttgtacaagattttgtgtagacaaatgttatcatttctcttgggtatgtatctaggagtggaattgctggaatggagtcatatgataactctatatttaaccacctgaaaaactgccagactgttttccaaagtggctgcatcattttacattctccccagcaaacatgaaagttccaatttctctgcatccttaccaacacttataattccaatcttatactctttctttttatagccaccctagtggatgtgaagtagtatctcattgtgctttctttcttaacttttcatctgggtaattcctattatctttaaatctccagcctaaaagtcacttccatagggaatcttaccttggctaccccaccctcaaactagcctcagattcctctcagaaaacccatcctttctctctaaactttaagttcaacatggacaggcaccattccatctcttctttattccccactctagccccagcatctagctatttatttatttatttatttatttatttatttatttatttatttgagacggagcttggctcttgttgtccaggctgaggtgcaatggcctggttttggctcgctgcaacctctgcctcccgggttcaagtgattctcctgcctcagcctcccgagtagctgggattacaggtgcccgccacc

SEQ ID NO: 1881376 - DNA, 4001 bp, Homo sapiens; identical to SEQ ID NO: 316392

SEQ ID NO: 1881377 - DNA, 4001 bp, Homo sapiens; identical to SEQ ID NO: 316395

SEQ ID NO: 1881378 - DNA, 4001 bp, Homo sapiens
cacaaatgttgtaaatgtggagaagcaaaagtaccactagatggagtaagaacaaaagacatgcacttgtctgtagttcaaggagtccccgcccttgcaaaagggatcttagtccccgcacggtggctcacgcctgtaatcccagcactttgggaggcagaagcgggcggatcacctgaggtcaggagttcgaggccagcctgcccaactttactgaaaatacaaaaaaatcagccgggtatggtggtgtgtgcctgtaaacccagctacttgggaggctgagagaaaatcgctagaaaccgaggaggcagaggttgcagtgagccaagatggggacactgcactccagctctgggtgacagagtgggactccgtctcaaaagaaagagaagaaaaagcgatcttagatcaccttgagtaaactgaggcttactgaagctgagctacttcctcaagactctagacaagttcttggcaaaatcattccttacttttccacaaaaccatgctgataggaaaaatatttttccttatttagagaacattaccagcaacagtggactctagaggtttttttacatttcttaattctaatagtgctaagaaatgtatctgctagacaattccaggggacctacttaggtaataggttaaaaagctacaaatatacatgttcataaatttactgacatggtcttgacttctgactttcaatcatcaggattcaggctatcaccctaaaggtgggcctttatatacacacccctggctgctctctctcttggcaactacccccagatgatcctaaggaattgaaggtatggatttgggacggaattaccttgtcgtgataagtgggcagaatggcctgtttgtttctttcaacctagtgggccattagcttattttcttaaaggaaatcagagccaattcttgtgggagactgccggctgggagggttgggggtggggggtgtggaataaatttcttttccgtctttcattatgcctagtgttccgttattggaacgctaagcttgtgggggttatatcctactgctcaaggtcatcgccaaggtctaatttttcaaaaaagaaacttctaacctctggcataaaccgatgaccattaaaggaacacaatttccaatgttcatttagatcttctaattaaatattcattaaatgttaaatgatctctcaaaaaaaaatgactgttctcccacaccccgttgaggggactggtcgagatctaccttgggagaagcaaaaacctcaacaaaatctgcagagcaggaactaagttgtaatacaaccataaaaggcaacaaaaagcggaagacgggagaacccacgcaggaacggctccaggcaaccccggctcactgcccattcattttggccgactttggaggtgccttcacgtctcctgccaatttgcagcacactggcccagtcagtcaggtttgggggttcacaagcccccattgccggcgaggggtgacggatgcgcacgatcggcgttccccccaccaacaggaaagcgaactgcatgtgtgagccgagtcctgggtgcacgtcccacagctcagggaatcgcgccgcgcgcggggactcgctccgttcctcttcctgcggcctgaaaggcctgaacctcgccctcgcccccgagagacccgcggctgacagagcccaactcttcgcggtggcagtgggtgcctccggagaagccccgggccgaccgcggcctccaggcggggttcgggggctgggcaggcgacccgccgcaggtccccgggaggggcgaacgggccagcagctgacattttttgtttgctctagaatgaacggtggaaggcggcaggccgaggcttttccgcccgctgaaagtcagcgagaaaaacagcgcgcggggagcaaaagcacggcgcctacgcccttctcagttagggttagacaaaaaatggccaccacccctcccaggcccaccctccgcaacccggtgcgctgccgggcgagtcggcttataaagggagcggccgccgaccgcacggattggccaagctgactctcgcggctctcgtgagagtcactctctcgggcgggctggttggggggaacgggaaattaaagttccatttccggccatgaggaaggacgttgcccttccgcacgtccgggaaaggctttgcgtctttacttccgaccttctttaaaggtgaaactaacttgaggtatcagagggccttttttctatcctctgcagaccagacgcggttcacctcgactaccttaaaaatggaattcacaggaagattttagggcctaagacacagaacactaattcctagttttgatcatcacattttttggagaactttgtgaaaatagattcccaggcagcactgactacagcagaatcttgtctcggctcagtgggatgcgtccgagttcctaccctgcccccttctccttagaatgccttctccagcctctccttgagcagaggatggctttaatcaagtgtaactactacattattaatcttaaggactgaatctcccttttattaggaaagaaaggcgtttcaatcattgactttgctttaaagtagtgctgtgtcttgatgaggtaaaaagaggggagtaatccaccataaattgtaacgatttttttttttgagacggagtcttgctctttcgcccaggctggatggagtctagtggcgtgatctcggctcactgcaacctctgcctcccgggttcaagcgattctcgtgtctcagcctcctgagtagctgggattacaggcgcctgccaccacgcccagctagtttttgtgtttttagtagagacgggggtttcaccatgttgcccaggctggtctcgaacgccagggctcaagtgatccacccgcttcggcctcccaaagtgctgggattacaggtatgagccaccgcacccggccgcgaatttttataatggccagtatagtgcagttttacatataaatgacaggatgatcttaaaagttttactcgtattcagttagataaactccgtggagttgtcgctgtcggtcctcgatctgaaagaaaagtaaaatatctccctctccatctctctccctccttctctctctcccatcccctttttctttcatagcatctgccaggttgtaaagttttttacggacagaatctgactcctgtttttagcactattgcacttagcacagtaccttacatagagtagatgctaaatgctttgagttatatgtcaacactaccaccattctcttagcatcccacattatctcaaacccttctttccccttcatatctaagtaggcactaaatcttgtcagttttcataatttctttttttaaattcctattgcttataatcttgagtacaagacttggcactttatatgtggactagtaactttctaactgatcaccaaatctccagggccttcctcattcaatttattctccaaactatcacattcatcataacatagtttccttatggctcctgcttttaaatctttaatttctctcctttgcatattggatatttagcactttaagcctttcagtccctggccttcacttaaccttgctagtcatagcgcttgttctgctctatatgagctcttgacttgaacaaaatcagtctaaacttaggcgtggtggtgcatacctgtggattcagttacttgggaggctgagggcagagcccaggagttggaggctgcagtgagctatgattgcactactgcactccagcctgggacacagggcaagactctgcctctaaaactaaataaatgaataaatacatacataaacaaaaattttaaaaacaaaatcagtctattaaacatgccctgaatatgctttgttcattctcatctttagcaacttgttcattttagtatgcttgcctggatatctgcgctccatcccaatgccaccccttccatgatggcatacct

SEQ ID NO: 1881379 - DNA, 4001 bp, Homo sapiens; identical to SEQ ID NO: 316409

SEQ ID NO: 1881380 - DNA, 4001 bp, Homo sapiens
ccagagcaaagcggcctgagcaggcagaacaaagtccaacactaagcttcccagacttgaaccaccaatgttaacaagcttcatcccaattttccagcccacagaagaaacagtgagtagtaagaggaaaaggctgctaaaaggggagtcgcacagcaggaggaagtaacaattatccctaagaggaaaagaagctgttcaagagcagtcccaggaacataacacagaggccagtctgtgagctattcaaggcaggctgcctagttctccaggcagcttggggccagaggcctaaccctcttacacagagggcttgacctgagttgcctggcgggggggaaaaatcacagcccagagaagactgtttaaagaggaagggagccatgtgacccactggggggacattcccaccccaattatttaaaagtaatatttaacatttaaaaggttttgaagctaaaaaggccacgctgcaactttgtggaatacttagctctgtggaattatttcttccctgtgggtgctgggtgttgattttacgctaaaaaaaaattgtctttggagtcaatgagcacacagtatttgctcacaaagaggcaaagtaaatttctaaactttcggtgtcaagaaattgaggtgttgcccactagtctcacccatctgtgcttctacccatcagtatctctctcttttctgcctgtcctactcatcttgtctccagtaactttcattccaattttctttgataatgatgagaaatcttccactgaatgcttactatacgccaggcactgtctaaatgttgaaacacagctacttcattcaccctcaaagcaatccaaagaggtaggtaaggctaaaggttcaagtagttagaggttaagagacttgcccaaggtaacacaggtattaaacagagccacgtggaccaaaatgcaggcaacacaagcccagacagtctgattccagcccctcatttccactttctctctcctctctggtgactggcttccaaaacgcctgaagcattaaatccttgttggacatctctgagcccaaagctggaaaactctcagcatctaggcccccacttgccttgggaatgacaagccctcaccctgatctgccatctcagctgaacacttcctgtctcctcaaggaaacttagtatctacctttctcttcctctcacttcccaaactgctcagaaaacggcgggggggaagaaaacccacctgggggtctcagagccttggtcggcacgtggagaggtaacgtgaatttcccctatattcaagagaaaaggaagaaggtctgggagctcacctgaaatgccaggctcacttttagtaactgctggcatccagtgcggcaggggccgagcgctccagtgctgggagctgaaagaacagtcacccctgcccaggaaataaccactgagccaaccatcatgccctgattaccgtcctcagggaaagcctaccggtccctctaaagcaccctcgtcccattctcaaaccccctgtggaaatcagaagccaaacctagctttacaatgtcaggtctcttcgctagagctctggtcacgcccctcttcctggagtactccaatcacacttggcgcccagaaactgccgctgccgctgaccttgggcagactgcgccctccctctagcctcggctccccctccgctcagaggcccgggatggacgcgtgcggccggtgccagcgagcctcagggaaggctgcgcccagccagcttcctggtgccgctcacgtgcgcggcggcggagggccgggcccttaaacggcccccgtcctgggctaaacttcggtgctagcagagggcggaaggactatggagggtggggggccgccgcctcccactttcggattccagcccctgctcaccccgggccttgcctatttactcagagcctttctcttcgcccacctcctcacggagccccacgcacgtctgtaacttaaaggacgctaaagtttgcagcccaggctgcgaggcgcggccttgggggacgggggcggagttaaaacgcgactcgcgcctctttccctcacctccacggccccggggcatgccctgcaccggtggccgcggaagtgggctgcccggaagagtaggggctgccccaaggtcgcatccaggccctcggacctggccgaggccagctgtgggcaagacaagatgcaaagagcggcccgggccgcgggggtcacggaggggacacggagagtcctgaggtcgcgccagggcggacagggggagtcccagacctacgccccagtgggtatgcctctcctctggcccggccctcacctcagcagccgcccgctgcggacgccgatccgcgcaggcggctcagggttcggttacggagcctgcgcgcgcccgccgcgcacgctcgctccgccccctctcgcggcgggacatggccgtggccgtgggcgcgtgcgcgcgggacccggagggcggaggcctgccccgccccgtctccatggcaacgggcgtgtgcctagccccagcgctggctgcggcggaacccacggcgtaccttcccgcctccaacaaactatccggttgctgaggttgatttagcaacaccccagggcatctgggttggcaggagcaccacagtgacagcctggcccaggctcgggtacgggaggcagcccagtggcccgcagtagagggccaggctggggaccagggagctggggctgaggagaatttgtacagcctagggaggcgcagcacagcagtatcagcctctggcatttgtaccacctttagtcctgccactttctctcactgtggcttcgcaacagacttgggaaccaagaaaggcataggtgaggaagctgaagcccagtctgggctcgcggaagaaactggtggatccaacttctgcatagcgcaaatatctgcttcctgcctccacccacccattcccacttccgtgagtatattcatccatccaacacttattattactccttgccaggacagttctaggggctggggatagagtgaacaaaaccaaggttctgccctcctggagttcacgttccatgggaatgcccttcttccaggctcctccctcagtgcccaggttgtggctgtgggaggctggtctacctttgtggtttagcggtaacttacgtgattcccacgtcaagtgtaagctccttgatgattggttcaatcttcacctcaaatttctgaggacctacaaactacaaagcactcttctaggggcccaaagataaaacgctcccctcgtgaaaatcccggacttttggtgggaggtggggaaggtgacaactatgctcataagcttggctacaagaccggcgaggccaagagctactttggtatcctgacaaggactgatgtttgggagggggatccagcagatgggaacaccacgaaggtggtggtgggaaaagtcagcagtcacagggtggttcaccttgtggatcccactactgcaccagcaaagagcaggctgggcacacagagacagtcaaaatcccagcttcctttccctctgcttcacattcttccttccgcaggcaggggagtttgaaccttatccacagggccaagcctgtcccagccctctaggcaaactggcagaacaggcagctggcccctcacaggcactccgggctgggccagtgcaggtcgcagcagttgttttacctatgaacatcaagcacatggtcaaaccctcagcttaggtgccccaggcaggcgggctacacacttggtagcatttcctttgacacaaggagcagccatggcccgggctcagagactgacagcctctgcctgcagggtctgcgtggtcatttctcctgcttctcagaaggtggtgagcttttcccaggaaaccattataaggaagtgcccattctttatcttgttctctctgctcacttcccttagcctgattggggaactctagagccccacatc

SEQ ID NO: 1881381 - DNA, 4001 bp, Homo sapiens
tgataggcccaaatttccagactgataaagagtagtggaggtgggaggctactaaagacccaggaacttcatgtggaatttcagctttgcttcattccagtttcatttatttagtggatatttatccttcctggactaggctttgggattacaacccagaactaacaagcaagaacttttccctctccaaaattttggtctgaagggaaagaaacattgactaatgagttttaagagtgacaaatattaccacaaggaagtacaaggttgggaactgtaggaacatgtaacaaagattatttatccaatcaatggaaatgagaaagcctcctcgaagttaatcccatttttgaagaataaatagatattggactggtgttctgggttggtagccacttgtataaagaccccaagatgttggaagaactcaaagctgacaagtattgctagaatttagaaagttatgagccagagatctctaagggcaataggaatccattaaaagttttaacactggtgtggtgttaatcagattggcattaaaacacacacacatgccgggcacagtggctcacgcctgtaatcccaacactttgggaggccaaggcaggcggacctcttgagctcagaagttcaagaccagcctggaaaacatagtgagaccccatgtctacaaatacaaaaaaattggtctggcacagtggcacacacctgtagtcccaggacttgggagtctgaggagaaaggatcacttgagcctgggaggttgaggctgcagtgagccaagatcgcgccagtgcactccagtctgggtgacagagtgagaccgtgtctcattaaaaaaaaaaaaaacacacacacacatacacactgtctctgttatgtgcagaatgattagaggaagagaaaatgaggagctaagtttcctcgccacttactaacgtttacgtagtgctgttaggtattattctaattgttatccccattttacagatgaaacagacacaggttagcttgcctaaggtcgcacagatagtagttatagagggtcaaaggcagggagaccacctgccgagttcctgctcttcactattatgcgtcctgtgtctgctacttctgcagtggccctggtgagagacaatgaggactgtgaccaagagggaatgcaaagaggacaggtgggagggaaatagggaaatttgtgaggtagaatgtcaggacttcaggtattgaatggatggtgggagaagggatttaggatgatcccaggtttttgacttcactgtgtgcctgttagtgctacttttctatttattgagattgagatgtccaaaggagcaacaggctttgtcagatgggagatagggacagaagatgagttctaaagtaatgactgcagtcaagtgcccccccacatccttaaaagccacaggaatctctaccctgccacttacagactgtctcagcttcagtctctgaacggagataataataaaatccacatcagcggattgttttgaggattaaacacaaaaagttgtaaagggctttgcattgagtccaacacataataattaatattcagtaaatattaatgtcagagttgttttactaatctgtcttccactttcctttgatgtggactttgccttctctcttaatctgcacaggttgccttttcctgccttttctatcaggtgacactccacttattcctcaagacccacctcaaaaatcccctcttttctttcctagaagtagttgaccttctgcctactagccatattattttatgcatattgctgctgtcacccttaatacgttatttatatgccttatgctagaaaacatttaaggcagttcactgtaatgagaaaatataaaaattaaacggattagaaaacaagacaaaaagaacattgagattaggaaaaataaagggaagtcagaagtggggtgatcctcaaaatgcaggaggataaagtctagtacattaattaaccaagctgtaagtgacctgtttctccagtaggccattctgagaggcaggacctcgtctgctctgtgatctagtgttcatgagagaaggcaatcttagatgcccaggaaaagcactttttttttctgatttgaactagaggaaaagtttatcattgaggtctttataaatgaaagccagtgtcatatccttaacctcttttcagcactgaagatcatagagctgttttgtagcacatcccttgctaggtaaaagaaggctaaatcacaatttagaaagacattctaaagccagtagaggctgggtgtggtagctcacacctgtaatcaatcttagcactttgggatgctaaggcaggaggatcacgtgagcccaggagtttgcgaccatcctaagcaacacagcaagacatgatctatactacagaatttttcaaattagccaggcgtgtgtggtggtgtgcacctgtagtctcagctactcatctctactaaaaattttcttaaattagccaggtggagtggaacacacctgtaggtagtcccagctactcaggaggctgaggcaggaggatcacttgagcccaggagtttgaggttgcaacgagccatgattgcaccactgcactccagcctgtcaacagtgctagaccctgtctaaaaataaataaataaaatcaatggacaatgtggtttaggtgggtagtgggtagctctgctgatctggcttgattcaaatcagggttttttgattgaatatctagaccatagaggaaagacaaactacaacttcttcagacaatcctctataaacatggtttttgtcagctgagcttttgaaaaaatcaagctgaaatgagtggtatgtgtgatccgtcaacaagtatttattgcataccttctaggcacaatgcgaggtcctggctactttgcagtgaactagacagaggagggccctggcccctgctttggggaaagaagccatagtgtgcaatcaaataagtaaataagataatttctgaaaaggaatgtaattaagttctgagaatgaacttgatggaatgaggacagagagtaatgggggagggcagtgatacctgacaggttcaaccacatgaagagcccaggaaagtattccagatagagacaacaactagtgcaaaggcccgaggtgaaaacaagctctgcaccctttagaggaaataaggaaagccactgggctggatctagggacaggactgcatccaggtgggccaagaggagtacgatgcaaaaggaggtaaaagggagctcaggaggagccttgcaggctttggaaaggagactgaattgtcctttgtgggcatttagaaatgataggaggattgtaagcaggagagttagtgatccaattcatcttttagatcattctgagttgcataaaaaatggattctaggaaggcaagaatggaaacagggagtccaatgcaaaatattccagatgagagaaatgtgggcttggattagagcgatgttagtgtggaagatagaagtggatgctcttgatatctcattcatcctcctggaaagctcttggaggagtaccagtacctgtccatggagcttacataagagccaatgtcttttacaaatttgatgtgcctgtatcactgtcccttcatgtaatccattcctctgggtctgcgtatccagttggactgggagctcttgaagaagcagccctttatttcctgcactcagtttgaggaactgccctgctttagagtagctatagctactagactggatattttcaccactactgtcatgttataagtgaaaaagtagaggtctttggaagttagtgacttgcagtcacacaggtagtttgtgacaaagccattttctctccttcccttgttgccaactctagcagtctggctagctgaaaaacagtgtggatgttgtcactgttaatttaaactatgttaactgtattttgtatgtgttaatttaaaggatgc

SEQ ID NO: 1881382 - DNA, 4001 bp, Homo sapiens
gagagacctatatttgcccgggaaagatctcttgaagagtatacattatttttgtcttcctggttttatctatacatttccagggcaaagacaaattaatagggcggccgttctgggacctgaggagtgtctcagccctgtacgcgcctctcccacgatatgcataatggcggtgggggcgggggtgtcctccttaagggcaacccaggcacgtcccaaacttccattcgtggggtggccgtggtggttaagagagctgccagatggtcggaccagcggaggccccaagaagagccagagcgccctgtattcccgacacgcgccacaagtggtttaggagcggagggaggagcgctgcggcacgggtcgggccggtcgggccgggcaaagaaggccgagacgtgctcctggaagactcgccctccggtcccggtgtcactcgttccccattctttcctcttctccaactagagtaatgacgcccaaacccgcacctatgcgcgcaggcaatcgggtgggtggacgcgcggccaccaaacccacagcaccgtcaccaaccctgggagggcacggccgggattaggaggagggggagcgcccacacctggggaggcaggtgcggaggcggccggcccggggacctcgagtgcgtaggactcggggtcggggtcggggtcggcaagccgggcgctgtgagcgcgtcggagcgctggcccggagcctggcagggggcgtctgtaccggctgggcagcccggggcggtggcgatggctggcggcggcggcggggtgtgcgccaggaggccatttcctcgctgcgcccctggcggagccgggtttgcctgctcttggccgccgccgccaccgccgcgcaagtcggacagccgtgagggctggaggggaaaccaggtcaccggttcgcagacgcggcgcggagcaggcgccccgggcccggagtaagacagcgcccgggaagcgggccggggcgggccgggcacgcgggggacccggagaggcggggactctggtgccccagccgcagtagcttcctacgcctataaaagtggagagaccggggaggtgcggcgcggccctggctgcggccgcctctcttcgcccaaggagttgacattttgcaggactcgcgcgacgcccagtcgccggcgctccccgggaccccgccgccgggaggagggggcggaggagggtggagactgcggggcttggccaaggaaggcgcacatcctcgggcgggcggccgtgacgcggcggggattaactttgcatgaataatgtgagtgcgcttggaaaagagacctcctgctccgcgggctcggggcaagagcccgcaggctaccttccccgggcaggggcgctcaacccaaccggctccagggcactggtaatttggctagaggaccgcgcggaggcagcggggtgagaggaggagggggcgacagttccaactgtccacagggtgggcgggatggtgacggagcgtcgcaagaacccggaggggtgcgggcggctaagccgagcgcgcgcgggcgggcaggcgggtgagcgtgggtggtgggggtgtcatcagcctgattacctgcctccgcggggcttctgcgccccggatctgggaggaggtgccctctcgtgttcgggcaccgcgcggcggcaggctgggagctacggagtggacagtggtggaacagggtggccgggctctgttccaatcgcagcggctctgttcctcaaaccccaagcccagctgttgacatgttccttgtgaaatggagtttggcatcctcagcgccgaacccagtggaagtttccatgatgaggaagttgtgtgacatgggggttcggaaaaggttggcaggccaggggggagggttaaagggactgtgggtctcccatcccccctttttcgcctgccccggaactcccgggcttggaaaggagaattatcctggatgttggcgtgcgccgtggccggtgcctggcgactgggcttctctccgcctcctgggggcttggcggggatttcgctagcctcctgggtcgcgctccttcgctttgcttctcttggcgcagcatcttcctctgggtctcctcgagttggttgtgataccaattgtgccaactgtgtgacctccaccccctcggagaaggactcatttgggggaattttcattcttagtggattttgcccttcttagcggcagttgtcactttgggggaggatttcccaatgaccattgtgggattattattagtgttaattcttaagccttcttatttattttaaggagggggagggagaaaatgagatgaattttttttaaatgtacaagtttccccaaatggaaaattttaaaagaaggatctagaaacataacaattcataaagtgagtcaaagaaaggaaagagtttgcatgaacagccaagttcagattctccattctcctttgtccacataaatttagaatttttgaagattcaaacactgtgtaatcagtaaatatatttgaaataccttcttcctcagcacattattggtcttgggtactagtgagattcagttttaaagacctgtgtggaagttcaagaaattaagcattccttgcacagtgtattaatatcaagcacagcagtttatataatgataaatgtattaggtaatgtagacctgttgggcaatcttcacattatttggctttagtttagtatgcttatttaaattgtaagaatgtatagcatgcaatgcactgcaaagaaataaaaattgcattttaacgtgttcatgattcattctgaatattcagtgactgacctgctccccaattcacttctgcttaattctttctaattccgaaatcagtcagaggctaggaaacaatgaaaaacgtgtttcagtgcaaagtattttaagcagttgatgtttttaggatgttttcatgccaggtggctaagtgttttaattgagtcaaacagaaatccagtaccaagtgatttgtttggagtgttttatacaaagacattggtgaacgatcatttataatttgagcatgttaaagaaatactaacagaatctatttttacctgatctcagaggtttattatatattggaagtgagaccatctgctagtaaatacagtttggctttattttatagccagtgaaaaataaataatactgagtatagctacagaactggttttttaaagtgaaataattcctgttggcattacaatgcaaaggtatacttttattgacattggaatattgttacataaagcaactgacattatgtagaggaatgaatattccatgtatctcctttcagtttctttgtagtaaattctgccataattagagatgaattaagacaactttttaatccattatctttgggaaaggtgatttcttaaaatcgccttaaaagcagagaaagctgtggattcctttcctctcctggggtttttgcagttgtttaaagcatgagttgtgtggagccacaaatggtattgcatgtttctttttttagtaagcccatctttttgatggaaatcagagtaaaggtgattggtttcttcgccctggtcttctcattctagtgtaagattacgtgtcaccttcttagaaagcccttccctgaccacttgagcaaaggcggtccctcattccttttcagacccatcacactggtttttctctttgtttgtttgttttgttcttctttttctttcctttattgtatttgcaatctgaattgttcatttcaattgatgcttgttgatcgcctgtatccttgcctagaatatcgaatccatgagcacaggactcttgactgcctcactcactcttattttccagcatctagaacaatacttggcacacagtaggtgctggataactctttggtgaataaattaatgattgtgtccaaatattatgttctcaaaaatacctgactacacatcctaagtgggtgccagttgggcat

SEQ ID NO: 1881383 - DNA, 4001 bp, Homo sapiens
gagatgttgcctaacctcagatccaattctctgtaaagcagtagtcaagatcacctggactgtgaagacggtcagggacagaatcccagctaaggaaaaaggataaaatgaaaatcaagataaacatttaagaacgtgaactagggaggaataaaagcactgctgggtaagagtcaagccccagctcaagccttaatttgtggtggaaccaatctgtctggtttcgcgagacaccaggctacccaagatcaagagagggagaaagctagtgctatgtctgaatactagaggagcaagtacaacaaatggaaaatgggatcaagtatgagtgagagttgctaagatgcctggtagggatgcaaaggggtagagagcctggggagagagggtgagggagggaagcactggtttctcaagcaaaagctaaaatttttctattaagatttaacctgatgctacactttggtggtgcagcaagggtctcaaatggtataaaactcaggtgatcatgctttatgtctgtctctagaaaaatgctccaaaaatgataagtagtgataatccgcagtctcgttgcataaaatcagccccaggtgaatgactaagctccatttccctaccccacccttattacaataacctcgacaccaactctagtccgtgggaagataaactaatcggagtcgcccctcaaatcttacagctgctcactcccctgcagggcaacgcccagggaccaagttagccccttaagcctaggcaaaagaatcccgcccataatcgagaagcgactcgacatggaggcgatgacgagatcacgcgaggaggaaaggagggagggcttcttccaggcccagggcggtccttacaagacgggaggcagcagagaactcccataaaggtattgcggcactcccctccccctgcccagaagggtgcggccttctctccacctcctccaccgcagctccctcaggattgcagctcgcgccggtttttggagaacaagcgcctcccacccacaaaccagccggaccgacccccgctcctcccccacccccacgagtgcctgtagcaggtcgggcttgtctcgcccttcaggcggtgggaacccggggcggagccgcggccgccgccatccagaagtctcggccggcagcccgcccccgcctccagcgcgcgcttcctgccacgttgcgcaggggcgcggggccagacactgcggcgctcggcctcggggaggaccgtaccaacgcccgcctccccgccacccccgcgccccgcgcagtggtttcgctcatgtgagactcgagccagtagcaagggcccggtcccacagcttcgacagccaatcaggtgtcgaagacaagcaggcggcgggtaaaccgactcccccgaaggaaggggagggtgggaggacgcccgcgccagagccgatttcactgaccctcccctcccgccgcaggaggccggccgcgcccgcacacccagcatctctacaccccacctacctacccgccccacccagggggcaacgcgagagtcgctaagcggctgcgtactcccgacggcgtaactgacaggagctttactccaaccagaatacgccatttgtgttttcacacacggcgggaggagaaacggccaatcggcgacaagaggctagccggaagcgctcctccctctgcgagagcaatggctccgtccggtttcgagcattttccgctcccttctccctccccctccggttgccgcagggcgggcctccctcccgcctgcatccagccacccctttccctcccaacgtaacaaacattatgttcccgacttcccacgggaaaggcaacccccgcaagccaccagacggcccccctagccacccatccccccagtgtaccgcacctcccctcccaccagagttccgctcccctacctagccgaggctctctgaggagccggagcgccgaagcacagcctcttctctaggcggccccggcggcttccgctgattggcggcgagtgggccaatgggtgcggggcggtgggcggagaggccaatggcgcggcgggagggggcgtgtcccgggtgcccctggcgccggcgctgggaatccccgtgcggtcagtggcgtttccgctcgggcagcgggctgagtgagctgccgccgccgccgccgccgccgccgccgccgccgctgccgggggaggggcggccgccgcccgcctgcgctcagagactcacgcagccccagtcccgccagtccgccaacacagtagtgccggcccccctctttccctggccctgccccccctccccgcctttggctcgctccgcctttctgccccccacccccacctcacgggtacgggccattcccggccaggaaacgccgtggcgccgcgttgggcctaactcgagtcctgccgcctcccgggagtgccgtgcgccgcagcccgggcccaggccccggcagcgcctgggacaaggtaagggtccgacagaaaagagaccgaacctcacgatcgggccccaggggagggaagggtcacctcctccgtctccccgcgctcgctctccttgggtcgtgggcctggccctccccaagctcttaggaggatgctgccacttctcacccccctcgccgccttgcacacaccgttgcaacaccccattttcccagggagagagatccccctctaatctaggcgacccaactccccctttcatgtttttcctgggtcaggacgcttcccctcccccaacgcctcttcaccccctttcctgggaactgcctactccacgtttacctttcccttgaggagaggcctcttgctgccctccgctcgaaatacacaggcatactttttttctctccccgatcccccactccctacccccgttctcgcggccttgtgacagacaactctgatcgctctgggggccgcgatctcccctccgtaatcttcctggacgccttccctctcgttttctggcttcccacctcagatggctgcttcccaaaggcattaccttcgccacccccaccacacgttctctggctccccgtggcgtgtgccacagcgtgtctgagatagcctcgttgaatgtgtagggttcgagcctggagttgagccagattgtgtcgttttacttgccttgggcgtggagaacgatcttgtgagaatatcttcaaaggcagaaaaatattccctttatgaattctctttccctctgcgtgtaagtcgggaatgtgaagaggagtgtaggaaagagccctggttcaagtaggtaaatcgcatgagagggaaagttaaactgttgggaaagccccttctatgctaattgattctatagagtccttgcttgtctcacttcttgggcgtcagtggtctttctcttggatatggatgctgcagtcagctctgctggtctgggtcaggggtgcgtgtatgacctgcattttctgctttctcatgttacttgtgcaatgtattcaccggtaactcatttctttcccagacctctgggttccactgggctttgtctatatttaagttcatttctccagtttccttcctgcacataggtactgaacgaatccccaagttctgtgctaattaccttcatcagttgactaaacaagtttttagatgacatatttgtgaccaaggtcatatttacatttctttgttggacagatgttacatagctatacttgtgattggggaggatccagctgagtggagtgtgctgagctttttaggagagtgtgtactccctatttgaaattattttttggttgttaattttatattattaatgtttttaggtcacagaaagttctaagtggtaattttagatgtgtgggatctgagctaggactaaagcagagaatacccacgtaatcagaggtttctgggctccatagaggacgtagggcttttttttttctattggatttcttccagttttctcaggatcattagttctcttctgtagc

SEQ ID NO: 1881384 - DNA, 4001 bp, Homo sapiens
attatatgaactaaatgtattgtttcttccctcactactgaaaatctattcaatatatggagttacaattcaaagtattttacaacccagaaaatatggccattccgtatgtggtgtgtatttcagaggtgctctgcaagctccatgaggacaggcgtgaagttcaggctacatgcctggtacgtaatagacgctctgacagacatttgctgaatgaataagttagtcactacggcgtttgtgggctttaaaacacaagtaaatgcgcttctatcgccaaaacctcacagcttcccttctgcaaggtggcgtacaaggcccacgaaatagtcggccgccgcaggtgcgcagcctgtccagcctgtccggctcggggcaggcgacctcgtctggtggcagtgggggaggcagccgtttgcttcctcacagggtgtgccggaatcagaggctggaggcgtctggggagtaggcaaataaacaaagccaaccgcaccgaaacgggtcgttccgtttcacatcctccctcgggtgtctgggtcttctcggaacaaagtgaccctccatctgtccgcaggcaggtggagcccgtcccacgcggcacgcgccttccttcctcacagccgcgtgtagacgcggaccctcagggacactgcggacgcgagaaaggacacgccccctcgcgggagcataagtccaccgcacagaactcgcgcgcctcccctcgaacgaacgcgcacgcgcgcgcagggggcgggtcttcttcccgacacccactgagcgcccggcctcctcaccccaccccaccgaactccggccgcccaggctccgcctccgcgacgggccgtcgggaggaggcgaccggaagccacttaaagcagagatcgaggtgacaggcgagctggctggactcggagcgcggtcgaggctttctgcgttcgcggcggcggaatggcccgtgcgcggctcgccgcgtcgcggctctgtggtccctagacgtcggctcccgccctcggcgctgatctccggcgcgggcactgctttccactcggctcctgtcgtccgttctctcaggctcccgttcaggtaaagggctccgggagggcactgaggggctgaagaaccctagcggggagtgcgagcgccggcctcgcggctccggccccggccccggccccgcgccggcagtgtgcggggctctcgcggatcggggtgattgattttgagactgccctttgtaccgaattcactcgggtcccgtcagcatgaagatggaattggtttacacttcttaggcacttagagcctgtggcaggtgtatacatcagaccgaggcgccgaaggatttagttggggtcgcaggcgcctgccccttccccgttcgtcagggtgggggcgcgtctatgcggcctcccccgcgggccgaccccgggtgctctgaggcgcctaggagcccttcccagaccccgggggggagggcacggcagctacgggagccttccggctaccccgcgtttcgggctgcagcccagaagtttggaagatgttttcacattaactttgagagcgcacaagtcttcgtcttcctccccgccgccgcgggaagcgctcgccgcctttcccccgcgcttcgcggctcagttctgcgagcccccaagacccgttggacgctcctcgggaggtgagctgagggggtaaagaagaattagagagagaaggcgccgcgagtagtctctgggatgcagggaggccggggcgggtcgttggtccgaaggaggctggacaggagttggggggcgcccaggcgcctgctgaggggaaggcgggggcggggacgcccgggaacacccggaattgcagagccgggcggcgcctcagctgcactgcgcggagttggcgcggcccgggaccaggagctgagcaaaccgccgcggccaacaggaggcgtcactcggacccgggctcggcgccggggtgtcgcgcggcggcgggcgggcaggctttggagcggcagttttttcggaaagtgcttttggccgggagtgccgcagaaccccagcgtcacgaggtgaggggtgtcgcggtgtgtcgcctgccgctggagaccggaggatgtgttcttctcatctttatttttctgttatgaaaactaattgaggagctaggttctagtggctttccccctccagccacttctccagttctctgcttcttcctcccagttttgtttccgagtttgatgaaagggcaataataggaaaagttgcgcgcgcgcgcttgcgtgtgtacgcgcagacacacatataaataaaatcgatttagtgtctattttaccttgattgggtttgataggagtggttagagagtgtgcgcgtggggaaagcacaggccggtttggtatggtggagagggaataccacaatctgtgccaattgtgccttgaggcaataacaccaaatgatgaataataacgcctggcttggctcctttccagttgatttatgtctcatgtcagatccctccttcttcgtgaagctttccctaacaatgccagcttacagtgaactctcctttttctgccttttccttttgtacttatcatgtaaatttaatacttcgttataaactgctttgtattttacttttctgaatttgatggacttcttacacatagatttatgactctccaattaaatttttaatattcacttttggggacactcagttttaccttttgttgttgacccacaaacaacaaagaactaagcatttaatatgtgcttttcttaactaattcagccaacaaaatatatatggaacaccagctgtgtgcattgtggtagctaggcactttattgggcacctaggatgcatatttgattaagtcatgggaccttgcgtcacagatctctttcagtttattggacaagagagaagaggattaattgctcatcaccattcctttctcacctggcacaatctcagtaaatgttttcaaatttcagtttttttcaaggggtctgattcttggaagaaaggactttttcgtctctttcagtagttgattaggaatctgaaatttggtgtgtgttttatattttttttttatttttctatagtatgccttcatttgctctttaaaaatgtatgtatgtaacttttctgaaggcaagaactaggaggctttttctgtgttaccaagttgtgcttgtcttctgacacatcgtgcagtggttgttgctaatggggcttctgttactaaacacacccttgtattccatcagaagcggtaatgtttttgggggttgtaaaagtagactcttaacattcttggatagtatattagagctttctgaatatagaaatgcttaacagactcctggctttctcccatagaacatttcaattgagagcccctgttacttgtgtatgttcttatacccttaaattgactcactgttttaagtttgaagtttatctttcatttgatgaacttttaaagaaactttttgtcaactcatgagataggtgatacataaacaactataaagagaaccgcaaagctgagtggaaatgtggtttccctgctgtcatcatctagatacagttatttctacctcccatttcccaccccactctaaccttatagtagaaattcttaacctagcagaattgcaaactcttatgtattcagtccacaaatgcatgccaatggcctgttgaaagactcttctacttttacctgctgtgtgcttttgaatagccttgggtgctttggagccttaatttctcgataaaatttaaaattgacttgtaaaaactaaatatagtataagaggaatggtttcagggaatcagtcaggacaaaaacaaaacattttaatgaatgaatgaaatccagttgctgtcagtttgtaaatgatcatcttccttcctttcctcgtaggatttttagactctgaggagcagttggagctaatccacattatggaaatggaaaccac

SEQ ID NO: 1881385 - DNA, 4001 bp, Homo sapiens; identical to SEQ ID NO: 316434

SEQ ID NO: 1881386 - DNA, 4001 bp, Homo sapiens
acagcctcttgagcaggcaggaagtctccaagtccagagagcacatcctattcctgcatacaacatccaggaagcttgcctgggcttgtctcacatttccctcttggctggttagtttcagggtcatggctaggatatgcctgatatggagaagcttctcttgctggggaaaggtactgacacctccacacaactcacgcagaatttttttttttttttttttttttgatacagagtctcatgctggagtgcagtggtgtgatctcggctcactgcaagctccgactccctggttcaagcaattctcctgcctcagcctcccaagtagctgggattacaggcacatgccaccacacccagctaatttttgtatttttagtagagaccgggtttcacaatgttagccaggatggtcttgatctcctaacctcatgatccgcccgcctcggcctcccaaagtgctgggatcacaggtgcgagtcaccgtgcctggccaactaatgaaaagtttaaagaatttatatctagttttggatgttaggcatgcacacacaagtgcatgcacactcatacacatcatctccacaagccccatcctggctcagccctattctgatgggtcagcaggaccccaaggagagaagggtgggtccttggcactaagacagttcacagtggttagctgactccttcttgcctccattctttcaggaactgcatatagtacagaacatgacagcgattcgaaaaacaatatcccagctggctgtgatggctcatgcctgtagtcccagcacttcggaaggctgaggtgggataatcacttgagcccaagagttcaatagtagcctgggcagcatagccagatcctatctctacaaaaattaaaaagattagccacgcgcggtggcattcgcctgtagttccaggtactccagaggctgaggtgggaggactgcttgagtccaagaggtcgaggctgaagtgagcggtgagtgtgccactgcactccagcctgagaaacagagcaagaccctgtctcaagtgggaaaaaaaaaaaaaggaatccctgccctttcagcctctcctgtaaacagggattacaggcacgagctacctcatcgggccttagtttttgaagctagcagaggccaagatacaacagccttctaaaacaggaccagggactggtgcttataagcagggaatgcggcagagtacgatggctcacgcctgtcatcccagcacttcgggagaccgaggtgggcgatcacctgaggtcaggagttggagaccagcctggccaatatggtgaaaccccgtctctaataaaaatacaaaaaaaattagccggtcgtggtggggcgcgcctgtaatccctgctgcttgggaggctgaggcagaattgcttgaacctgggaggtggaggttgcagtgagccgagatcgcgcctctgcactccagcctgagtgacagagcgagacttcgtttaaaaaaataaaaataaatatatatttttaaaagcggggaatgcagcctaagtctctttccttccttcctttttttttttttttctttttttgagacgcagtctcgctctgtcgccaggctggagtgcagtggcgcgatctcggctcactgcaacctcggcctcctgggttcaatagattattctgcctcagcctccagagcagctggggttacaggcacgcgccaccacgcccggctaatttttgtattttcagtagagatggggtttcaccatgtcggccaggatggtcttgaactcttcctgactcaggtgatccgcccgcctcggcctcccaaagtgctgggattgcaggcctgagcccccgcacccggccgccgcaattacttctgcaccagcctaatacctcaagtccaggagcctcaggccccgcgtctatttcctccgactgcggcgcggctgatactgcctgaggcgggtggaagctgtcgcgcgtccggacgcgaccagttcccgcccagcagccggtgcgcaggcgcgggcagggagggcggctgtgcggggcgctcgcgggcttcagcgaggcgggagggcggccctgttgccctggagacgctttccctgctgccggccgcgaccgcaacccgctaggccttcatcgcgagctacgcccggaccgagaagccccggcatggccacgtccatcggagtgtccttctcggtgggcgacggggtgcctgaggctgagaagaacgcaggggagcccgagaacacctatattctgcggcctgttttccagcagaggcgggtagaggacgggctgtggcggggcgacctcgagcgcgctggtctgaggggcggagctcgcctgggacctgggccacggaaggagcgcgggggacgcgcggggtccgcggggcgggaggcgggaggccgcgaggcgggcgggcggccctgctgtgacgtccgggcgcccctcccgctgcaggggccgcaggggaccccacccgcttcctcagtgtttgggcgccgggcgcgtcttagggtggcgcggcgggaatggttggccctgggaaacccgcgatggcgtcctgagtaaggagatgggtagaatagaggcaggaagccactcgcgtcggatgccgttcagccgtgattcgagggtgactgtgcacacgggtgccaggatgggctcactcccggcgcgggagctgcatctgtgcgaagtcctacccgggtgggatctggaggcccttagaccaccgcagcgagccctcgctaggattaaggctcacgggccagagcagagggtactcagctaggtttgtgagatcactaactttacacacacacacacacacacacacacacactgaaaaaaatatcaggctcacgggccagagcagagggtactcagctaggtttgtgagatcactaactttacacacacacacacacacacacacacacacactgaaaaaaatatcaggctcacgggccagagcagagggtactcagctaggtttgtaagatcactaactttacacacacacacacacacaacacacacacacactgaaaaaaaatgtcaggctcacgggccagagcagagggtactcagctaggtttgtaagatcactaactttacacacacacacacaacacacacacacacacacacacacacactgaaaaaaaatgtcaggctcacgggccagagcagagggtactcaggtttgtaagatcactaactttacacacacacacacacacacacacaccacacacacaccacacaacacacacacacacacacacacactgaaaaaaatgtcaggctcacgggccagagcagagggtactcagctaggtttgtgagatcactaactttacacacacacacacacaccacacaacacacacacacaccacacaacacacacacacacacactgaaaaaaatgtcaggctcacgggccagagcagagggtactcagctaggtttgtaagatcactaactttacacacacacacacaccccatatttgcttggcaaatatggaaaacaggaattttgattataatgtgatacaaatttctttgtttatttttattctcttggtaactcacagaaaaagtgatacaaatttcatacaggatttttcccttgggtagaatgaacacagagaaagataccctcagttatcttggtaaaaggttctgaatgcccagaatgccattcagccgtatttttttattttattttattttattttattttgtgaaagcgtgcagaacaaaattaacaacaagtatatattttgttttgggggagaggggagtatgagaagctcattattggatgtattgagttgcctaataaacattcatatggagcatgagttggaatgtgttgaagttcagtgcaggtccaggttgaagatacacatgtggcctatgatttgtcttaatttgtttatattttataataaaaaatatgaaaaagaaggat

SEQ ID NO: 1881387 - DNA, 4001 bp, Homo sapiens; identical to SEQ ID NO: 316439

SEQ ID NO: 1881388 - DNA, 4001 bp, Homo sapiens
tcaccatgttggccaggatggtctcgatctcctgaccttgtgatccacccgcctcggcctcccaaagtgctgggattacaggcgtgagccactgcgcctggccgcaagacaccttctttacaaggcaacaggaaagacaatcatcaagagaagggggaagagctccgtataaaactgtcagatctcatgagaactcactcactatcacaagaacagcatgggggaaactgctgccatgattcagttccctccccccagtctctcacttgacacgtgaggattatggggattacaattcaagatgagatttgggtggggacacaaagcctaaccatatcagtagtttaagcatcactttcccccattttggccccaggtgggatagatcagcagacaggagggttgcaatgattatgcttcaacaaaggatgccgtcattcacccataggctctgtcaccagtggaatcctgtctctaagccatcgggccaaacacacgttccctgttgttggacacatagtggtgacccaatgacactcttatgaggatttgcctgcctccgcctgagcaggtgggtggttccacgcttcccaactccactgatttatttcctcaggccatcctggattctggcttcacccctgttagtgtgctgaggccacacttcttgggccctcctccggtcccatgccacatcactaaccacagctggtctcctcaaatttggtatgtgtcccgccctctagttccgggccaaatccttcagactctagattcgtgaacctcattcaccttcttcttctaagctaatgcctccctaccttggtccttttctattttctgtactctctatcttgtcctggtgacaaggccctccaggcctggccccacccggccaccctgtccacctcccaccaccatccactggctggtgcaatctgctgttcaaggcataaatttattcagtgcccagcccctccttctgcaaggtaaccacctagaaagttagtctaacaccctttctctgccctgtgtggggagcctgtggaagctggtctcaggatctggctgggtaaaccatctgtttacctctgtgtgggttctgacactcctagccagttctgtttctctgaaccttgtttctccactctgcttgccaagtccctttgtcttatttttttctccctctccctccttccttccctccccccatccttccttccttttttccttccttccttcctccctccctcccttcctccctttttccctctctccttctctccctccttctcttctttccttcctctcttccttcctcctttcctctttccttctctcccattctcttcctccccctctcttcttcctctttttatttttgtcccatgctttaggccttccttggcccttcctggcattgcttttcctgacagcaacactcaataatttttaaaaagcacctgagccctttgtgttgactgatgccacctctgttgtggtgcagatttgttttagaggcagatgtccagggacgctgaacactgaaatccatcctgcagagcttgctgtaggcagagtaaagaagtttgctctgtagttttcccaacagccttctcaaatccatgggagacgtctcagacaccttgtatttaatagacaaggaaatgagctcaggagatttgccccaggttgtaaattaaatcagcacaaaggtagaaatgaacacagagctctcagattggaagctgtccagacagctgcatggagcaggggcacagctcactgtctttcaaagcctcaaccagggctgttgcatctcggacacttggcagttactggaaagtcatgttaggctttcctgttgattctttatcttgtggaggagttgcacagtcaatgccttgttcaagattaatcattttccctgttgcctatgactgaggctgtttctcacatcctgcccctggttttgcctgtcccaaggatttcgtctgaagggcgggacattccccctgcctcttcgcaccacagccagagcctgccattaggaccaatgaaagcaaagtacctcatcccctcagtgactaagaatcgcagtatttaagaggtagcaggaatgggctgagagtggtgtttgctttctccaccagaagggcacactttcatctaatttggggtatcactgagctgaagacaaagagaagggggagaaaacctagcagaccaccatgtgctatgggaagtgtgcacgatgcatcggacattctctggtggggctcgccctcctgtgcatcgcggctaatattttgctttactttcccaatggggaaacaaagtatgcctccgaaaaccacctcagccgcttcgtgtggttcttttctggcatcgtaggaggtggcctgctggtaagtcattcaggattattactgaattctctcctgtttcctagatgttttcattatgtattttcatggaaagttttttgtaatgcatatttctaaatcaagtgacttttttgttgctgttcattcctttgaaagcagattatacaaaagcgagattggtacagtatagcgtagtaattttatgagatgttgttttacaaaatgctctttcaactaaaagtgaactgcctttttgctaaactctataggtaggaaacagatattcgcttttaaatcagatttgagagactatagagtttctactagaacgggcagtcatttaacatttgctctggggagccggaaggggttggctggttctctgcctaaatcaacagttttgaatccaaattctctgctgtttattttcagccatctgtgatagggaaaaataatgaattgtgagtgcattgctattttaaaagaactctaagctttctcctttatgtaaggctggggtgtggcgtctaggaaaaaccctacagttagcagcaggtcggtgtctgaagctaatagtggaatgtgttattttttccaagaattgtttttgattgaagtgagaggaatttccctgccaacctgggagctgaaagcattagcttcaaccacagcatggaaagaatgtgagcaaacttaagtttgctactttaaagtgctgggattaaaaattttaaggagaaattttatggaatggtaccatacgtgataaattttcttaatcaagtaaaagatagtaaaacatttaaacctaatacactgattatggcatggcaaatctgccctaaattatttatttaatgagattttatttaattttattttatttaatgagacggggtttcgccatgttgcccaggctggtcttgaactcatgggcccaagtgaccctcctaccttggcctcccaaagtgctgggattacaggcatgagccacagtgcccgtctgcctcaaatttaagcattattatcatgttaacatgattatttgtcttaaacataacatcacacttaagtttctttcgatcttgaacctgaagtatttcatatttactatattttaagagcttaatattgttaagttaaaactatgcatttgtataatcaaggaagcagttaatatttattatatatagctttcatgtctcccatttacaaaaaagtttcagttattctattaaagatttgttggtatattctgcattttacaagtggaaaaaatcagatttaaagaaagggtttaatatttccaaaacagagtttgttatctggggtcgtgtgataaactcttgtggaataaacacgtttacagtttattattttactcctcccatgttacatcctcaccctaaaaaatgctttgacagattacatgaaaacaagcagatatgacatttaaatggtctttttctcctcagaggtttacattctttgagatatctggtcaacctaatcaaagccagttaatgtcattggaaataaatatattttaccaagagatgcctaacctgacccatatgagcctgagcaagacaatgacctgactttgtttgtttc

SEQ ID NO: 1881389 - DNA, 4001 bp, Homo sapiens
gaggaaaatctattttagtctgggaggtcacagaaagcttcttttaacaagaacacatttgaactgagtcctcaaagatagaaaaggagattgctactttaatcaggccataaatgaggaaaagcactattacagtaggtttcacatgccaagaaaatagagaatttggaattttatcataattgagatgaaaacagagttaaagaaagtagcaattcaaaaagagaaaaataaaaaggatttatctattcactgcttcttagaattgacttggttgaaaggttttgatcatcttaccaaaaaggcttacggaaggaacagaaggatgctgagaggaaaaggtcagtaaacagggaggagggcacctgccagtaacctaatggagtatatggagagttgtatttacaaggcttacataaccaatgagtcagcaaaaagtcaggtgtcaatggatctcttctgtggccactctaagcagctaggaaacttggctctccgagataggaatataccttccagtaacacctgcctaagttaggatgaggaaaagtaaactttaatgtttagaaaaaaaacataagaaataagatccaacttaaagcaaggtgattctggtaggattttgcaaatctaatgcaactcatttctctaatttgtaataaaacacttattaaagaatccagaagcaagactccaaaatctgctaaaagtaaaacatacattttaaagagaaaaacaacatccttatcttttttgaggtccataaatattggagggctactctctacaactattttttctctaataacggctaatatgtataaacagtaacagaaaaaggcttcatatcaatagaattgagtctggcaaagaaaatatacaaaagagaacataaaagagattcagtcatagtagaggcaaagagatacagcattcacaaccacttgatatcaaacagcaatgacaatgaacccaagacaaatacccaccaacgcacagctatgaaaatagcagactccttatcctgccttcctccacctccatacttatgttctcagcctattactgttccagtggcaacaactctataacaggaggaaggctttatttttccttctcccgcttcagactatagaaaaagcagggaaaaaaaagcataattatgactattcaaagaaaagaaaagaggtttgttagtctgcattctttgctctggaaatttctggcttctgtctgttgagagacacatgagaaaacttggattatctctgaaggtcacaactgaatgaccacaagttatgtttctccttctggttcccttggtcatccttttccatcaaacatgattttgcaaaatgttttagttattgctaagaagcaattccatacagctgatatagaaaagtcaaaaaataagaaaaaaatcacaacacatttatcttaccaaaaccccctgtcaggcagtctgctgattttgcttgccacaaagctcatccttcatttgtgcactgccagagaaagcttggatggtaaaaaaaaaaaaatcacaacctctcttggctataagctctttccatttgttccagcttccaaactgcagaggagctgtggcatagtctgtcactgctgcacatacttggtttccgagaataacgctgcaaatgaggacagctaccactgggaatgctttcccccaccaaagagccgcagtgaagcttctagtggatccctgggcttctcaccttcacagtctcagagaagtgactttcacaaaacaggcaggtacagccgcaccacattaataccctcgcatagccaatcctccgcagtgcccacctcagcctatgtatagtttcaattctatctcctgtagcaactcttagagctttctatatctgggagcctaggagaactctgtgctgaataaacagaaagcttctgccaaacaagcatccgtgtgtgtgcgcgcgcacgcagtttgctagagcagctaatgcaaatgaatagtttgactctgagaatggagatcacagacagtatctgcctctcttctccagctgtgagcatcttttataaaagacaaaagcaccacactggttggatttaaagctacagggtattaattcaacattcacatttgtcttctcatttaaatcagataaggttgaaagaatcgcttaaagaagattaaaaacattctaaataaaataacactgtttaggtagcttggttcaataaatacaaagaaaaagcaatctacctatgtttcaataaaggcccagaagactgccagaacagatttccatgcttttgtaatgtttcttctcttatttttcattttaggttggcaaaatcatttaaaatgaaaatagaacatgagtgagagaacaactagaaaaagaaaactgagcacgacactctaaaatcgtattcactatggacagagagaaaaacactctgaaatctaagcaagagattaaaacatcacaatcataagcccaggctcagcccctgtatcatcacacacactatttactgaacacccaagacactacgtgacagaactgaatatcttattaagactgtttctgacttgaaaaagtcactttgggatttaggcaagttatcagatctgaaccttattcctttatttgtaaaagcagttgtggggaacacacataggaggaatttaaatgattacaaaatatagtgtggcatgtataaagtatatctactaatatttctctgaggttaacatgcagaaaggaatcagacatgaagacaatttaatacagtaaagcctatgagcctgggggtgtgatatgagcctttctatgagcctggaggtgtgataatttctttacttctagttaagtatgggtctggaagctcaggccagcacagtactaacaggtcaaagaaggtctatcagtattcaccagctgcgtttaacatctttcacttaaaccatacaaagccctctgaacggaatccaaagcaccttgaatgaatataaagaaaatgctgggttgaaaccatggctccagaaattccttttccatctctagagacacagaactctgaccctgactttccacaacaaattaataaagaatttgatttaatagaagttttgttttcacttaaaaattaggtggtaaggtttcaactgagtaaatacgtttctacaaaaacaacaaaaaccctaatcctgtaccactagcatcaacactagctgctgtttgcttaattctgtttactagcattttcagtatcttctaagacaatcatccttattgtagaaaaccacaaatgagcagaaaagaaagcaaaaactatctgtaatctcaccacttagaagaccaaacaaaccgctattaccactgtgatttccatcccttcagttttaaaaaaatatatgtacaagtattttgttatttcaaatcagttgtgatttcaatttgaaggactctataagagaatccatattttttgccttccttctctcaaaaatcacttattgtaactgtattcccatagtaatatatctgatgtgggcttttaaatataccgagctactagattgtgtgcagtctaaaataaaatctagtaagttattattttcttcacaattatacagctgaatgttggggactgcatattcttccctgggtaggtacagtatttaatcttttgtaagattaatgtttgttacaattgtataattttaagtacaattgttggcactcactgatatttccagtgctgcttctctttctgaacacacatggaagactacatttcccagttccctttgcaaggccatgtgactagttctgaccaatgggttgtgaaaaaaaggaagtgagtgtgtaacctaagtcaaagcatttaattgctaatgtgaagctcttttatcctctcttaccctaccactgagatcactgaagcatatgttgagacatggtgccatggatcaaatctgctttgattggataaac

SEQ ID NO: 1881390 - DNA, 4001 bp, Homo sapiens
gccccacaagttagctgagactgcaggtacgtgccaacaagcccagctaacttttgtattttttgtagagatagcattttgccatgttgcccaggctggtcttgaactcctgagctcaagtgatctgcctgccttggcctcccaaagtgctgggattacaggtgtgagccaggccatgaatcactttttatggttcatattttttgtgtcctaagaagtctttgcctatcccaaggtcacaaatactttttctatgttttcttctaaaattttcttttataggtttagcttttaaatttaggtttatcatccattttgagttacctcaggtggctccttcagtgcttctgaaatctataaatgcatcctccaccaacctcaaatctaagtaaaccttgccacctccttctccttcactcctcattcaatttattgccaagtcctgtccattttaccactacattagcactcttctctgtcactaccctcctactttgccttgactatgtggccagtggcctcctaactggcttcccggccccagctttgagactcccatcagaccactcttcacgttgctatctaagtaacttaaaaacagacataatgggctgggggcaaggtggctcacacctgtaatcccagcactttgggaggccgaggtgggtggatcatgaagtcaggagattcagaccatcctggccaacatggtgaaaccccgtttctactaaaaatactaaaaaaattagctgggtgcagtggcgtgcacctgtagtcccaggtactagggaggctgaggcaggaaaatcacttgaacccgggaggcagagattgcagggagccgagatcgcgccactgcactccagtctgcctctcaaaaacaaaaaacagacataatgatcaagttatttcccctgcaaccctgctgaaaaaaacctgaatagcttctaccaagcactcagattaaagtcccaaatccggccgggtgtggtggctcatgcctgcaatcccagcactttgggaggccgaggcgggcagatcacaaggtcaggagttccagaccagcctggccaagatggcgaaaccccatctctactaaaaatacaaaaattagccaggtgcgctggcgtgcgctggtagtccagctactccggaggctgagacaggagaatcgcttgaacccaggaggcggaggttgcagtgagctgagatcgagccattgcactccagcctgggtgacctgggtgacagagtgagactctgtctcaataaataaataaataaataggtccccaatcctcacctgttctcgcctacctcttcccacactcgcagtctactccacattcaatattctttagcgctccccattctggccatgccaagacctcaccccttggagcaactaactcctcccaactcaattcctcagattctaccctcttcatcctcaactaaatcaattcccccataaagattctcttagtaccatatacctctcagaagatttttactaattgaaaacttaattttgtctgattctcccatgaatgttttccttctccaccagatctcaaacttcatgagaccagggactccgttgaccccatatggtactcccagctccttgaacacggaagaagcctcattacataagtaataaaaataaaataaattaggaaaatgggaattataaagggatgggctggtggctgcttacaatcccttcagtggtaatacctggtgcaaagtaatgagtctctgcccttttccaagcagcctgctaggtggaatgaaggaaggccttgcgactcaaatagggagaacaaacgtgtgatccagagcggcgggcagaaatccgacgaaaccccatattactcaggggcgttgctcctagggcgagggtggctcggttcctagagctttttgagaggaggagcttacctggagcaactcagcactacctgcagcggcgcagctcaaccagcccagagaccgcgtgggaaggcgggctaggggaggggccacgccttccagggcccatccccgcccctgcggcgtgcgcgcgcccgtccgcccgctcccttgcgcgtgcgccgccggccgggggcggaggttgtgggcggtggcggctgtggcgggggcgcgcgcgcgctcgctctctcgcgccggttcgccctcccgcgccggggctgaggcggcggcggcggtggcggtgactgaggcggcggcggctgaggcggcgcggggggagggtcgggaggggggggtggttgtgggggatggaccgggtgcggcggccgcagtggaaggagcaggcgcttgagctcgagcgacggcgctggcggagacgccggctgctcctcccctccccgccggtgagtgagcgcccccgccccggacgctggcggcggtcgcggccccctcacggccctccgcggtgggtggggacagtcgtgagggagcgtggcctggcggcgcagcggacgcgggcctggcctcccgctcgcggcctgtcggggctgggacctgccgtcgcccccgttcgaggttgaagccccgggcctaggactcgacccccagcatcccacggggcctctttcctttcccggctcattccgctgtcattttgacctggggttcccctccagcccctcgcctcgttcccttcccagcatcccagggccgaggtgagggaggggcgtgtgagaagtcgggccgaggcccgagggactgtttaggagccggttcccgtcggaatctggggttttaggagccctcgatcgccatggcgtcccagaagttagccaccaggactcagccatttccacctgaaaccagttttgcacctattgttttgattttgaactgtctttcgaggggaggagggagcccggcgtactggggagaatatgtagtgggaggtgggatgtgaggaggagctggctgggcttggtctcggcctcaggatgccccctgttaacccctgtaggataggggaaagaggtgcagcgagttgcaccttccctaaagggccagagattcgtttatagcttgcgaatctctgctttttcagcctcggtaaaggggtatcatttgtggttggtttggttcgtcccttaacaacattcttggtgaggaatccccaggtgaatctgccacggagtgaagcagcccacttgagctgttggctacccccggcccccgcaacgcccgttggcttttgtgacacgttacacgttagtgttggtagagcctagccgtcagaggtacctgtaccataagcatctctacgaaaggtgtgaattcctaaattagcttattctgttcttaaaaaaaaaaaatccagggcataaatatcagatagctgctttaaaataaaacaaaactttgatttgttccaggaggtagatacatttttttctctgtatattaggagattgaaactcaaattgtgagtaggtggtagttttactagtgtcatgtgacaaaacgatgcttatagatgggattttaacttaataaccctgtcctctaccaacagagttggcttgtatttttttgcaatcacccactctctggctagtgtagaaagattaaaaagctgcttctggtctgtgggtggtaaccttttaatttctgaagagttttgagctgcttatagattgctgatcagcagcataggaaaattttagacgttaaaaattcattagcatgtgatgtagaactgttataattatgagcattgattaagatttggtatggtgtaggtgctgtgtactgtgtataagaatgagatttctcagagcatttgcatcttaagataaacagaagcacagaccgctgacagtgttgggacaccttgcagaaggactcttttatgagcacaaaagacctgtagtctacaatttgatgaagaaccccagtgccctagactagttggtgaccaaccaccattactttaaactgggccttcttgatagtagaatatttcccctttt

SEQ ID NO: 1881391 - DNA, 4001 bp, Homo sapiens
tactcattaaggagattacatggcctagccaggcttgagggaagggaaaatgtatttcatttcttgatgaggattggcaaggttctgagaaggcatttggagccagagtattgttgcatccattttagagacagtctgttacactatataaaaatactgaaacaaaagatggaaataggggaggaagattatgagacgatagactactcaacttgaaaaaagacccagctacaacttacaaaattaaaaacatgtaattattggaatttaaaattcagtggatggcttaactagcagattaaacatcttctttaaaaatatcaatgtactaaaacagagcttaagaaattacttggaatatactatggagaaataagaaagtaaaaaaatgagaaagggtaattgagacacagaagctagtatgagaaggcctaacataagtacaggtgggggttcaagaacgagagaatagagacaatgggggagacgtatttgaaaacataatggcttagaatattttctagaatgtatgaaagatatgcatactcagattctgggaatactgtgagtctcaaaaataataagggctgggcgtggtggctcacgcctgtaatccaagctctttgggtggccgaggtggatagatcacctgaggtcagcagttcaagaccaacctggccaacatggtaaaaccccatctctactaaaaatataaaaattagacaggcatggtggtgcacgcctgtcatcccagctactcaagaggctgaggcaggagaattgcttgaacctagaaggcggagcttgcagtgagccgagatcatgccactgcactccagcctctgcactggctgacagagtgagtctccttctcaaaaataaataaataaataaacaacaagaactgcatgcatgcctggttataaaaacagcaaataaagagataatcctaaaagcagccagaggaaaatgttccttataaaggaataatatttaaactgatggttgacttctcaacagccaccacagaatcaaggagacagtgaaataatatctttaaaatgctgatagaaaacaaccagcaacttggaattaaagatctgatcaaataatcattaaagcacgagggtaaaataaagacattttcagatattttttaaagtagaacattttcacagatggacattcatttacagaacttctaaaagatatgcctcaggaaaaagaacatttcttctgagaaacaaggtcttaaatataagaaggaatagccagcaaagaaattggcaaacatagtagtcaacccaagcaaacattttctgtatgaaacatataataatgtctaatatgtggggttaatgaaaaacaacacagaataaatatactagacaataatagcagttaagttgggaggggatgaagagaatcaaagtcttataaattccttgtattgttaggatggaaaatatatcaattaacttaggcatagtcaagttttagtaggcatggcaaaatttcaaggaaactactaaaagacatagaattcataacttccaaaccagtaaaacagaactattagaataagaaagaaaaaactcagtccaaaggaaggcaatcaagaaggggaaaatagatatagagaaatctggataagtaggacaaggcagaaataaatccaaatgtcagtaagcacagtaaatgtaaatggaccaaactagccagttaagtgctccacaattcacttcatgaaattactataaccttaatgcaaaagccagaaaatgatagtatgagaaagtaaaattactgagtcagtcttacccgtgaacatagttctaaagtcatggcttggtgagagggatgacaatcatgaaactgaaagggaaacagtgcctgtacttaccatccctgatgtcaaaatgcctgcaaggacactgccttcctttagtttatttcttgggtagagacgacaggaggtctttattgatattatctcatttgagattgtctcttaatattcataacctaaggctgctatacagtgcctgtgttatataacagcacctcttttacaactcaggatgtcacagtattatgagtaatgaggtgcttgtgggagttattgaaggattaactatagacttgtaaccaatccaagaattgcaggagatgaggcaccctcgtaaagaatttatcaaagtaatttgtctatgttgctgtggacagattacattcttattcactctctgaaagtttattgccagtctctgagtagttacaaatgcattattaataatccttagaaaagcaatacattgttgcatggcttaagctttgctcgtgtctagaaatttggaacagttgaacctgacttcatttcactgcctcttaaaacttgatccccctgaaacaaaacctaaagaagtattgtgtttctccctctaaattcagtgaatctacttgtcatttattcagtggtatttgaaagcttaagttggcaaattagactaatattaaaaacttagatatgcctctcttccttccccatctttgagagctgttactgagtaaaggagcaaatgaaaagggatgaaactctctggtagttaagtagtgtatctaaactaagtggagtagatactgcctagttgtaaacttcagccagttgtctgttgagaaagacaggtgcaggggcttttcttttttatttttcatgcaacaacttacttagtgtataacactgagctatccctgtttggaagaagccagaggcccagaaaatttttgctaaaggaggggttgctttatgtatctcctttaaagggagatgggtaggacaggattcagatgctcctgagtcccatagtgaaaataccatttataacctgctgtagactgtatgtttatgatccccccaaattcatatgttgaaacctgaagcccaatgtgatggtatttggaggtggggcctttgggaggtgattaggtcatgagggtggatccctcgtgaatgggattaatgcccttataaaagagaccttaaggagctttctcaccccttcctccgtttgaagacatggtgagaaggtatggtctatgaaccagccagcgggccctcaccagaaactgagtctgctggcaccttgatcttgggcttctcagcttccaaaactatgagaagtaaattgctgttgtttggtattttattatagcagccctaacagactaagatcctcaccatagtttccatcaagctacaagaagggcatgttgtgaaggcaggaaagcataccatgtggtgggcccaggctgaaaggagccagctgcccacaccacctcgcttttgataaagttggatggaggggggtgatggaagtccaaaggaattccttaggtgtttgtgtctcacatccttatctctgaggcagctgctgccagctcatctccctgtccctgcagctcagagggcagagaggtgcattccctagaaccagtcagcattcagagctgtttggcatcaccactgcctcatactgctattcttcatcctcttcagactgtatccactctgactcagtggtcatccccaaaactttgcatgaagcaaaaggaactcttcattcagacagagagagagttggagagggaaccaggtgagcatacctcatggcctgaagaacgttatccaagagaaaaagtttattcttagaattgttatgtaggcaacaattcactgatctctgcctccaagtggcttaaaattcactgacaagatatagaaaagtgaaatgtaagattgagagaatgatttgaaaataattgcttttgttttagtatttgcaggcccatatgcaataatcctttcatttttcccttggtttatccttcagtctcagactgtcctgatgggtagctttttaaatatagggtagcaagtccactaacatttctcccagttaccaaggagaccttattggccttaatacattaccaccactaag

SEQ ID NO: 1881392 - DNA, 4001 bp, Homo sapiens
accttcagtagctgtgccctagggtggctggagatcaatatctattgggcccaaatacacaatctatgaaaagtcttgcgtttgttatgcaaagcctgcttcaaaataattcacttgatcttctcatctctcttccaacaaatttgccaccttggagttcattctatgtaaaaattctagacatgaaagtactttgcaatatgtcatcttatatgcaaacaaaattaagtaaatttgaacttgaatcattggatcagagtctagtgtactagatattatatcagggccagcagactaaatttttaaaatagcaaacagcctttttacttattttctcaagctctccatgtatctatgatgttcttatttggtgttatctacccaattgtgaactgcactaagacatggggtaggctagcatggtggctcatacctgtaattccagcatttggggaggccaaggtgggaggatcacctgagcccaggagcttgagaccagcctgggcaatataatggacctcgtctctgcaaataatagtttaaaaaaaaattagctgggagtggtggcacatgcctgtggtcctagctactagggaggctgaggcaggaagatcacttgaatctgggaggtcgaggctgcagtgagctatgattgcaccactgcactccagcctgggcgacagagtaagactctgtctcaataacaatgacaacaacaacaaaaagatatgaggtacatatttgatctttcagaaagcatcaggctcttgggggagcccacagccatagaacttctttgtttaatataaacacagacagaaactcaaataaatgtgtctaatttacgttcatgtttctatcatttcattgccggcagtgatagccagaaactgaggaccctgaaatcacctttgatacataatccctctcccagtgtcctctctacacctctggccccctcacagtgagcttcaacattcctcagaaccaaaaagcacaacaaagccgggcacggtggctcacacctgtaatcccagcactttgggagggcgaggagtgtgcatcacttgaggtcaggagttcgagaccagcctagccaacatggcaaaaccccatctctaccaaaaatacaaaaattagctgagcatgatggtgcatgcctgtaatcccagctacttaggagggtgaggaaggagaatcacttgaaccagggaggtggaggttgcagtgagccgagatcacaccactgccctccagcctgggcaacagaacaagagtctgtcacaaaaaacaaacagacaaacaaaacaaatcccatgcctcttggaatttaggcaatgtatgattaggcaagtattaaaagttattttaaaggctaagtaataatatttggtgatatttatggtcaactaaaaaaaaagcagaaagtaaaattttctctctgctattgtgtcagaagagtattctagaaatattaaaggtttcccaagtgtttcgttttctgccttgaccctaacctccattcaaacaccagatttgaccttcagctcaggaagaactcagaatggcaacaagcaccaaaaaggagtcttttcagatttctacgttttttaagtctagctccttaggagaacggaaaggactcaaactagaaaaagattggaaaaggagagttggagaagcagagagggcagtggcgccgttacgtacctgagagatgtgcctgcgctttactccacaggctgagcttgagaaaggcggcaagaccctgagaagaaatggcggcacgaaaagtgttgcggaggctgtggagttcccagtcccgccatgctgtaggcgttgaaaaatgatctcctcgcaccccaaaatagcacagaggaggccctgaaaccagatggggccacgtgggtggaaacaaggaggttctcttcagtggctggcactaaacagcacccaaggaacaatcaggatgaaggtctcagccgatgccgctgtggctagatgacggtgaggatttgatgcaactcaggggaaacggggggaggcttggcaagaatggaatttgaaacagaaaccaatgtatggagtcagagaaaagtaaagagaagtaggtattttgcttttctgcatttaaggactaaattttatacctcctaaacctgtgattaaaacaagagatgaggagtgacataaaaaaatgaggaaaatttgtccggatttctctgaacctccacttcttcgaaagaagaataattaaaatgtttagaacccagcattagtatgcgcataagaaataatggactactatctaacatattaaagtaattatttgttgaggtcattagattgtaaatttgtctttcatttatattttccacgtttatggagatttttgttgttcttgttgttttaagaaataagatgaagagaaaggacagaggtaaaaaggaagtaaggaaagaaaaaagatggtgagaaaaaaggacttttaagtagtattgggtagttaaaacatattaccagtggttaaaaaaaatgaggttggaaatgtggatggggagaaattttaaagcgtctaaaatttcagactaagaaatgtggactgtatcctgtaatcaatgaagggccatgtggactgtatcctgtaatcaatgaagggttttgaatatgggagtaacaggtcaaatctatgtttaaaagcattctggtcattttggggtgagagtcctaagaacgaaggcagtgaaataattcccaggcaattgcaataacatagacataaaatcatgggggcacccaggcagtggcaggagggttgaagaagcaggagtggatcaaaatttttaaagaggtagcaacttagtgcatgattggttctgagggtaaaaaaaaaaaaaaaaaaaaaaatcattgctgagaatatcctgatatatggaatcttcagccacagcttgaaagtgctcctgttttaagaggagattaagcatcttgagtgtcattttgaaactggacagaattgaagactgctaatgaatgttggccacttagcaaccacaaagttagcaacttcgagcaacagccacagacgcgctatcctgtggctctggaccacctactcccactactctaagccacctgacagctgatgggaaatgcctccagccagagctcaaataaagccctgaagcttccagagcctcaccaggaggacactctcttgactaggaagggaagagctgagtccagagcccctgactccatttcctaatccattcccttgcacgacattctggcccagtggaatctgagatggccacagtgatcttccctttttgcccacaacaagcagaaacgaggccagtgtgtttaaatcagtgtttattgaagtctcagggattacgcaaagtaaatacatctggagagcaacatgaatcctgataattcttaagatacagctcactctctgaagatcacaaggcccatctcatccttgtgggccctcggaaagaagtgagaacactctatattttccatccatggtgccacatttctttcacttggtagaagccatccctaaatctcaccaccccagagtcacagcattccgtgtgaataatttgtgttctggatttgttttattcctagctgtcctttgtccccgagaaccctgagatatttgtaaagatttgaagtaataaaacaatcttaaagaaggtttaaaaattggggaaaattttaaaaattgctcaaacatttttaaaaccttcagaacacaactatcaatgttttcatacattcccttctagtttttttgtatatattttatatagttttaattatacaatatatacacacacttgttttttggtatcattataccatttttcctattgattttcagtcttaattgtatcttttctgatgattcctaaagtgccatcattatattaccatttctatgtttagggctattatatttctttcattttcaaattttttta

SEQ ID NO: 1881393 - DNA, 4001 bp, Homo sapiens
attcctttgctatccccttcagcaaggcaagattcatctcctcctgccattttgcctgtgccacatggtggagcctggtgggagtttacatataacactggaggtcttgctgtcatttaattcctagggagataagcggtgggagctggaagtggggaggaaaaaatgttaagtagagaggcaacagagcagtgtgctttgggaggaagagtagagcctgaaaagacattttcctctttgggttccgcactatctgacctagtccattctttcaataagtgtgtgcctatcacatactgggcaatgtgcaaggaagagggtggtgaggcagctggctaagctctctgttcttaccacgtagtattttacctattctgttctcagctcattgagggcacaaatccactcttcctcatcttactcatctgcatagtcaacagaacctgtaggcaccttcagacactcataaattttattttattttgagatggagtctcgctgtgtcacccaggctggagtgcagtggcacaatctttgttcactgcaacctctgcctcccaggttcaagtgattctcctgcctcagcctcctgagtagctggaattacaggcatgtgccaccatgcccggctaatttttgtatttttagtagagacagggtttcaccacagctggtcttgaactcctgatctcaggtgatccgcctgccttagcctcccaaagtgctggaattacaggcatgagccaccgcacccaggcgacactcataaattttaaaccaatgttggtagacttggccttaatcttaattttgccagcagccatgtcgggagagggaatagatcagctttccatggttacttcttgcagagtggagctcatgcggtctgggatgtccagaaatctgcctggagttgatatggatgaaacatatacttaataattagactgaatatgggcatggccaatcaagccttagactagctcttgtcttccctctctagaccagcttcagggattctcatcctccaacagcttattaagttggcaaaaggcttgtgcctgagaggtctgcccttagcaccagcttttctcactctgagtagaacttagctttgctaaatatccttaagatgccagaaagacttgggctcttgtctttcctggatctcagagggagttcatttgcaaagggaaagacacaatgcttgaatgtggggcaatattgaagatctgtatcttggacactttactctttttatcaatatgactcatgggtctctggcagtcatgtggccttgactctccttcttcccctattggtcacttgctctcttccctgccagcataaaaaaaaaaaaaaaagaaagcttcagccaggcatggtggctcacgcctgtaatcccagcactttgggaggccaaggcgggcagatcatgaggccaggagttcaagaccagcctggcaaacatgatgaaacctcatctctattaaaaatacaaaaaaattagccgggtatagtggcagtcgtctgtaatcccagctactagggaggctgaggcagtagaattgcttgaacccaggaggcggtggttgcagtgagccaaggtcgcaccactgcactgcagcctgggtgacagagcaagactccatctcggaaaaaaaaaaaaaaaaaaaaaaaaaagcttctaactttgtcaatcccttgtacacaaatatgtctgagctcactggcatgagagtaactgccctcaagagggagcagagatgaacaaagccactctacacaggctctgtcaccatctgtgcttgccagcagaaacagggatgttcccgtcttatccataccctcttgagggcctgtgttctcaaactaaccattctcacgtatggtgccaaagctgaacattctcagaaactgcattcaaattgtaagatgggacaaacctctatttcctgagtgctccttgcagacaatataaggatgatgcccatacaaaggcagaatattcctgttgcgaaaaagacaaagaggactctcctggccgtgaaatatagccggtggatgggtaactcctgctgcttcagggcagagttgtctagtaatctggacaggcagtgctgtgctctctcctccatttcggtcctgcaggtgactcggatacttttgggacatttagaacatttttactcatagtaataccacataatggtaatgtgaaatgaattatgtgaacccttcctttgaagttgcaaagtctttctgcttcccggattattccttaaccagagctggtatttagcaggagctcagctgtctccaaccagccattactgagtataactgacttaggatcaaaaaggttcttgtgttaaatgtcatgcctaggatggatagtccccagcaaggtctgcagaaaccaacatctggtgacactaggaagcaatcacgatgggctatttctgggatttggtgagtaattcaaggcaagcccttcctgagagggggaaatggatttatctttaggaacttgcctaaatccttggagattaataaaaaaaaataaaagggctgtcagcttttctccaaatgtggctgttgcttaacatgaatataaactaaattggaaaaatactctcagatcatagctaactttgctatttgtgataatgaggaagagagcagcaaacaggaaattgtagaacacagatgtctcatctcagcagcttccaatttctttttcatccacaaaaaaggctctagtagaaaatgtggattaaaaacatctcctcctaagctgtcttaagtgcatgctttggggtaccccaaatgagacaagagaaaggaagaggaagataatcaatgagatgttcaatattgaagtacagtattaggtctggttttgggttttttcccttgttagaaatccactaacattagtttccttaggccattaataattaataattacttcttttaaaactggcatttaggatttagaattagaatttttaaaattagggagcatgtgaatttctaatcttcccttttaatttacattagtcagagaagccatcctggactatttttgtatcaaagaaagtaatgactttggcaaatgtacctagtttgaaagaatacaaaattgatgcaaatgcttacactaggaagtttccaattcggagttaaagctttccatttacaaactgtataaaaagcaaaataccaacgggaaattttcagcatgacatttgaatctaatttggaggtggcaactagtacggttgttggtatcaaacagccttgtgtgaggagatggcagtgaacacttctagttaacatttaccatttgttttactaaataaaacatggtcaagagcttgggtttaaaaggcagtaaaaggctatgagattagattataagaacagggttgacctacacaacattggggtatgtttgtgattcaaatacttattccaacattggattggatggcattatattacatagataatgcctagcaagagggtaattacagcaaaaaaccaatgagaatagtatttcttagactgtttataaaacaacaaaaccaactaactcaaatcccagactaaaaggagcttcacagatagtgtattactcagggttcaccagagaaacagaaccaacaggagattatatgaccatatatatatatattataaggaattggctcacatgattatggggctgaaaagcccaaaatctgcaaagctgatgtcccaattcaagtctgaaggccaacaggctgccacagaatcaggaagagccaatgtttcagttaggaggcagtcaggcagaattctcttggggggttggggagagtcagtcttttgttctattgaggccttcaactgacaggacaaggccctctcacattatgaagggcaatcctctttgctcaggtctacccatttaaatgttaatctcatgcaaatataccatcacagaacacccagaa

SEQ ID NO: 1881394 - DNA, 4001 bp, Homo sapiens; identical to SEQ ID NO: 316454

SEQ ID NO: 1881395 - DNA, 4001 bp, Homo sapiens
cacagtgaactaccaaactgggaattttggaagcgaggtttggcttcattgttcaacgagaatcttcctgtatgcaaagctctagaacactggagcctttgtaaggaggtgccaattaaaatgcctgtctcctagtaggagtgggcctctgttgcagctttgtttctagccgttagaccaagagggcagtgggagcaacttgctctgatgacccagtgagcagtgcaggcactttacctacactggggaggggctggggaacaaactatgtaatcattggctcactcatctggagacctgtagtatcatctggttgtgccgcctatcatctgtgtggcttggagcatgtcacctaacctttgtgaacttcttaggtagactaagaataataccaacctagaaagcctatggtgaagactaagtgaactaacatgtatgaaaatgcaaacataatacctattcaaagaagactttggagagggattagttttctttccccccatgcttcctgcacacatgtactgaaagagtaaccaaataattagacctgcagatggaagagatttcagaggtttgaatgcccttaaacacaaccccaattagtgattatccagtctctacttaagttctctgaaaaaaaggatatcagttgccaagtctttatcatttagcgagagctctgctaagatgatgatgatgatgattttttttttttttttgagatggagtttcactcgttgccctggagtgcaatggcacgatctcacttcactgcaacctccgcctcccaggttcaagcgattctcctgcctcagcctcccgagtagctgggattacaggctcccgccaccatgcctggctaatttttgtatttttagtagagacgctgttggccagcctgatctggaactcctgacctcaggtgatccacctgcctcagcctcccaaagcgctgggattacacgaatgagccaccgcacccagctaaagattttcttgaaagcctgtctagatcctgaagaactaatccccttatctccctccctcagtatgatgaagagatttatgagcatcatttgaagacacattcatattatgtttctttcaaaggggtatgagctcctagaataagaagaggcactgggccaaggagcatggctgggctccagttcccaggtctgattcagtgtgatctttgtcatttccttttctatgtcacagtttcctcatctgtaaactgaaagttgggcctgatttttttcattttttctcttttatgcatgtgccaatttgtttcccacagaatactgacatctttataagctctcaagaaagacattataaaaacaaatttcagatatactttgaacataggcttcattatacgacatatacctctttctgtttggattttactgtccacttaatataaaaacctgtattaatcactaaggaaaaggatagaggagacttagaaatatctccagaataattttgcaacaattccaagattctctgcacttctttttctgtcccttaattggcctcctccacattttccaactatggaggtattgctctactctcttcgactttacattgttttagaatgcttttgcaaggagactctgccttgaatgaacccaagatatggtgcaatgttgaggaagatctccaagtttacacatgcctgtacgatggcccaaaggtcatcatcaggtgaaagggacgaccttagagatgaaagaagttcaaggaatggtgctacattaaatgacttagcattagaaagcatctactttgctttttctttcaccaaccctgaaagccaaataaggcactgggcattcaggccttcttttgagcagaacacgtgattacgcagttattcttcaagagcctctgttaatctgtcgcttggagaactctgcatactgtcccaaatccgtctgaattttccatcggctgccagtgttcgtagcagaggcctcgggtcttctcgtcctctcctcagggtctggcagctgtcactaccgtggacttcggtccagtccccagagtcgggggcgctgcctttcccatttcagttgccagggggttcatccacgatcgtgccagaggggcagcgcgtggtctcctcgaactacgggggagagaggaaccactgttggcacgggccggactgaacgccggctcccactgcctacctcctcggagctgcatccgccgacatcttgcgccctactcccagcaccagcagggcacttccgggaagaacggaattgcggttccgcgcgtgcgcactccgcagccaccgcctcccgcgaggagcgagagtcccgcggccccgccccgccgccgcagccgccgccgcagccgaaggccggcgtttctgacctcagccagcggcgacgcagccgggaaagaactgtcgagggcgtctccgtagttcagttttggtttgtttatttgagacggagtctctgtcgcccaggctggaatgcagtggcgcggtctctgctgactgcagcctccgcctgccgaattcaagcgattcttctgcgactgaatagctgggactacaggggcgcgccacgacgcccggctaatttttgtatttttagtggagacggagtttcaccatgttggtcaggctggtctcgaactcctgacctcgtgatccgcccgcctcggcctcccaaagtgctgggattacaggcgtgagccaccacgcctggcccaccccactcggtttttaaggagataattacaaggttattttacggttcatagtgtgtttcagacctcccagaagcctaacggtgtattataaaccattcttttctttgtttttaaatgcattaaaaaccttttttgagataaaaatagtgcaagtacatggtttaaaaaaagaaaatcagattgcaccaaaaggtttatgatgaaaaacaataatgttctgtccctttgcctccaagagactcctttttaaaatcttttgggctgggcgcggtggctcacgcctgtaatcccaacactttgggagggtgaggcgggcggatcatctgaggtcaggagtttgagatcagtctggccaacatggtgaaaccccgtccctaccaaaaatacaaaaagtagccgggcgtggtggtgggcgcctgtagtctcagctacttgggaggctgaggcaggagaatcgtttgaaccggcgaggcagaggctgcagtgagctgagaccgcgccactgcactccagcctaggcaacaggagcaaaattctgtctcaaaaaaaaaaaaaacttttataccttctagtagttgtctccattaggtttgatttggaacatgctttccagctacagggttcttaagatcatacttgcttttcctgagctgcatcatcttcagcttccattatacaggctgacgaggctcagtagcacggcagggccactggcgtattgagaaatggatggtcaccgtcttcgcatccgagggttgtgtggcgtgcctcgcgccaggaactccttggccactccgcagtttcctagctagaacccggcttctgagcccagcacgctccaacagcagcctgccgcggtccacgcctctgctccggacttgacctttcccttccggccttcctcctacaggtgtcttggcacctggaatctccagaggaaatctgagggattctctaaacccacagctggaacaagggacgtcatacacggcggccaccaccatctttcccaaggacagcatggccatggatgaaaagggccatttcatgggccttaccttctgctagccagtatagcctaaagccctgatactcaaatgtagactcttaggctccacccggaggattccctaggtctgggcagggcttgggaagcttagcaggctcctcaggtgattctgctacagatggtccaggaccagtctctgaaaaacactgtcctcgggaaattgcttttatgtatttactttttccatctc

SEQ ID NO: 1881396 - DNA, 4001 bp, Homo sapiens; identical to SEQ ID NO: 316466

SEQ ID NO: 1881397 - DNA, 4001 bp, Homo sapiens; identical to SEQ ID NO: 316467

SEQ ID NO: 1881398 - DNA, 4001 bp, Homo sapiens; identical to SEQ ID NO: 316469

SEQ ID NO: 1881399 - DNA, 4001 bp, Homo sapiens; identical to SEQ ID NO: 316479

SEQ ID NO: 1881400 - DNA, 4001 bp, Homo sapiens
caggagcatatctggatttaaatcccagttctactgtatgttagctgtgtaaccctgggcaactttatttattaataataaagtatgtgagcaatcttatatcactgtacagagtgctcatatatgttatccagcttaattcctagaacaaccctgtgtgagaagaactactgagtgctgacactagtcatagtgctagactcatagctgaattcagattccaaattaagtagcctgattgtagatacaaccattcacatgcgaacattttgcttttttcctggctcagcactgccagtactgcttctttgaggtacaattatgcccattttacagatgagaaaactgagacttagaaagcttaaataatttgtcagtattgtaaaactacctatctttgttatcagagaaacatgactgtgaccaacctaggtatatacaattttccacagccatgtgaaagttttatgactctttaacatttctggttgtctgctatgctcggtgcattgggctggctggaccttgtatatgttgggaagaaggaggacttacaaagactaagatacagtctttgcttccaagaggtaaataaaaaacaactaaaatattctatcatccacacctattccctctcccttcttttttcagcatgttactggatgctgcctctttatccatctgccctggtggagatcttgaggttacaggaatagccaagagagacacaggcagagttaagtccaaagcagtcagcaaaggtggggagacatagatgggtccaggtggtaagtaggattggccttgttattggaagctgaatgtagttactggacttggagatttcggtttctagagaagacagcagctctccatgcccagtttaatactgtggattagcgtgggagtggccccagacccacaggcagaaaaggccaatggtcagagtggagatcctcaggacactccaggtgtctgagggaacgtaggtttatccctctttattactaagtggattgctgctcccccttgcaggccaaagcatgaatactggacatagcccacatcgagggtagagaacttggttttggctctcaagtcgaccactcatcagcagatgactgtgagcaagtcacttcctccctccaagactccatttctacagggattccataaaatgggcataagaattttcactgtgctcgtatggactggattaggccatcatgtgcattaacacacttggctgtgagcactaggtgcagccaagatgctgatgggaaagaaaagtctaggttttgccccctgcgtcgttcctcgtgacaggattatgctgagggagggcacattagattgactcacacatactgaaatggtcatagttattgaggttacccagtttccaggcctgaactagtaaacccagcaatgagaatcagccagcattagcaagttttccgtgtgggagtggggtgggggtggggactggagggagcaggcgctgaaccaggaaaggaggaggatgctcatcattggctaaagatccatgcctggaaattaacggcgttaaagtgagacttgcttcaggttccaacccggtaaggcaaatggagaggctgtcaggagaccagaagtttacctcagctattgcaccgacgcaccacgtgctctggtgcacatccaccgcctcttcctgcctcagtttctccttttgtaaaacaacagcttgtaaaggcctggggatcttctcatccacgggagttttctaaggatgcaggcgaaagaggtaggaaaagtactctgtctctgtcctgggtgttcgggatcaaggccttttgaaccaattccggaatccgccaccgggcggtggtaggagagagccagaggattcgtcagtaagtgtgcgtgcgtgacagagggcttttaaatagatcgctttgtatctagcacggtagcacctgcttctaagcttccaacggcagctcgagcaacgcgatcattcagaagcggccgctttccattcacgtctataattagcgcgcaggctgcagctcaggctcgagctgcaaagcggggcggcggccttgtgggcggggccaccacctcctagccccgcccccttcgaattccaccttcccagcccttcccagccaggagcctcctgcagcctcctccccacccccactgtctgtcctcgccctggttctgggcttcgctctcggcgctccaggattcctggacgacagggcccaatcgtaccctcactctgggatcactcttgtgcagtaaataagcaccttgaaagatgcattccaggagggcagctatatttagagtggcatcctcctctcctccccgcacgctcctgcgtcccgccctctcccctccccgccccgctccccgatgcccctcccagccacctctccctctttgtcgcattacatagtaatctgagatgcactggatgtgctccagggaacagaatgtacttggcagagacgcggggcttgatgtctgcaaaatgtcggaaacgcagccaagagctgctaactgggtcattaacctccaaaagcaaagcgaggactgtaaggcccgctctgcctcccttcatctcgccaataaaagtgcctcagtgtgagggggaagaaaaagcccaaggttgactgctttgatttctaggcaccaaaggcaggcccgtcctctcgtcctggcccaggccccagcccctccgggccagcccctgcgccacatcagagtttacaagtgacctttgaaaggctcagcaaccccgcagggccatgcttgcgcctcagcaaagaagttacccagcagccgttccctaccgcacagccttggacacattttcttgggtccaggaggagttaagggagtgggggtgagtaggggtgaaaggagaaggttccaggtccttcacctacagtgaagggctctgctgtctctcccctcctctgcttctctccctctttttcctccccctcctctttcttctttcttgtcttcctcctctccctcttccacttctttctgagagcaggctttgaggtaggttcatgaatacatggcctgggtccaggggatttgcattcaagccgcttgcagctctgttacttgctatgtgaccttgggtgagtcactcatttctctgcttttaaattcccttcttctccattgttcaccacaataacaccttcctgacatacatcacaaaacagtgaggccaaatgagaaagtctttccctgaccgccttgtctttcacccctctgaaagccctgaggtccaaagtgcctctggccttgtgtgtactcctggaaaataggaatacaagtggtctcaccagaaagattcaaacgtttgaatgttttcaaggggatagcccctaaaatccaccctcttcaagttttctagccctgtgaggttgccaaacagacacttccccctaatgctccaacccacttctccagtggctagagagagaaagtgaccggtacagaaaccagaagaggttgtgcagttcctcaaatgagactcccttccttgttggagggaagacagtcagcctggtaagactagcagcagcccacgagatgtgggtctgagcagtctcaacaaaagtccaggatgaggagaatggagatttgtgcagccatgctgataagaggaggaaagctcgctcctggtgctctctaggaaattagaaccaagcccagcctggcatcagcacccttcctgcctcatctctcgttggtcttaccactccttccatggcagccacatcagatgggttctggctggtcgcggtgctccatggacgcctcctgctttcctgccacttgggccttggctgagatgtcttaaaaaattttttaaactcatcagaatttgatggcctctatttggcctatctctgccacacattcaaatctttcacatccctcaaaacccagcttcaatgccatctcctctatttagatgtcacttc

SEQ ID NO: 1881401 - DNA, 4001 bp, Homo sapiens
gtattaggtatttctcagcccctctctcttctgagttgatcaaacttcactgttttctgtgctaggagagatgtgaaggtcattgcttttaacttaggctgtgtcatcaatttttatttgctatgatgattcctataggatagaccactggaacaatgagaaggagagaattctactggtcacagacaagactctcttgatctgcaaatacgacttcatcatgctgagttgtgtgcagctgcagcggattcctctgagcgctgtctatcgcatctgcctgggcaagttcaccttccctgggatgtccctggacaagtgagtatatatcttatacttgaagaagtggtgcagcagggatggacctgcagggaaaacaagccgaaaattcagtttggccctgtaaactgggagaacccaagggaggatagtgaaatcatgaaagttgaaatcattaaactagagttcctactctatgtcagcctccagggatacaactttaagtaaatatattagttcgttttcacactgctcataaagacataccccaaactgggaatacaaaaaggtttattgaactgacagttccacatggctggggaggcctcagaattatggcgggaggggaaagtctcttcttatatggccgcagcaagagaaaatgaggaagaaggaaaagtggaaacccctgttaaactcatcaagtctcgtgagacttattcactatcaagagactggcataggcaagactggaccccatggttcaattacctccccctggttccctcccacaacacatgtgaattctgggagatacaattcaggttgatattttggtggggacacagccaaaccatgtcagtaaatttgtattttagtatgaggacgtgacaaataaatagctaatgtaaggaagaaagagctgtgggaacatggggaaaatgcactcaacctaatttgtgtgtcacgtaatcagagaaaactttcagaagaaacacttgagccaatatttaatattgggcaggagttagccaaagaaggagaaccaaaggggaagaacattccaaagcggtagctaaaaagagtaatgcctctgggaattgaaattattctgtaaagctcagtggatagaaccaaaatgggtagtagctcttcttataaaatgtctcttgggatcattcctggaagttcagtgacgtaggggtggtgaggtgtgtcaactgtttcacagatgttgacaattaccaagagacttggtgaggtctacagaggagaatgctgaattaggtaagttcctgtcatagtcttcgaggcatctgcctttactaaacattttagatctaagcaagagaaacaacagtctttctctaagactgaatgtgaggtcttcccattgaaccgtgaattccttgcgggcaaatgttgattttgttgtcctttaagcacctggcattaggactagcacatagtagggtctgaaatcttttcaatatacagaaaaaagcacgagttcatcaagtgacttgctttccttacactatgcatactacataaaaaacttatttttgcttactcttttcatggatgcaaaaagtgattaatttattaagttcattagcttttaaaactgttgatttttttcaataataatattacacattgtaaaatatatatttaaatattacaaaaatgttcattttcaggaactctctcttctacaccagaccctcggttcttcagccttccctccatgggtgatagtcaacagtttcttgtgtatttttaaataaatagtctataaatataaaagaataaaaagttctgtattagtccattgtcacgttgctgataaagatatacctgagattgggcaatttacaaaagaaaaagatttattggacttacagttccacgtggctgggaaggcctcacaatcatggcagaaggtgaaaggcacatctcacacggtggcaacaagagaagaacttgtccagggaaactcctgtttttaaaaccatcagacctaatgagactcattcactatcacgagaacagcgcaggaaaaacttgctcccataattcaatcacctcccaccgggttcctcccacgacacatgggaattgtgggtgttacaattcaagatgagatttgggtggggacatagtcaaaccatatcaaggtctctctgtgtacatatgcctatacacgtttaaaagtacatatctacacacatatttattacatattattttacctaatgaaagcacatgtcataaactgtcctgcctcatgctataatatctaccagtgatataacttggaggtttatataatcatctatagatcaatctcagtgttttttaatagtgcagaatattacctcttaagcttaatctatttagccagtccctcattgatgtatatctatttttaccgttgctactacaaagtgctgctacaaatatccttgcttacaagactttgcacaaacatgtaattgttcctttaatgtattaatggatttctagaagtggaatttttaggtcaaagtcatgtaaattttaaccgatgagtattgtcaaattgccttccaaacaggtgctaccaattaatactttcacaaagtatcagggtaatcttttccacacacccacaccaatatcaagtattacaaaacctttttacattgccagtgagatagtaaagaaaagtctcttatttggggttcaaattgcatcactagaatttgaagaacgatatgtgtttttatccttgggttagaaagccatattatttatttttctgtgaactgcctatttatgactatagcccattttttttttcctgttgggatgtttaatttttttcttattgatttgtaagagctatttgtgtattagagaactgaattccttttctgtcctatatgttgcaaataaatttttcccagtttgtcatatctcttttaacattattatgctatttttcatgacctttagttttggggtattgatatggtttggttgtgtccccaccaaaatatcaacctggactctatctcccagaatttccacatgttgtgggagggacccatggagaggtaattgaatcatgggggctggtctttccagtgctattcttgtgataatgaataagtctcatgagatttgatgagtttattacggggttctgcttttgcttcttgctcattttctcttgctgccaccatgtaagaagtgccttttgcttcctgccatgattctgaggtcttcccatccatgtgaaactgtaagtccaattaaacctctttttgttccctgtttggggtatgtctttatcagcagtgtgaaacaaactaatacaggtatcaaatttctcattctttcaaggcttctaaatttatgtctttttgagaaaagctttctccatactataattataaagtaaatttccaagtttttgtctagtaattttattttactgttaacaacgaacttatatttcatctaaaatttgccttgagtaaagaagaaggtatgcaatcaacttgaatttttatccagatggcaggctagatttctcgatatcatatatttgatattttatgtttattattttataatgtagtacttttctctgtgtgtttctgtacctggattttctattccattccatttgtgtctcttaaagctcaaaatggttttaattattataaccttatattatgtgtcaatatctggttgagttattccccatttattaatcgttttttatttatgcatatttattttttaatcagcttgtctaatgtttgaaagtcttatttttattaagattttcaaatattaagtcagttcttcattcctaaggtaaacatgtttggttgtgacatattattctttttatgcattagtggatttagtttgctaatattttatggataatttttgtgcctgtgttcatgaggggtattagtctgttattttcattttttaaaatgttt

SEQ ID NO: 1881402 - DNA, 4001 bp, Homo sapiens
aacaaaggcattcctaattttgctttaaaaataatattaattcttgcaaaatatactagttaagagaattaatcctttatcacaaacccttgtagcagagcacatctcccgagaatctttttaatcatatatataggataaaatatttttgtatgtatatatattttatatgtatatataaaatatatacaatgcttgtgtatacacacacacacacacacacacacacacacaagcattgtacctacggtggacgcattcctccgctttcaggaatgccctactctttctatggagtagctgtgctttcactactttagtttcttaataaagttgcttttacttggcactgtagagactcaccgtaaattctttcttgcttaagatccaagaaccgtctcttggggtctggattggaacccctttcctgtaacagcaccattagctctttttttttttttgaaactgagtcttgctctgttacccaggctggagggcagtggcgcagtctcggctcactgcaaactccacctccagagttcaagcgattctcgtgcctcagcctcctgagtagctgggattacaggtgcctgccaccacacctggctaatttttacatttttagtagagacagggtttcaccatgttggccaggctagtctcgaactcctgaactcaagtgatccacctgcctcagcctcccaaagtgatgggatttcaggtgtgagccacaccattagctccttaaacaattcaaataaaatttcttttctagttccttattgaatacagtgtatatttactcaataaaaagtatcaatctcaatttaggctattttcctgatggtgaaagatatttagtttggggccaggcatggtggcttatgcctgtaatctcagcactttgggaggccgaggcaggtagatcatgaggtcaggagttcaagaccagcctggccaacgtggtgaaaccctgtctctactaaaaaaaatacaaaaattagccgggtgcgatggcagacacctgtaatccccactacttgggaggctgaggcaggagaatcacttgaacccgggtggcagaggttgcagggagccaagatcgctccactgcactccagcctgggcaacagagcaagactccgtctcaaaaaaaaaaaaaaaaaaaaaaagatatttagtttggcaagattccaaaactttctctcttggtgacactctcagaggggagtcacaaagccatctacctaggagatataactgtcccccaaataatgtaaataaaaatgctgtctttaggaggctgaggtgggcggatcacctgaggtcaggagttcgagaccagcctggccaacatggtgaaaccctgtctctactaaaaatataaaaattagctgggcatgatggtgggtgcctgtaatccaagctactcgggaggctgaggcagaagaattgcttgaacccaggagacggagtttgcagtgagctgacatggtgccgctgcactccagcctgggtgacagagtgagactctgtctcaaaaaaaaaaaaatgctcttacgtgtaccatattttgcattttatacactgctttcacatagaatatctactctgatattcttaaatatctgctgtgaggtagcatgagtcctgtttcatggatgaagtaactagggctcagagatgtaaagccactcaccccaagtcagtgcagctagtgggaaacagagcctgaggctggaaagcaagtccatctgtcccccacacccacgctgccttttgaatagttacagctaccaaacgagaaaggaaatagaatgtcaggtacctttctgcgtcctggtctgtgctctgctgattgttcttaaaggtgttgaagctgctcatgtccacatagccatcattttagtttgctgtggacagggctctgctctgatcttcaaacagcttcctgaacacaccagccctgcaggcctccagggcagaatctggatattctcatagtctgagttcatggttggaatgttctcatagtctgaatggtcagcgctggggaaggagatagatagtggcttggccagtggcaagggcagaaagggcggtcaggggcggtctttgaaagactccactctggacaccatcctgctgaaggagacacctttcctcttgccatctctataaaagatgtgggatgaggggtattcagaagcctggagcgtcccagtttgagacttaagctgaggggagttattgaggcttctctggttgactttcctggaaggcctgtggcagctggattctgaagagggacctggaggaagacagcttcacatgcaatttactctccgtcttcttttttttttgagatggagtctcactcttgttgcccaggctggagtgcaatggcacaatctcggctcactgcaacctccgcctcccaggttcaagcaattctcctgtttcagcctcccaagtagctgggattacaggtgcacaccaccatgcctggctaatttttgtatttttattagagacggggtttcactatgttgaccaggctgctctcgaactcctgaccttcggtgatctgctcgcctcagcttcccaaagtgctgggatgacaggcatgagccatcgtgcctggcctctccatcttgttaaacatcagcgccaggaaccgcttaaaggatgacttcttcttcttgtacttgtccggggagtcgctgtcgatcaggagagagggagagctctttgtgatgggcttcttggtgatgcaggccaggtcgaaaggaggtgggatgtcgaccatggaagaaggcgtggaggtgccgctggatggaaggtggtttctctgggagaaactcccagacacgacagagagatgttcctctttcctctttatcctgtggtcatctaaccccgacccttctggctcccagtacacagagatggaaacaggaatctcttggccttccacggagaacgaccgagggtataaagtgaaggccctgggctttgctggcaaggccctgctggcttccaggggcctcccttcagtgacaacagctctttcctgcctcctctgcggcacctccgatgccaggggctgaggaacctgcctcagatctggtttctttgggggcagtttctgggacggtttctggccaccttcccagagtggggccaggcccttgtgtcgatgttcttcctgtccacggagaccaggctgccctctccttcacagttcatttcttcttctgagccataaccacccagggcatccaatgcagcctgccctccttctcaaggggctgccagaccggcaggcccactcccatcacataggggttggccagtgtgtcatcaacaacctcctcctcctcttccccctcctcctcccgggaggctcactcccatcacatagaggctggccagcatgtcatccatggcttcctcctccttctcctcccctcctcctctcctcctcctggcagtcccactcccatcacataggggttggccagtgtgtcatccacagcctcctcctcctcttccccctcctcctcccagcaggcccactcccatcacatagaggctggccagcgtgtcatccacgacctcctcctcctcctcctcctcccctcctcttcctggcaggcccactcccatcacataggggttggccagtgtgtcatccacgaactcctcctcctcctcctccccctcatcctcccagcaggcccactcccatcacataggggttggccagcatgtcatccacaatgacctcctccttctcctcctccttcggcaggaccaccacatcaggggctgtgggaccctccgccactccatcttgcaagggtccatgctggccacacaaagccccaaccacggggtcctcctccgcacacagccccaactttggtgcctgctctgattctaagcttttcactgactcagaaaaaggagaacagctctccctgcaaaaagaggtgctc

SEQ ID NO: 1881403 - DNA, 4001 bp, Homo sapiens; identical to SEQ ID NO: 316501

SEQ ID NO: 1881404 - DNA, 4001 bp, Homo sapiens
tgaagctgaatatagatatttcatgagatgctttattgaaactgagtttcgttacagccctaatttatctttagtgttttgctttatgcttatgtttaaagtttgactgtactcattgaactgtgcttgatcattagtaatggcagctatctttaatgagatgcatgtcaccctctagcaggtggtatggtctaatagtctgaggattgaattatgattcagaaaggaaatatttcttatatgggactacatcatagaatgagaaagctgcaagtatcttaaaaatgaaataacacttgaagtgggagaaagaaaaaataaacaaaacaggtttcctgaataataatcatgccctcttagtccctgaaaggagaaatcacaattcatatattgctattatagaatctagcagaagcctggtcaataaagtgctgacatctttagttaagacaacccatctgttactctactttgtgctgtaaggaggatgaagagagaaatagttactacaatgcatgtatgttttctagcattaaagctgcagagaaaataaatctgcatgcccttacttcttagaactccaagaacattactgaggttgtgttggtctacatactaccaatacttacactgatggtaattcttagatattggcctagtcagagtacaaagtttaattataaattcatatcttccccttgatacctttatcctaaaatgcaggttttgaagatgggaaagtaaaatccagaaatataggcacaattaacaaagctatgtaattggattcataagaatgaaagtttgggttttagcttatctagccatgtgaccttgggaagcactctttgttaatgcagtttgttaatggagtaactatctacacacttctaattcccagggtagtcaggaatatctatggggttaatgccatggggtatagtaagggcagtgctgtactgaaaggcacaataactccttattgtttttcattttgtggtaaaggtaatcatgtctctttacatgtctttcatcttcactctaaggtttactcctaaaaaaaccattagtttggaaaagattcaactctgcaaccatattagttttgcttataagtttcagagtagtgaatgggaaaataatttgcattgcatgaaaagtagtacttacatttagaattttctttcatatcagttttttatatttagaattttaaaattttagtagagaaataagggataggaaattattctagtcccagctgagactcttctatctcattgtatggctgtaccctaagggcatagttagcatcacttttctggtcacttcctcctgatatatttgggataagaaagggtttatacctgctcctctcccacatcttcatcttgactatcacttctgcatggcattttctctcctccgtcattctttgtgttgccatggtccactgaacacttgttgctggtacaccagggaagttatgtgtggcagacccctttcagtaaaactgagatcttcaaaatggcctttgcagagagggagtagatagaatggagggcaggtcctctttcatcttacacttgtgggaatagtaatccaaaaaattatatgggcatatatacaataccactgaaatcttgggaaactattttaaaattagaaatttgtgggaaattttaatttttattctaagtgttcattgtttaagagaaatgcgctcacggttcgaatttgcttgagcatgatctgtgggtacagcctcactttaacgttgctcttttcttccttgatctctccaccattagcagaggccctttttgtctaaaccactgtcagacttatctctacctacattttaggacacattatcctctacctatagaaactgatcttatcatcttcctacctctagcaagatatatctccatgtcttaagtctggaataatctgggatctgttcccagaggaaaagctcagagtggactttggtaccccttgtgtaacagaacaatctagggcgtcataggaacatcatttgtgattcctgtgaggtcacaaatgatttcatcaatatgcgtcttttgaagggggcaggtttactggttaattgctaaatcacatacatagaagcacatacacacagatccatattctgcctggtcaagaaggaaacactaattctcagaggcagatctttctaaataagagttctcaaactagtaatccactagcctaattcagctcgcgtatatattttatttggcccatacagtttttgtttatttttagaaattgcaccagcattaaaaacggatacatttgatataaaaatccacatttctagcttttctcaaaaatatattaagatctagatccactagacctataattctacatgagaaaatttggctaagctgagtaggggctgccttctataggcaatgtgtatggtcttcattcagccatggtctctaccagttcctgttactgtcccagcatggaagccatgctaattattagtcatcaccgcattgtttctcttatccataaggaaaaaaaatccatttctgttttcaaaatccataactctgagctgtgggaaatcaattaaatgttctaatttttttctaagcctgattagtggcagtaaccgagttcaaatttgtcatattttcatccataacaaacttgcatttttggaccataaagtgaaaataataaagaaggaataaaactgtaaaaacccacctgatcaaaataattataattattattaacaaggggtaaaaatgtagaaagacgtatttattggatagatgaccatcactaaaaaaaaaaaaaaaaattaactctccatgtactaaagcaagaacaaagcatattccattttttccaattcagaatgcccttgaagtagattctacatataagtaatcatggacaaattataaattagaaaagtgatgtaggcttccttgaataaagagaaaacaaaatagacgttatgttttctcaattcttaagatgtaagttgcctaattgtggctgggggagaaggaatcagaaaatattagagatcgaatgactcttgctagcatttaacttctcccacatcccaacatttactgatgaagaaactgaaactgtccatagtatcacaattcatctattgcaaaggctagaaaacaggatttttggtttagagatagtgctgcctttgatcattagaaattattataactcagcacatggaattggcactcatcttttatgtttgcagtctgcaagatgtgcctttattatttttcaataagtcttaaggtggtcattgggcagggaggatggtcctgctatggagtagggagaaacaaatcaacatagttttcatttctatagaatgcttcacctctatagctattagaccatgagactttatgaactaagtttagccactgctctttttaccaacttagtagagagaacagaggcctggtagtgaaggtcaacaactctgatttataacctgtctctacctagtatttaattttaagactatgactaggaaatttaatctttctgaacctcggcttccttatcagtgtagtgaagataatgctactcagcttgtggactgttcacttcttcattgaagaagtgcatattaaacccctactatgtgccagacgttgttcttggtgctagtggagagccagaaaacaaatgctctaccttataggaggcaaggtagttgcaaggattgaaagaatcatctgcaatggtttcttacacagagggcatgttcaatacttttcattgttcattttctctctgattcttttccgaaaccacaccctaaaatcaggagaatctttgctcctaagtttcagtatagattgagaaaataaagcatataaatggccaagaataggactttgtgaattttaaataaccaaccaagatccaatttttttatctttgtgccatgcgtgaatgag

SEQ ID NO: 1881405 - DNA, 4001 bp, Homo sapiens
aaaaaaaattggcaaaaatgctaaataaggaacaattcagaagaattgctgatcatttcaaaaatattatttgcatagcatttataggtagctaaagaaagagaaaaatggcttaatattttaaaaataatttggtcaatttagcgatctggggattctgcgatccccagaactttgcatccaatttccaaaaaccaaaccttacatctaatgtaaaatgacacaaaaaattctaaatccagtctaattcagtagtatatagcttattcccagtgatgtctcacattcgcaagcccgttacacgttggttttacctgtcaccaaaacctttgtatcactcttataaaaaaccacatcactttctataaaaagtgagtggaagaatctaatattgtaaaactgcacgtgcctcgcgtgacctgagcagaaaattcctagtttgggattttctcacaggcatacctaaactgacctctgctcctagcaggtaaattgctagaaggagaagcaagtgtcagtccaaagaaaacccttgttgtgtgattttttttttctctttaatcgctttttaggtggagtacccgctgcattctctaaagtctttgccaccaccagattaccaacgttttcaccaatttgccacctccctactcctctcctttccaaaagccctcattggaaagaactttctctcgtgacccccctattccatctagttccaatcactcccagcgccccccatctccatcggcttcccctctcccgcccagaatccaggttcccaaaccacttaagagaaaattcacaaccctcgcccccttcccgggcgtccggaggaggcgctggggtgggggtgtctgtgggggacagggtttcctggggtctcctgggtcttcctcgcgcacccccaggaggtgttgcagggggaggggagcgcgggtgggtgggaccgggccgggtgggggaggggtgagggcgaggaggaggaggaggaggaggcggcggcggaggagtggtgtgtgtgcgagcgtgtgtggctgggggaagccattgcctgtttaatagttgctgttgctgcacttccgcttctctcccagcgagagagagacacgagtggccaggcccagccgcagccgcagcagcagccgccgcggcggcacggaggagccagacacaaagagaggtacggggatccccccagcggcccgccgccccccggccgcgccgccgggcctcggggacacccctcgccgcctcccccgactcgcgccgccggggccgccgggccgcagggcacggggccggcgcggggggggagcggagaggggctggggagccccaggggtccggggcccgcccgcgggggatgggcagggaccccgggccgcgtggggtgcgggggccgcccgcattgaggacgggggtcattgtggctcgaactgtcagcgctgccccaagagccccccactggccaccgaggggcccgggagcgggggtgggagggagttgggggagccccgttttccccaggggcgggggttcgcggggattaacccctccggggcggaagggctcattgttatgtcttcgctgcggaggccgacccccccattccccgccgcagcccctatccccctacaggagtggcgatcgggcgtgtgctccggacccccgcccggccgcatagctgtgagcagggcggccagaggcaggcaggccgggaggggcgtcggggcgcggcgcgggggggcctcgggcctcgtcgcccctgccccccgccggcctctcccttcccccacccgggcacccgctccccgcctccgtccccctgtttcggcttcctctcttactccttcccgcccctcctctcttcccgacctcgccaaactccgctcgtggccccacagtctcacccgggccaccggcccctcacgacccccggaaagcggacaaaaacagccccgaggccggccggccgccgggaccttccctccctgccccgccgtggcgccccgcgccccccgccctgccctccttcgcctcccgggctactccctccctgcccagcggagagccccggggggcgagggaggggcctctctcctagctccagaccgttttcccacagcgttccccacttggggccaaaaataaacaagccgcgtccgatttgcaaaagccttaatgggcctgcagactttgaaaagcgagtggagggcggtgggcggccgcgtgcgcccctggtcaatgccctcctgacagcacccgagttccttatttacactggctgcatggtttgtgtgtttctgttttgtttctctccccctgcaggggctgtttgcggggtggggtggggggttcgctatgtcggatgacgattcgagggccagcaccagctcctcctcatcttcgtcttccaaccagcaaaccgagaaagaaacaaacacccccaagaagaaggagagtaaagtcagcatgagcaaaaactccaaactcctctccaccagcgccaagaggtactgtgctcttttttttttccacaggcttcctatttccgaactgcctcttgctgcatttggtctgcctcccaatgaggatagcttaaacgctcctcatggtttatgtgttcttaaaaatgaaagaagggccttggaagccctaattattttctctattgctgcttctgtttttaaatcattgctcacatgcagctgttgcggcttgcctctcgcatttcttgctgaagtttgtaagattcctcgttacttttattagtgacccccaaatctgatttcagatttcttgtcctactaatggttaatctgtgaccttccccaaggccatgatcccatttcttaattactaataccagcccagagaactgcatcaaaatgaattctgtgaccattttaccttctcctcacctgttgcatggatgatcttttctaaatagagctttcttcacaaattgcataaggaataagaaactcatattagcaggtacaaaatttagtaggtgaagacagatgttttctggtggaatttaaagagatttttctgagagttgaggcaaatgaatgaatcagtaagtgactataaaatggttattctaggttatttttgtggttctctttaaaaacttcagtttaccaatttcagggagacttgtctttttttcatgctatttgctgtcctcatgctgtgaaaatgttactttgccttattttttcaatttaagtggtctcccttttactttattcttttcctcttaaggccctgaaggtagctactttttatccctgccatcctaagcggtcaccctttttctttattcttttcctcttaagcctctggaggtagctactttttacccctgccatccttcagtaatatcctctgatcgccatgaccctcaaaatcatctttagtggattcctaggagctctgagacaccctttcataaatccttctgctctcagagttaggcagttgttaaaaaggtggcaaaccaggaagatagtaagaactccaaatgatgggatagggatacccttcttaaaaatttttaaaataaagtagaacatgagactttagatctctccactgagtagtgagcctggaagtcagggtttgagagtttgttctgtcattctccctgacttgtaatttgaaaacttggcagtgttttggtgacctaaccatgggctgatgaaggagtgacttttaaaaaatagtgtggaggtcttaagtggcaaggtgcctctgcaagattgttctcatttttataggtttggtttgattgtacagcttctcaggaggcctgactgaccctcactgattagccctgtgcggttttcctggaacctgacatctactctgcccacttgggacgggcccttccttaatactgcgccccacctcaatcctctaggctctctgatcctcattcacgttttggcctcacgtgctcaagccaggatacttgcttttggtaatttgca

SEQ ID NO: 1881406 - DNA, 4001 bp, Homo sapiens; identical to SEQ ID NO: 316519

SEQ ID NO: 1881407 - DNA, 4001 bp, Homo sapiens
taaaatgtttaccctagaaaagtaattgatattttagattacaataatattactgaatatcttatttctccatctgtccactcttcatccattcgtgcatactttattaatatgcggttataatgtaccctatactatattggataggagagggaagggtaactaaaacatacccagcaacacactctgtgccaaatgcgtatttatttatgtttattcatacataatattttacatatttatggagtacatgtgatatttttttatatgcatagactgtataataatcaagtcaaggatttgaggcatccatcactttgagtatttattatttctatgcattgggaacgattcaaatcctctcttctagaaacactgaaatatacaatatgtgttcttaactatagtcactctacagtggaaagataggatttatactttttatctaactgtgtatttgtgcctgttaacctacctcttctcatcctcccctcacccacccaacattcttagcttctagtatctattattctactctctgcctttacatgattaacatttttagctcccacacatgagtaaggacatgcggtttgtctttctgtgcctgggttatttcacttaaaataatgatatacactttcatcctggttgctgatacacgattacattcttttttatagccaaatagtacaccattgtgaatgtataccacattttttctttctctatttgttgattgatggacacttacatggatcccatttctttactatcgagaatagagctgtgataaacatgccagtgccggtatccctttgatatattcactggtttctattcctttggatagaccctcagtagtgggattgctgatgaatatggtagctgtatttttagttttctgataaatctctacagtattttccacaatggttgtactaatgtacattcccaccaacagtgtataagagttcccttttctccacacttcaccagtatctattgctttttgtcctttttttttttttttttttttttttaagtgaagaggtgactttaacaaatatattctccagaaatctccagaacctttgcgagggtcagggtgagaggtgccgccacgatgtaaacagaacagctgagtcctccgggtaggcgtcagatgcgatctgcacagaccgcttgtgtgggaggcatgtagtcggaggcgtttcctcaaatgcatcccctgtctctggcagagcacacaggccccggggccccgtggacagggctggtcccagcttatgcgcaccacttcctgggcgtggggggtggtatgccagaggctgcccgcagcaggaagcccacgaagaggccagggcctcttgatccatttgtcggagaccccagaaggagccaaggggcagccaggggacccaggcaggggtgcccaagggcacagcagctgcaggccattggcaaggccagaagatggtgagtggaaagcagggggcccgtggagagaccccgataaggggccgtttagctgggagtcctgcatttgccgtttgtgtttcatccggcgattttgaaaccaggtttttatctggacctctgagagctgcatctccctggccagccaattccgctccagagggcccaggtactggtggtgccggaagacgccctccaaggcacggacctgctccgtggtgaaggctgtgcggacaccgggagccagctaggggtttggctccttactcaacccagccacagtcctctccggcgcatgcagatttgacgagctagcctccttggtactgacagcctgagggggctcccgggtgccgaacgtctggcccgggccagggaggctcccgggggagacgtcggcaggcctgggggtgtgggtcgaccctgagcagctgctcaggcagagccagtccacggagccaaagctggagggctgctgccagccacgaggtggggaggaggagagacacatggcggtcaggtgggccggagggaaggtcgggcggggctggccaggcgcaggatccagcttgctttttgtctttttaataatagccattttaactaggataagatgatatgtaatctttagttttgatttgcattttcctgataaataatgatgctgataattttttcgtatacttgttggccatttgtatgtattcttttgagaactgtcttttcatgttctttcccacttttttttttttttttgagacagagtttcactctgtcacacaggctggagtgcagtagcaggatctcggctcattacaacctctgaatccctgattcaagtgattttcgtgcctcagtctcccacgtaactgggattacaggtgtgtgccaccaagccaggcttatttttgtatttttagtagagacggggtttcaccatgttggccaggctggtcttgaactgctgacctcaagtgattcgcccacctcggcctcccaaagtgctgggattaaaaatgtgagccaccttgcctggccccattctgctcactgtttaatggaatttttcttttttttaattgtttagttgtttgagttctttgtatattctgattaattccttttcagatgaatgatttgcaaacattttctcccattcaactgtcaactggttgtctcttcactctgtttcttttactgtgcagaaggtttttagtttaatatagtctggttagcctatttttgttttagttgtttgtgcttttgaggtcttagccacaaaatcttggcctagactaatattctgaattgttttctctgtgttttcttctagtagttttataagtttaggtcttacatttaagtgtttaatccatcttgagttgatttttatagatgaggagagaaagaagtccagtttcatttttctgaatacggacatccaattttcccagcactattttttgaagaggtcgtcctttctccagtgtatgttcttggtgcctttgtagaaaatcagttgactgtgatatatgcatttttttctgggttctctattatgttttatctgtctatgtgtctatttttataccagtaaccatactgttttggtaactacagccttgtaatatatttttaagtaaggtaatgtgatgccttcagctttgttcattttgctcaggattgctttggctattttgggtcttttaatgtttcctatgaactttaggattgttttttctatttctgtgaaaaatgacgttggtattttcataggaattgaattaaatctgtagactgctttgggaattatggtcattttaatgataacccttctgatccatgagcatgggatggtcttttcatttgtttgtatcttcttcaatttctttcatcagtgtgttacagtttagctgatagagatctttcacctctctggttaaacatattcctaggtattttattttttgcatttattgtaaatgatattgccatctttgtttttttctttggctatttcattattggaatatggaaatgcagctgattggccaggtgcagtggctcacgcctataatcccagcactttgggaggccgaggtgggcggatcatgaggtcaagagatcgagaccatcctggccaacatggtgaaaccccatctctactaaaaatacaaaaataattagctgcgcttggtggcatgcacctgtaaaatcctagctactcaggaggctgaggtaggagaatcacttgaatctgggaggtagaggttgcagtgagccgagattgtgccactgcactccaggctggtgacagagtgagactctgtctaaataataataataaataaataaataaataaataaataaatagataaatataaagaaatgcagctgatttttgtatgttgattttgtatcttgcaacttgactgaatttgtttgttacctctacaagttttttgacggagtcttttgttttttctaaacacaaggtcatgttgtctgcaaagaggaacaa

SEQ ID NO: 1881408 - DNA, 4001 bp, Homo sapiens
aattagggaaaatgggaaaaccaatgagtacatttttaaggggataatgcaaaacaacaaagagattaagttggctgcactgcaactgtgtttgtccccccagacacgagtgtgggcagtcaaggacccttgacagccccagtgaaccccgtcttttctcctccccctgcaggtgggctgtaaggcagccatggtctttttccaatattgtgtcatggctaacttcttctggctgctggtggagggcctctacctgtacaccctgcttgccgtctccttcttctctgagcggaagtacttctgggggtacatactcatcggctggggtatggtaccagggagggcttccaggctggggacagagggggcaaggcctggagaactccctagggggagggtgccaacccagcttgcagtcctacgtcttgcttagctgcaggtcctgcctgcaaggatatcagccaagggtcaagaaagtcctcaaaatgtctgatcccaggacaagtccctcaggttgcagctgcacctagggctgacctgtgggacagattttgtgaacatctttccatttccctttagttcccgaaatacacagggccactgctaatctataaagggcctctgtcacaattagaaagagaatgtccgtctaggtagacacagcccttcaggcatacagcttcaccccctcagtggagcatccctccgtggtgaacaacctatgcaaccaaagacagcagactgacaacccacccttttctctctccctccctctccctgcttttctccaaaatctctccctcatgccctctacccctgcttcctgtgccctctctgctctttcactctccctgggcctgacaggggtacccagcacattcaccatggtgtggaccatcgccaggatccattttgaggattatgggtgagctgctgccccacacactcccccggccgccatcacttgggcaggccccctgggtgggatgataatgccatctggccttggtgagtggacaaaaaccacagctctcgggccagaggggaggctggaggaggacctggggagcaacagactctgggcccggggttgctaaagtgctcaggagcagagctggggacaactgggggaggtgctgctgagtctctctctggctgaggacaatccctctcattcctccccacggtctgctcaggtgctgggacaccatcaactcctcactgtggtggatcataaagggccccatcctcacctccatcttggtaagataccctcccaccacctagagatggggaaacaggcccaaagggcaggcaacttagcccaaggtcacatgggaaattagtatctaggtcagaactgaaacgtagcttcctaatgcccaatgcaggatcatccccacccctgtcctaccagttcttccttgagcgtaagcggattgggagcacagtccttagggatttgaaggaggtagagttcccggatgacctgcccaaaggggaaatgccagaggagaggtaagatagagagaggggcagcaggaccctgggaaagaagacaggccagcagtcaaggggcctgaacacctcagccttcccgctctgactgcccgaactcgggtccccacccactaggtaaacttcatcctgtttatttgcatcatccgaatcctgcttcagaaactgcggcccccagatatcaggaagagtgacagcagtccatactcgtgagtgtgggcctagtgcctcagcccccagtacctccatccccagtcctcaaatcatcccacatctccttgaagtcctcccaccccaaacatccagagtcaccaaagagccacattgttctttcccacctccaccatggcctggctcagcccaccaccatcccctgctccagccccaccctcaccaggctgcactcagagccctgcatgcttctcctgcccacactcacctagcatccttcccaggtatgcatctgctgccaagccagggagctcaagaggacaccgatgacctgtgtcttgttcataccatgtgcccagtccctggcatgtgcctcacatggaaaaagggtgcaataaacacatagtagatgaatgccctgggggagaccccagtccaccaatgagacagccatgttcgggactcagtattcctcagtaataatgatgacacctgcagtttacatgccaggcacacgctaagggatttccatgcatcatgtcatttcatccacacagtcccctgcaaaattatctttactttacagggaggaaatgacatacactcccttctccttgagggttttggagcaggtcaccatgggcagggagaagggggcacaatgtccatggaccagggcttggaaaggtgtcaggactgttccccctgcttgggaggactggaggaagaggcaggtttttttgcgggagcaacaaggcttgaagacagagctaaagaaacatgaaaaatatgaaaagggaggctgtgggaaggcaagtagggtctgcatgctcacagatgggagtaggagattgagtatcagtgctattgacacaagacaaacctgggacgtcccacaaggccttccagtcctgggattcttcttggcctggcttctctttggagagtctgtgctgtggttctaagattcctggctagaatgtcacagactgctggatttaggattctattctggaatcctgtgattctccctgatgagactaagactcacattcctggtgtgactgcattctctcctgccaggtgtgtaggcggagcttcccttcctgtctgagaaggaaaggctgggggggacggggggggcatctgcagtctgctgaggggcagcacatcgggcctgtgcacccttatcctctcctttgccgatgggaccttatttcccccaacttacaatggttcaaaagggcctgaatctgaggcaaacagagctggccatggtcagggccaggtctgtgtggtgagacagaaaggaaacagttgtcagcaggcaaaaggggtgggggcagttggagatgaagctcctcaaggagaagctgtcagctcccactctacacctccccataagcctttgatttaaagaaagcctccatctgttagcctccggtgtgtgggatagttttgcagccgaagaggggtgggcattgctcaggatcttggcatggctgagaaccaggtccaggaaggagtgggaggggcaaggccagctcctctgcccccagcttgctgtgggacctcaggccttgggctagacttccttggactgactgctaaggcaggagagacagagtcagagaccctccctatccacaccccacctctcctagccagggagcaatgggttcacactgcctggatcagctatgaggtcaggtggctgggaggcctgaaccaggaagagctctgggccatgggaggcgggtgagcatttagaatgaatgctgaccctactgagcacacaaagctgtgaagaaggagctggtccttcagagcacgctgggagtatatgcactggtgtggggaggtaggaggagggggatgcaaccccagagaaggtggcaacttctggagaagcagacacagcagaaaaaacacagatagagggcgatactgattaattttgggttgtccctggtgatcaggtatgaacttgggtccccatcaccctcccaagtggccctgggcatatgtggtcagcacccagttagaaagacttgtttcctagtacgtcttctctcatggtctctcatggatgcactatacttcatagtacccaaaacacttccaagttcatagtgggcctctgtttctataatttgactatgtcgagcatacacttactgcattatacaaattggaaaaactgagaccaggagaggaggaaccagaatctcttgttgcctaagagattttctactgctcttgatggctgagagcatcctctactgcaatgatgaggtaagcctctcctagac

SEQ ID NO: 1881409 - DNA, 4001 bp, Homo sapiens
cacttcctcttgttcgatagcttatttcccctgttgttgcaactgtgatggcttctgagagtagcttgcaaagattctactttccaaggagtgacctgtgctagtttcccctttccttttgccagtcctatgggcagaggacttgctgcacagaatcccagctactcgggaggctgaggcaggataattgcttgaaccagggaggcagaggttgcagtgagccgcgatcatgccactgcactccatcctgggcaatagagtgagactccatctcaaaaaaaaaaaaaaaaggatgatacgtgtatgcctgccttagtctaagatggccctaatttcttccagtctatgaggagtctggaattggagccacctccaagtacagataacaggggaagtggctcactttggtggttctgttttggatatggatgcagccattcagggagtggccccaaaattctaccttttccgaggcaaaactatgagtggccttgtcttttccttaaacttttctcctccaaggcagctccagattttaacttcgactttattttaccctgtaaaaatattaaggcaggctgggcgcggtggctcatgcctgtaatcccagcactttgggagcctgaggcgggcggatcacctgaagtcaggatttgagaccagcctggccaacatggtgaaaccccatttttgcttttaaaaaatacaaaaattagctgggcgtggtggcaggcgtcttaatcctagctacttgggaggcagaggcaggagaatcgtttgaacccgggaggcggaggttgcagtgagctgagatggagctattgcactcaagcctgggggacaagagggagacgtcactcaaaaaaaaaaaaaaaaaaattaaggcacaatacgtgaacttgaagaacatacagttctcttttatttaacaaacacttacgtaaccagcccggtgctgtgcgaagtgctttacattgtctcgtttgatttacttaataaactcctatttgaatcaaatggggtggagtaggggcttcctggaatttggcttacctcgccatctccccccaccctttcccctcagtggagaggcaaccagagagaaaagaaattgagctgctctgaagggcaaggcctcctcctacttcccgcagctgtttcgccagacttgaccttcttcccttagctagaggcagggggtctccatccctcgcccagatctagttggtgggaaggtgggtggcttttttcgggtcactggcgcaccctctctacttccagccacctgctcgggttccatcccggctccaggctccccggagggcggcagggacattccaatcctcccacaaccctcacggatgttgcgggggaggggggtgcaattgctcttctcttccaacacccagctttttcttctcaatctctagtggcctgagtcacccccgtagaggaaattaaggattgatgaatggtttgaaagttgtttgtttacaacccacccgttggcgaagccgcatctccagtgacagaggcactttctgggcaccgtctgtgctctagcagacaattgagagccaggcagccaagatgcctcctcgccagaccaaatatggtcacaagagctaagcagcctctcgtggaaaagctggccttgttggtgtctccccgcgccggggcgcacccgggccggccttcgggcagaatcgcgggtcagtgcggcgctccgggtgctgcaggcctcggcgcctggctgcaggggagggcgcggtgtccaggaccggcccttcctaggcctgagcccctcatccgcgtgccctccgccacccccggccttggtttcggtccacaaccccttgatgaaacaggctcaggccactttccctttgatcccgccccaagtccgtggtaaactcaaaggaatgcagatgcaggtctgagcgggagaggtccgcgcggccgggaggagtgggtggggggcacccgtctcctcttacccagtaaagtacccatcacgcccagggttttctggagccgaggtgggaggaggaggaggaggaagaggaggggcgagcgggggctggccggctagggactaggaggtcatacataattcaacagctcaactttcgggcccgcctctttcctgggggtgggagtttgctccaaactttgtttatgggacagtccgggagctgctgcggccgcgctgtctgcttctcctgcgcctccttttcgcccagcactagcgccttaggccagctcgggggatgtgagagccgaagcccttagactgccaggcacagagtcgggtcgggatttgtcagccaagcctcggctccagctccgcaatctcgggactcacccgagcgacccaggcccgacggcaagttcgggcgggacggcggccgccgcgcgctcaggctcagcttcgctgcccgcccaggtagtgcccgctggagctcgcgcgctcatccggcaccactccagggctccaggctcctcgggcttccggagtcgagacgtggtggagttggctcgggctgaacttctttcggggggctgcctgtcctggaatcgtgcgacctttcctttgccatcctgcggttcagcaagccccgagtgcagttattccctccacccctcgccctatcttctcctcctccaggcaacttctttgcttcaagaaagttgcataattctcgaggccaggagggacccctcccccatcctgctggtcttaccgctgagtgtctgggatctccaggcgggcaattatctgtctcctcgtttccttttccctctattctttctcccaccatctcgccctctcaccctgtaaccctcttacccacttcctccgactttaaataaaaggctgatctgaccttctttttgcagaagatgaatccggcctcggcgccccctccgctcccgccgcctgggcagcaagtgatccacgtcacgcaggacctagacacagacctcgaagccctcttcaactctgtcatgaatccgaagcctagctcgtggcggaagaagatcctgccggagtctttctttaaggagcctgattcgggctcgcactcgcgccagtccagcaccgactcgtcgggcggccacccggggcctcgactggctgggggtgcccagcatgtccgctcgcactcgtcgcccgcgtccctgcagctgggcaccggcgcgggtgctgcgggtagccccgcgcagcagcacgcgcacctccgccagcagtcctacgacgtgaccgacgagctgccactgcccccgggctgggagatgaccttcacggccactggccagaggtacttcctcaagtaagtcagcctggagccgaagaaggcaccaagtcacagtgcccaacgcgcgcgtgtgttcgtgtgtgtgtgtgtgtgtgtgtgagagagagagagagagagagagagagaaagagagagatggtgcgtgtccttccacggttatttcacagatatggagagctggaagcagggagtgagtctctgagtgttggaattgtaagggatcagaagcagggatcagaagcagtggtgaagttcatccaccataaaacacacaggtgactttgccttgaatctgcaggactgaagccaactcttgggcacagacccttagtcccttccttggccactctaagtcagatagtccagagccaggccctttgggatgtgacaccgagataaatcagagaaaagctgtgaagcttggggaacagagggacttttggtgaagtaggtggtctgcagtttctatcttcttgggaaaagcaagctggaaaagtgaacagtggttggtaggccatagtgctcccagctgggtgacataatgaccacacagcacagtgatgttattagcaactgtgtggtggagtagttgtgggctggacaaatcaatcgtgtggaaattgttaggagttttattacattaaacttgttaacctaaaataccatcaaatcacaagcctg

SEQ ID NO: 1881410 - DNA, 4001 bp, Homo sapiens; identical to SEQ ID NO: 316559

SEQ ID NO: 1881411 - DNA, 4001 bp, Homo sapiens
aacgagttcaacttcagatgggaggttgaactccattttcccgaaggccgaggaaatgtatgcgtgtgtgtgtgtgtatcgtgtgtgtttgtcagcatgtgcgtctgttacgtacacgtgtgcgtatgtgcatgtgtattatgtaagtgcacatgggcatggtcgtgtatatatacgtgtgtgtgttggggacgcactgggaacagagcatggtgtctgcgtcacatgttgtttctccgcacctggaggcctctgagtgctgtgtctgcgccactgtcaccagcctccccgtctggccacacagatcctcctgctgtgcatgggctgcagccatgctagagggaccctccaatctcccctaggtggccccaggcttagcaggtactctataaaagtatgttgagacagtgtacttttctgcttaaggtcaaagggctttgcttttgtctgtgtgtggagagccgtggcggctgggagaaggctgggtgggtgtccataaacgcgtgctaaggatggagccatccatcaaccttatttctcctcttgcctttgcttagaccatagcgtggacactgctatatattacatattgaattgggttcccggagcctctggcctctccccggaaacaagtaagaccttctctgaagctgcttgagttcctgtgggctggaaacagggcagggaaagagaggtttgctaactggttccttcccagccagatgtggttaacgtggcctctgaaagcaccttactcatccctgttgagctgctgacctgcagctccacatgtacccactctgattcactgagactcactccccctccagtgaaggctgccccacccgcagatcaggggaccgcacgtgttagggccttacctagggttccctggccactgccgcctgcaggccctcgctttgttgtggctcttcccaagagtcatcaggcgctgttgctcacgcataagcacacaggtgacaaagtcccctgaagaattgcccaccagtgtgacctgaacgacccctttccccaacaccacacatgagcactcaaactggatgtggaggcccggctgtaagagtgcccatctgcaaggctcagctctaggagctgtccccctgccttccctgaccatatggggcacaggttctgtgctggccccagtcccagatggtggaaggcaaggaaggagaacccacatcacccacctgccgtgcaccggggggttcgcgtatgactttgtttaatgccctggcagagtcttctgaggcattacactcaccaccgccacagggagaagactggagcaagaggaagagaatttgcatttgcgagtgcacgctgcgttcccgcgacagccagacactgcattacctcatgcagccctcacggcagtctcatgagatgtaatgcttagttctggtggagctggggccagaacacactttccctgactcagagtcctcactcttacctccaccttctcactactcaaaagtgtggcctgcagaccagtagcgttggtatcacctgggggcttgtcagcgatgcggaatcccagtctgcattttaaccagatcccggacacacatttcccccgcacagtaaggtctgggaagcactgccctgcatctagtaactcttatgtgagagaaccctgggaggggaggtggaggccagtggggttagctgagaaaaccttctggagggccagtggcagagctgagccacagaacaggtgcgtggtggagcagaggcagcatttgctaatcagaatggcatctgcgatgccttcgcaggctgtgtggagaggggaaggtgcggccttgtggccccttgtctgtgtggaagggcaggcgactctgtgggggaagggtggcgtggagacgggaagcgtgattacccacacaggcctcgagcacccgcatccagggaccacggccgccaggaggggctggactctctcaggagaagcgtgcgtctgggaatccccgctgagggggcttgtgaatgtgggatcgaagcgcttagatcttggcttccggaggtctccgcgggtgtccagctttgtacagggtgtggggatgagtctgccgaccggactcccatgtcagctttgtgtctggacagaacaaggggcgaggaagcctggtcgggccactctgggcctgcatgcgtgtgggcaggtgtctgttggtcttgggcaaagggcgaggtgacactgagggcgtgagggaggaggccccaagagagcagggaagcgtggaagatgccagctggcctgggggcgtggatgtgggtttcagcagagtgcagacaggcagtggggcgtggggcctccttggggcctcgctgggctgtgtcgggtgcttgctttcttttctcctttgcctccttccaaggtgcgtccacagccagcgtttctttatgcttttccctcagtctgagacctaggaacaggagaggccagtgctgtgaatttcatgtttcatggcctccccagcaagccagcccacgaaattccacacagggaggaggaagaggaggaggaggaggaggagctgccactgtccccgaggggagcagctgacactctccccttgactgcaccaggccttgggggtatggcgcctccacggacgtgggctgggggaggataggctcctaattagtttggatgcgcttggagtcagggcaccttttccccagtgggcagttctgcaccctgaacagctgtggggagaagggcagcgggaggacggccagataattccagaagaaaggctccaggagtggcagcagaactgctgttattttcggaggagtctaattactttccccaggtaatggcttgaagtagcatctaattttatttatttatttatttatttatttttatttttttattatactttaagttctagggtacatgtgcacattgtgcaggttagttacatatgtatacatgtgccatgctggtgcgctgcacccactaactcgtcatctagcattaggtatatcccccaatgctatccctcccccctcccaccaccccacaacagtccccagagtgtgatattccccttcctgtgtccatgtgatctcactgttcaattcccacctatgagtgagaatatgcggtgtttggttttttgtacttgcgatagtttactgagaatgatgatttccaatttcatccatgtccctacaaaggacagtaactcatcattttttatggctgcatagtattccatggtgtatatgtgccacattttcttaatccagtctatcattgttggacatttgggttggttccaagtctttgctattgtgaataatgccacaataaacatacgtgtgcatgtgtctttatagcagcatgatttatagtcctttgggtatatacccagtaatgggatggctgggtcaaatggtatttccagttctagatccctgaggaatcgccacactgacttccacaatggttgaactagtttacagtcccaccaacagtgtaaaagtgttcctatttctccacatcctctccagcacctgttgtttcctgactttttaatgattgccattctaactggtgtgagatggtatctcactgtggttttgatttgcatttctctgatggccagtgatgatgagcattttttcatgtggtttttggctgcataaatgtcttcttttgagaagtatctgttcatgtccttcgcccactttttgatggggttgtttgtttttttcttgtaaatttgtttgagttcattgtagattctggatattagccctctgtcggatgagttggttgcgaaaattttctcccattctgtaggttgcctgttcactctgatggtagtttcttttgctgtgcagaagctctttagtttaattagatcccatttgtcaattttgtcttttgttgccattgcttttggtgttttagacatgaagtccttgcccatgcctatgtcctgaatggtaatgcctag

SEQ ID NO: 1881412 - DNA, 4001 bp, Homo sapiens
tttccctccttcccgcttctgcggaaattaccatcatacatttattaatagtgtcttatctatacagaccagtttttatggctttaccctaaacattgtaaggtatttgcaaaacagaaacagacagtattacaaagagaaaataactagtccgcaatagtgaagaacattttaatatcccagagaatattggaaaccaggggatcaaagatggggggagggacgaatgtagattgcagtatagttgcagcagaggaggaagggacgaggacagggggagagaccgaggactgtgcccgaggcagcccccactccctgtttcactgagcctggcttccactttcccccgtgcgtggggtgtttggtccctgctacgctgcacagagggtgaacatctggccctttgcttgcttccaggttccagccatggctctagccctgatctccaatatggtttctgttctgttcctggcccatggagatgtttatctcattttcaagccgactatgccctttcctcctgttgcccccccatcggatgaaaacaattgttatctaaaactcatcattaaaaagtgatacatttttgttttgaatagcatatggaggttattatttttccagaaattttctatatttttatcagggggtgtgtgtgtgtatatgtaaataaactctctatacctttgtacatctttttttgttcacttaacagtgtatcttgaccatccttatacctaagtcagccttctttgataaatgttgctggtctcttggtatgatttttctttttactatgaaaacctttcaacatatacaaaagtagaaagcatcatgtaatatttctggatgccccaatattataatatccatgcagcctcaataactatcagcccttagccaatctttgttttatgtctcctcccacccacttttcctcttcccctgattattttgaaacgaatctcagtcgtcacagcatttcgtctgtaaatgtcattttcagtctattagtttcttaaaaacacatctgctgtggccgagtttagagctgaggagagttatatgagctcatagtgtcactctgtcttcaagttcctcagtctgaaatcagttggtacaagggaagaaaatagagagaggcagcactaacctctagccaagcacactttccatctctctgcagattgcctcatgtcaggatgttagcgtgaccgtcacgtctggaaggctttatggctgatataaattcaggtccgttgttcactaggcatgaagccctccgttgtaagggaaccagccatcaccctcattacgagatgcataaatgtaggacttgaagataaaagctattgggttcttttcgtctctctgacacctgaagatgaatttcttgaaccttgttctcgtgtttaaaaaaaaaaaattaaccaagattgagcctgtcagtttctatcagagttaaatctgagtaaaggagaaaaaagcttgccaccttttaaaatagtgattccttcactccctgggagttagaaaactgggctaagtgtttttgtgtagcccgtgtgacctggaggccgtgctataacccctgcaggaattactcataaaaagggagggatgtacctgccctgtggtagagatcagaagtctactctgaggttgttatttttaaataacatcagtggaaaaggtattttaaaaggaaaactctgtacagagaacccaagcgggattgtgttgctgtcattgtgaccgtctcttacctgatggctctgcctcccgggcaggctaggagctccgggatgacgtcccaagactcgggcgcatagcgggggctgctgaagatcggagtgtgaggctgagagatgaggtccaggtggagcacgtgaaaagcttcctgtgtctgaaaacacgactccttccagttcttttgtctgtctgcacattatgagtattttggtactactgaatccgtttttaaaagttcaccacgtcgtgcctgacacaggtgtctcctgaaagaatgagtgaggaagtgaatgcgtggaaggggtgggactgggaggcagcccttctgttctgtttatgccgtgcagaccaatgccaggcacttcgatgtttgttgagtgaatgcaggaacagatgtgtagtcagagggcgtttcctccgcggtgctggccagctgctaagtcaggctctgtagtcccattactggtcttagagaagttactttcacattcagtttttgtttgtaaagacagtccatgggaaagtttgttattctcagtttgtttgtttgagacatagtttctttcttgtcgcccaggctggagtgcagtggtgtgatcttggctcactgcaacctccgcctcccgggttcaagcgattctcctgcctcagcctcccaagtagctgagattacaggcgctgaccaccatgcctggctaatttttgtatttttagtagagacagggtttcatcatgttggccaggctggtctcgaactcctgacctcaggtgatccacctgcctgggcttcccaaagtgctgggattacaggtgtgagtcaccatgcccagcctattctcagttttttatttggctcattgtgtgtgtgagccataggattggtcccatgaggaattacgaagtagaagacatgcctcttgctttcaaggaagatataacgtgagggagatagggtagataaaacttaatgaaaacgcaaatgcctgcggtgtcaacactgagtcagtactgctgtttagagatatcccatggacaagatacatagactttttgctgtaggaactgtaaattttactgagtggctcacctctccctcagcttaatattctgccttcagctgggcatggtagcctgcacctgtagttccagctacttggaaggctgaggcaggggggtcacttaagcccaggaattctgtgggtgtctgcactaagtttggcatcaacttggtgacctcctgggaacgggggaccaccaagttgcctaggaagggatgaagcagcccaggctggaaatgaagcaggttaaaactcctgtgctgattagtaatgggattacgcctgtgactagccatgcactccagcctgggcaacatagcgagaccctgtctctaaaaaaagaaaccaaacaaacaaaaatggagttctgccttcaaaatgctaagaagtgggtatcacattcccttctttcctctgaaaagtctctcggagtggtgtttggctttgcaatgcaggcgtagcctctaagagtgctcttgggatagaccaaactctgtgcccgaatagaaagctcactgggcaggcatttgccgagggtttggctatgcagtagagagaaaccagaccctgtcctccaggagcttgcagtgggacgtgggtctggacagggctacagtggaggcacagcggcggatgatgggcccgcaggactgtgtgctttgttgcattgctgcaatctgtttcctatgccaaataaacatcatcgcattgaaagaaccttatttgtaatccaggcagcagaaaggcttatctgtaagcatcttcctggggaaaaaaagcaaaatagcacagttgaatcccagtggcatgtgtacaagagggaccttctgtaacaaaccacgtgtggaaaggactgagctgagcgtgaccagccccacatgaagggaatttctatatggctccatggccatctcaggtgcagacttcagccacaggactgcatttcttctgtgggttcctaagtgaaacggatctgaagttcccatccctctgcttccagggtagcagcagaattggctcttatagaaatatcaaacttttaatctgagcctggggttgaattgaacatctgtctcctcctcctgccttaggtgacttctttaaatgagctgcttactgttgatcatagagaacccctgtgatcttctatttcatggtagcagaattgactccagcatcaaggagctgccc

SEQ ID NO: 1881413 - DNA, 4001 bp, Homo sapiens
gaccagcctcctgggttcgcagagggtgcatttggtcttctgctctcactgcccgaccccatgggggaaagaggtgcatctccatttttaaattcctcctttgagctatagtggcaaactcagcaactaagtagatcccaagcctggtagtttcttttttcttctgggccttgagagctcatgtccccgcacctggaatctttcaaggatgtccgggccatccgggaattactgcgtgtgcacacacacaaaaacacgcccctaacaccagaggctggctgtatgattctgttttcgagcctactgtattcacctgtctgcccgtcagctacttctaggagcgtcaaagggcctcacccagagactacagaccctccggtggagaagtgtactaggccgtgtctgcagctggagccctcggcctgaaatgttctggctttagcaaagcggcgacagtgtccaaccccagtccccgaggagggatgtcagccctgggcccctgtgagcgctgcagattcgtcccaggaaagggtgaccggggtcgctgctccgggattaccagctaaatacctgtattagcatcctcagcacgcactgggagacgcagctcaagtccgctccccttcttgcaccctcatatatatttggtgcaaaatggagaaccttttcccctacgtttgtgtaaaaatatatgtaaataaagccttaaaatagtgttaccgacccccttttccactcgcaataacattgactataaatgctgataattccaaaagaatctcgactcttccttgagtagtctggagctagcaggtgcaagtttagaaacaataactcatcactgagggaggcactgaaaattttataactgttaactggaatctaaatttccatgtaaatgggctgtctctggtcccgtgtcaagagactaatatttttccagaagcctgaaaatatgcttttatgatgttgggagtctcaaacgtaaaaacggactcctaaccctctggatgtttcggctgaactctcaactgtccaccagctccccctacacgtggctccttagaaagcgtggaaaagggaaaaatgaaaagagaaactgccaggacttaagatgtctgcttaaagactccctcgaactgcagtgaagggtcctacccgcttccaaaatgtccacccgcattcctgacgtcactggatcggctccatcaagccagaaaacgagagtgcgctccaatcagggctcagtccccgcccttgccttgcgtcacttccggtggtgcagcagccattttgtcagtcgccagcggatcccgcgcgctggagaagtgcagttccccctggttaccaactcgcccgcttttccttcggactaagggagccgtcgaagagcgctcgccaaaggcgcagccgtttctccctacggtgccgccgctcctcctgcagccgcccgtaggtagcgggccgttttcctcacctgtccctgacaggcgccctcagggagccgcggtccgcgatgtcaagcgaggaaagctaccgggccatcctgcgttacctgacgaacgagcgcgagccgtatgcgccgggcaccgagggcaatgtcaagcgtaaaatccgaaaagctgccgcctgctacgtggtgcgcggcgggactctgtattaccagcggcggcagcggcaccgcaagaccttcgcggagctggaggtggtgctgcagccggagcgacgccgggacctcatcgaggcggcgcacctgggtcccggcggcactcaccacacccggcatcagacctggcactacttgtccaagacgtactggtggcgaggtgagacctagcccgcggcgagggggcgggctggcgactcgttgcctgggcaaggctcgctggcgaggcctatgcgtacccacgagtcggagggtctcggacgcctctgggcggcggagctgctgccaggcggagccgagagggtgggggacgcgaaaggagccgcacttcccacaggaaggaggccggcgaagctgggggcgggccctggccctgggtgggaccaagggggcttccccggaggccgggccagccgcggggaggggccggacgcctgggctgcgccaggtccgcctccttgggcggccccttgaggctgtaggccccggccctctggaggtggcgtgtggctcgcggcagtggaggctgcggggtgcacgttttcgactgtgctgacgtttggaaggggggacgagtcacccgaagccgggtctcccgtttctttagtgctgcgcttgggttttggcgagcgagtatgagctgctctggacacattcgctagtgttcctcaaattttgccgctgctgcgtaaataaggaataatacaattatttgcagaagtgataaggagtgattgagaaatcgccttgagcgtttttttttaagaacaagaagtaaatgtaaaagatatcagttactgtttttgttgtttggttttgcgggggcggggtgtttgagtagacacgggtctcgcctcgttccccaagctggtctccatctggcctcaagccatcctcccgcctcggcctcccaaagtgttgggatttcaggcatgagccacggcgcccagcttgatattcgtaactctgaatgttttaataatctttcccctaatgatgtgaaaaacgcgtttgggaactgtgtagcattgtatatacgcagaaaaggtacgattactgtgactttttgattgtcaaaaaatacagctctgaagttacttgactccttgggaaccagttgtaagggaggatagcaagtgtccttggcttcttaaccatcttcactctccacagttaatgaatattcaaactgtcagaattagttaatagtttatagtcccatttaagaaattttgttaggaacagtgctgtcactctccaatatggctacagaaaagttatttcattcaaatcttggttacttcgtctgtgaataacgaaattactgaatagtttctaaagttcttttcggtttataaacatcatcaagtttattcgtttacgaactattggataatcaaattcttccatttattttccactttaaaccaatatctgaattaaattcctgtaaggacagacaaatgcgaagattaaattatgaggtaatgaagtaatcagtgcattttgtttggatgggtttgggtagacattagtttgttgaacaaatgtctcagatttaatacttcaggatttgttaaagatgataattgtaactataggtaacattgatcaagcttgtatatgcaggatgtagtcgttagcccttgacatttatttaaccttcataaaaccttaatacttatctcccttttttggagacagagcgtagggggtcttgcttggtgcagtgacaacgatcacagctcactgtagcctcgacctcctaggctcagatgatcctcccttttcagcctctatctgttttacagatgaaaaaactaaaagcactaggatgttaaataacacaacaaaagtcacacagctgacctttgtgatctcacacttttcttaacccagtgttatgtggtattttgtgttcagaatttttctttttctaagttcattatctgtgagtgattctaatccagttgttttttttttaatttttagtgtgcagtgtcttaaaaggcaaaaacctgagacgatgtttatttatttatttatttattttatttatttatttattgagacagagtcactctgttgcccaggctggagtgcagtggcgcgatatcggctcactgcaactccacctcccgggttcaagcgattctggtgcctcagtctccagagtagctgggattacaccacgcccagctaatttttctatttttagtagcgacggggtttcaccatgttggccaggctgggctcgaactcctgagctcagatgatctgctcacctcgacctcccaaagcgctgggattacgggtgtaagccacagcgcccggc

SEQ ID NO: 1881414 - DNA, 4001 bp, Homo sapiens
tgatcaactactatgtacaaggcattgtataagaggctgtggcaatcctctacttacctttgtactgtgtttcctacttccaaagaggttaaattaataccaaagtgatttgttaaaaatacaaaaaaggattccaaatgggccaataaaaggaaaagacacaccaactctaagaccagatttatgttactaaataccgacggaaactcctcagcatttaaaagaatacattaaggagagtaatgcaagtcatttggatgttttcaatatgagaaatttgagcctactgaataaattaattaaatatctttaatattgagttgcagctttttattgcatttatagaactttacctattagtaaaatatacaatctataatagcttgtctatatcaaaaatatagatatctgtcagaaaacatacaaagccacaactaaaatacatttaatatcattaccagtaacatttgtgaaaaaataccaagcatctagcatttgttaaattaaagaataatattccataaaatctacatctggattttagcccctcttttagaattactatttaatcttcactttttttctctctcacttctaccccaacagcaacagaaacacatgcacaaattaaggaattatcttacaatatacccttaaattttctgaatatgccccatgtgtccactaatagccaaatgctttcaaatctgttcagctaaatggatcaataactacatccagcctcacatagtggggctgccaacacggtgaaattgagccaaacacaaaatgtctctaccaggacaaaaattattatcaacccagttatctgaagagatctactctcccagatattctttcgagaagttggcatacacattatctagggcagtcaacagctactaaaaaaaaaatatttgagtcataaaacagaggatttaaagaaaatattcagaagctaaaaccagtgagttttagaataaaccaatgtaacagttcaaggtctacatcaagtaagaatctttcagagtcagagtacacaaaacacgtaagagcacaagcacactgctaacaagcttctctgtgctctcactcatatgacacagctgcaagcaacaattgagcaggtgcaaccaagcttttgagaattcctgcctgttgcccaggaaccacaacactgcatggttgagattttaaacaggtgcaaacatttttttttcccattcgtctagtgcttgagacagtggagcagacagtacatctgcaaccactccatacctaaagcaaccatcacagaaaataaactcaaaagcagcaaaataaaaaaaagtttaaataaaacaataatggcaaaactgtggttttgcaatggtctgaccccacatcaccgttcactttaatagtacaattccataaaataatctcttcaccagatgaatgctttgtaattaaaattatttgccttatcaaatcttagaaatgtttacttgattcttacaatagaataaaataaaatatatgtataaaatgtactatcctttgaagctgtcattatctgtaagtaatcaagaattaacatttttacattatgaaatctataagcaattttaatacataaaaatattataacttgttagttaatatatagatttacatagttataggtaattcatatacatacctgtgcagctatggggcacaaacttgcaattcatcaattctgaaatgtaaaagaaatatataagtaaaaattaatttactaagttggaaccagtatttatgttgcaacaattcctgcagagaagtaggaaaagtttcagtgcataaagaggtaaattattttttatcaatattttccctataggatatttcatatatctgaaaatatatacacacacacacacacacacacacacacacacacacagagtcccttagcagtgtatcataagcactagcaagggactctgactcaccatggcctctgaaactcaaatgctttcactagaggacgaggcaaacactttaaaatgatttttttttttggtattcttccaagactattgccttcctaatacaaatatgactgctgctctctaaaatgaaactactcagattcatctgcactcagtttggatagaatgttgttaaggaagaaaggtgcttttgtagagcagtccacaaaaaaatgcatgaataaatgaaagtaaactttgaatgttcgttaactttgagttacaacagcaaatagaaatgaaattgattgctacaagaaggaatgctaacaccacgtcggatataatgcaaaatgcctcaactcaacacactttgacaaaactgccagcgaagtaggtattgatacagaagactatgtaagtccacattaaacaaaagtagcagtttacaattagacctgaaaaacatttggatttaggtggaaactgtattgcaacatacagcctgggaactactggtactcttaaaaatatttcctagttctagccaggagtggtggctcacgcctgtaatcccagcactatgggaggctgaggtgggctgatcacctgaggtcaggagttcgagactagcccgagattacgctattgcactccagcctgggtgacaagagagaggctccatctcaaaaaaaaaaaaaattctttttgaaagcaaacggacatgtttaatttatatagttcttctgagcacagtcgattacagcaacacattatagtcagtaagtccactttataatactgcttaaaagtatatagaggtaataattttgatgatggctcaataaaacaacatcttcgtatattctgatgggaatgtggattacaaaagactttctagaaacccactgagtactatgtatcaagaacccaaagttcaatatttttactcagtaattttagtcccaggaatcaaatgtaatagaaaaccaacagaaatttatgtaaaaaagataatttttatgacagtaaaaaactataagcaacctaaatatctaatagaaaaataattaaataaagcatagcacatctatataaaggaatatttggcaaaatttaacaaggtactttaaagaatattttaaattttacggaaaaatgcaaatttatagtattatgatgctaaaatattatataaacatgtagactaccaattacatggacagtatgaaattatgtgaataagaaaaaacaaagaacaaaacaaagaattaagagtgattatatctggataataagactttggatgattttaattttttctttttactttcatatatagttaattatctacaataagcatgacttttataataggaaaaaataatagtaggtagggtaggggtaaaaggaaaaagttataaaatgctatattgaattcataaatgtaaccttcctaagagaaataaattaattcagtcacaaataaaacccagtaactgtgcctacagtgagaaacaccctcactgcttcctcaaaggggcatagccagggtcttttttatcccagtgctttggaatctacacaagtaattcaataacacatttttaaatcatcttagtaaaacttctttacttattatgcagagtgaaatgatggcaagaataatttaggacttcaaatctcttcaacctagcacagcctaacttattcactaattcaatcacattcagtgagcatctactgcctgcatggtgctgtgtttggcactgcaacgtgctaacagataaattaggacacaccttaccctcattgagctaacaatttaaaaacactaaaaaatgtttagacacagctcacatgaagaagtaaacacaatacagttcaaagcatttgtgacagatttggtacattttaaagcaagaaaacatacactaggtttattttttatatttctgagcaaacacctatctttaggtaacaataaaaagtcatgtgtattagtatcacttattaatgcactagcaaattaagtatttaagtttt

SEQ ID NO: 1881415 - DNA, 4001 bp, Homo sapiens
tcccatggttgctgtaagattaaatgaaatcatatacagaaagcagttagaactgtaacccctaaaaaatgttatcttgtgattactatcatggtatgtatgtatggcgaactcagcaagaacttgaaatttggtctgctgctgattgagctcctgaacagcccttcctgggttatttgtgccttcttttggggccatattttgtgttcacatggttacaggggatttaccttaattctttaatctggcaaagagaacttgtcttatataagtaaaaacgatggaatctgtagcctaatacaatattttaggcacataacagacctgatagagtcagaacgagaaagaatgctcttatacaaattagtgcaaattgtattattgaacatttattaagttaagctcataccatgtgagggtgattgagtgaagcaaggtagaaacgctcattgaactcagagtttcctgaacaagtcttctatcgcaaggtagagcggaaagagtttgaggaggtaggccttcttcctatctgcaggctgttacctctcaggtggcttctcacaagacagagagatttgggtccaggccaacaatcagtgcttgggccatttggttttgaaagcccacttatttcactttcccaagctgattgttcagttgtaaaggcaagaatggggaatctgattgaagaattatttggagggggattctctagagccatctgagagatgagctagaaaaatagaaaagccctaagatctactgctgtagccacctgttttctttctcattctgaatccaaatcttatcaatagtatcccttgccataacagcctacgttatagggtggcgctgggtcaggctatccgcagcctccacatagctgttgccttcctcctgggagctgtttaatacttccctgtggcaagtacataaagcaccctattacccaaggagatcatatatcccacttctggcttactcctgctatcctggcctaattattaacaatgctctctttcactcttgaaagtgccctgtttgcataataaatatgatcaccaatgtactgtagtctcctgggtcagaactgccatctctgacctttttaacattcctccttcattaagcctcagaaaattcagaaaaccttccatatcacatgcaaccaccctagaaagtgctcaaacaggttgtcagagatgacaagaagaatgagtagatacagaaagcagccatggagtgcccctttagctagcagattgctttctgtagcccatccatcatccggaaagcatgatcatgactgtttggtagatatcttagtctgggttgaattttccaataatttttgcatacatggtgtgggttttgataatatgccatatgacttaataggaagggggtttatttgttaactatgaatatggtcactgtgtatgaataaaataagggactttgataagttgggggaaatgtaaactttcccaaagaatctgggcttaggcctgtctaaagtgaaggcaaagtaaataaatacataaataaaaataaagtggaggtttagtgttccataagaacaagtcttccatttgcctttcagttctttgctgaagctgtaggaatagcaggcaaacaaatcatctggttattaggccactctacctcagccgaagctctggggagttaatatggatacccaaaatggctgcggcactaaaggccggaattggagcaaaattcaaggtccttttccctcaggtcatcgtacctacagcttgtatgccgcagcctgtccatctccccacttgcgtatgtaagggcagtgcttctaggagccatgagcattactcacctgaaacctaggtgttaggaatgcaaccagctagatctgacccatgccctgttttgtgtctgcgttgacatgctgcaggtgacatcagttgcaaggggatgaccgagcgcattcacagcatcaaccttcacaacttcagcaattccgtgctcgagaccctcaacgagcagcgcaaccgtggccacttctgtgacgtaacggtgcgcatccacgggagcatgctgcgcgcacaccgctgcgtgctggcagccggcagccccttcttccaggacaaactgctgcttggctacagcgacatcgagatcccgtcggtggtgtcagtgcagtcagtgcaaaagctcattgacttcatgtacagcggcgtgctacgggtctcgcagtcggaagctctgcagatcctcacggccgccagcatcctgcagatcaaaacagtcatcgacgagtgcacgcgcatcgtgtcacagaacgtgggcgatgtgttcccggggatccaggactcgggccaggacacgccgcggggcactcccgagtcaggcacgtcaggccagagcagcgacacggagtcgggctacctgcagagccacccacagcacagcgtggacaggatctactcggcactctacgcgtgctccatgcagaatggcagcggcgagcgctctttttacagcggcgcagtggtcagccaccacgagactgcgctcggcctgccccgcgaccaccacatggaagaccccagctggatcacacgcatccatgagcgctcgcagcagatggagcgctacctgtccaccacccccgagaccacgcactgccgcaagcagccccggcctgtgcgcatccagaccctagtgggcaacatccacatcaagcaggagatggaggacgattacgactactacgggcagcaaagggtgcagatcctggaacgcaacgaatccgaggagtgcacggaagacacagaccaggccgagggcaccgagagtgagcccaaaggtgaaagcttcgactcgggcgtcagctcctccataggcaccgagcctgactcggtggagcagcagtttgggcctggggcggcgcgggacagccaggctgaacccacccaacccgagcaggctgcagaagcccccgctgagggtggtccgcagacaaaccagctagaaacaggtgcttcctctccggagagaagcaatgaagtggagatggacagcactgttatcactgtcagcaacagctccgacaagagcgtcctacaacagccttcggtcaacacgtccatcgggcagccattgccaagtacccagctctacttacgccagacagaaaccctcaccagcaacctgaggatgcctctgaccttgaccagcaacacgcaggtcattggcacagctggcaacacctacctgccagccctcttcactacccagcccgcgggcagtggccccaagcctttcctcttcagcctgccacagcccctggcaggccagcagacccagtttgtgacagtgtcccagcccggtctgtcgacctttactgcacagctgccagcgccacagcccctggcctcatccgcaggccacagcacagccagtgggcaaggcgaaaaaaagccttatgagtgcactctctgcaacaagactttcaccgccaaacagaactacgtcaagcacatgttcgtacacacaggtgagtgtcaccccacctggaggcctggcagcaggggctgagggggctgtgggaaggcaaggtaagagagcaggtagaagggaaggtttgggatcatctttcagattttaaacagaccccaccacaagcctcttctagaaaccccaactgtgttcctcccatcataagaacaaagcaccctgccaccaagagacaccgtcacaggaaccctttatggagaagggatgtcctagggatgtccagactgcagaagagaagactcaggtcattatataagccatattcaagtatttgtgtttcagaggcagcatactgtagtcaggaagagcttgagctcttacacccagccagatggcctgggtgtaaattcaggcttagctactactaaaccttgtcgccttggaaaaattacttaacttgtctatacttcagtttccttgtgtataaaatgagaataatcgtg

SEQ ID NO: 1881416 - DNA, 4001 bp, Homo sapiens
aaaaataaataggaaaagaaagaggactatgagcacatgaaagattgtagtttgggcaggacattgcttacacatagaaagctcctcccccctgtagcatagtttggttggatagtctctgctatattttgaaggcactcatttgaagccaaaaagactgtagagggaaggaaacagagtattgtatagctagacaagttgtcaaaacaacttattgtagttggcaagcaccaattcctgggaggacagtaaaggaagtagaatctaatagacctgtacatgaaaaaggacatcaataaagagaactgaaaaattaagggagtgccattctgataaaataaacagggccatctcactgctgcattgttactgggacggccgtctgtgtagcctgtttcctgaggtgaactgagggctggcttcttggtgctggcagtggtctctattgagagtggtgatgacgaatatgacaataagggttttatgtaatagctcctagttggatcagctttgctgctgctgaaatcaaagtgaattttaatattaacttgcaggtctgtgcttattaagctgtgtgacttcctgtgaagatgagtttatagcaatatgttcatatgtttttacagaacaatcatgatggtgctcccttaagaatgccctttgtattctgtcctcctgttctattctgtggtttgataagctatcaatgaaatgctgtgatatctacttgtttgaatgtattcagagagcaaaaagcatttcaggattgtttagtgaatattcatttttttaaaaaatgttttcagtccatgagatttttcctttactctggagtttaagcaaatgtatacgttatttataaaagggagggtctgcttccctctatataacctgacagaatatttatttaccttttctttttaagcctatgtctaagcacagctcatcttcacaaactgaagtggatcttgatttctggaaatgtccaaataatggtaagagtgctacagaggcaaagtcattgatgatacctccagaataggatgtattcataagttatttgtccaggcagtgttggttcttggataaagacaggctttcagttttcataatttctttaacctggaacaatttcattttaaaatatgaagagaatgacataaatctttggtttccaaggagagtctggaaagaaatagattgttagaggacagcgcccacaaattgagaaagcctgttgggggccctttgggaatttggctggaaaattatgttataagcagtccttctgctcagcttcatgggaacatggttttagaaatgaaatattgcttctgtgttccccaccccccaaaactaagacaaagatgaaatattcatattatcctttattttcagaaccttttgtgttatttctcaatatgttaaaaaactttccttaattccttaatgattctgcccaaagggtactttgtaaattctattcattgatggtgtactaaactcttaattcctggtgaaggcatttgaagccaaagaccttgctacataagacatttataatgtcactgggatgtttaaaggagaaaatcatgtgatccaaatggcaaataaaaataaatttagtaacatctaactaaatatgaccagttttccatttaattacatgcttgcacccactttacacacattcacatatatgaacccgttaattccttcactaaaccgtgttatttgagcacctgattttttttaagtgctcactatgtgctagttatagtaccataaactctcctagatactggagatacagttgaccataaaagagacaagatacctggcctcgtggagctcactcacacaggataacatgatagtttctcatgatattcagccttagaaaccaagcttttgtatttcatttcttctcagaacttcttttagcaatctatatgattcaattactgggcctcagtatcttcaattagtctcaaaataagaggtaggacttgatggttctcaaggcaccttcatgtcattcatattcactgtcctaaagtctattagttgattagactatgaagtgaaatgtatccattattaccatatgagcagccttgaaatcatacagagttctttgggactttgatcttttaggaaataagtaatttctagctaattctgtggacactacctccttggatttaggccaaaattgaatttagaaagggcggactttgaaatattccacagtttgaattttggcacttgcagttactagctgagcaagtcataaccaaccactttgatcctctgattcctcttagtttgtacttcaaacagtgagtatgagtatttaataaatactccatagtcagtccttttttttttttatttctggcaactgtaggcttcatgactcttgttaccaaaaatgtcttcaactaattcaacttcctttccccaaacgtcttatttctgcattaagccattacttcagttaactcagtattttctctcccattacatctttacagttttatttcttcctgttctctttcttatgtgcttttacttctctactcaacctgagtcaacttttggctacttaaattatcatatgtaacataatcttggttacaacacaaaatgtgtgcaactataattcaagtcaattaaatagaaatatgttttctacatcagacctgtgccgtagttgtttatatttttgacttactagtgtactggaaacctcttgagtacaagggttgtggttttaatccttgtgttcccagtatctagcatggattctgccagtaagcatgtcacaatctagcaagaagaaagaatttgaaagcagtaggaattttaaagcaacaggatatatgatctgttagtaggaaagtggagatgttgggaaaggctcatggaatagatattgggaaggctttatggagcaaataatatttgagtttgcttatttaaaaagggtacttattctttttttcctggcgggaagtgaaagtaaactctaggcagagagaagatcatgaaaagactcatgcatacataaagttgggaggaactgggaccaggagacagaaacgaagacaagaagggaagattaggagcatattttgaaggtcctatgtgttgtttagtcttacttgaataatcttagctttccaaaataagtatatatagttgtggtatagagagtgtggtgttgcaataagatgatcattagcttttttatgaagaagaaataataagacttagcaactgattaatacaagaaaaaagacaatgagagatcatgtcagaaagaacatctggatctgggttgcagccccactccacacttgatttgtgaccttaaatacttaacttcatcttcctaaaccacatatcttttaagatcactcactcactgattattattgaagagggcccctattccggatgctttggatcccagaggttgagaataattggtgttttttaaggagaaagatacattttataccagtagcacatttagcctaagctggtattagggcatttgggaagatgaaaaggaagacatataaaagcaatatgttctggccagaaaaaggcaaaaaggaccctaaaactaaagtagagttatagcttagagtatctaagaaggcagagatactgaaagatgtatttagcagagctctgcatttgggggtgaacatctatccatggacctaaagagatcatagattgccctgatttgtctaccctctatgtaggaagttaactcctgtgattggtaactaaccaaaaaattaaaagaaaggggagatggggcaggggagataataagagggtatttgccagtggtttacaaagctttgaggtgtacgtgtatgtggttgggacaaggttaatttcatgtcagtagtcatggccttctcctttcttgtatcacagaaaagacttcttcttctcattctcttccatttcttctaaga

SEQ ID NO: 1881417 - DNA, 4001 bp, Homo sapiens
cttaatacattttaataaagcttcggagaaacaatagggcaatagtagaaaagcagagctgccaggccaaatagtgaggaggagatacatgctggtaccttgggcacactaaatatattttggaaaagtttctctacagacaagtgacctgaagtaggagactgttaaatcatttttagtgtgtgtctgtctccttttaatcatccacccttgggagggtgatatactactgcagcactagagaggttgaattggtggattacgatgagactagagtggtctggactcttggtttcttactagaaattttcccaggatagcttgtataatgtataggtagatattacattctaatgtctgtgctgtaggttagccaccctgaaaatagctaaagcaatattgatctgtattctaaacatgacccaaaatttatttgacattcttaaagatttttgtgaataaggtgaagaatcggttgatctataagttatatattgaaagttatttaatttttaattgaaaactgattttttttaaacaaaagaattgaagctgttgtttcaaggtagttttgtttatgcagagggacatattctaatttttgaagcatgttaatacacaaaaccacataaaaaggatgatttttacaattcatatacttaggattattgttgcccaaacgcagggtttgaataagtcaaatgcacttatattttttatttgtgtgtaaatattttttagaaaattttacctctattataatgttcttaagtcccatctaaatgacacatagccaaactgtatagaaatatattaaggaaggtgggtgtctagatagataatagtgctagaaggagatatgactcgtcaagcagagtctagtttttaaaaattcggggacgaggagagtggcttaaaactatttctgttttctgatgtttgtaattctatagctgcaaatatatcacttacaggagaaagggcacctaggagtggggaaagtgggtgggaagcatgtgatggggtgaggagtataataacatcataattttggaactagaatatagaaaaaatctggttagaagtatcagacaaagaaaaactgttttttttctcttttaaggcaagtttatttagaagcattgattatttttatttttccctcctaataaaagattaagggtaactgctgtagtttcagtcccatattctatgaaatatcatcctgattgtgatggtagcttcttatgggatttatttctgttgttgtaccactatgtactatacgcattgcacctgttcacacagagtacattgcattgtgatgtttgtacagctagatgctttaaatgagaagccaatctcccttcttctaggttcctagcctattagttacttaattaagcttaattctgttttggtctgtaattttgtaagtctgcaattttgtatatggtctcgatttattaactgagcaatgatttcttctttgcagttatcagttttgtctgagatcagttttcctattgtatggagtctgtttcttacagagcctcctttaagactgctctgactttaaaatcattactaggcttttgtcagagctgatttgttcacattcttctcacattaaaaataaatttaaaagattgcacaaataagctatgcatttcactatttcctgcttatatgcaaaaaatgtatttatgataattacatgtactgccagaactgaaacaatacattcctcataatggagcataaataaagaaggtggagccagctgctcttaaactgtttatttgcaagcaataatgatatagagaatatacctttttcactctgttagtctggcaatactgaacctgttgctgcattagacgagttgcattttgctggataggggaaggagagctgtctgctgtctggtaggagggctttgtctgtgcctttctctctgtttctttctgtttttctttctctctctctctctctcctcttctctctctcttactcgcttgctctgtctctgtctctctctccctctcttcccccctccctcctctctcttgctctctctctctcttcccgtctctgtggtttgtaaggtaggttgcagtgtgtgtatatacacaacatcaagagcaggaaaatggactcattagggaggcaggcagtcattaccactcacactgtacttccagggagacaccgattataagaagagaaactcagcgctggggaagaaggtagggcagacaactttcttaaaaaaaaaaaaatcctgcttcctcaatgccccctctgtcatctcctttagcccccaatgcctttattctttcctgcttgaattttaatttccagatttaagtttgacagagctagtgctagcttaaaatttagaacatctgtaggaggcctaccctttactaattttcttcctacttacttaggggtgtgcccttgtgattcagttttgttactttaaaaataattacaaacaaatctatttttctcactaaagtaccaaataaatcagaatctttcactcttttaaaacagacccttccgtatgtttgtctctttgcttttcttgtctgtttatgcaattccatctgtctgtctatatatcatgttgtccttatttattgctaactcggttttgttagttatttgccaatgagttttagctgcagtgccagtgtgggtattactaaagtgagactcttgttctttgttttatgttgaagtttaaagtccatatttacagtttaaatccttgaagcaggttgaatactttttgccagcatgtttatttaatgccattggacataaggtgaggggtagttgctgagggtgggtaagaatggagtaattatttttgtcatcacacacatagaaacattgcatctgggggatgtatttttaaacaaataaggtattctgttttctaacttttattttgcagatgggcttttacatttataggaatatcactttggttagtaagaatgcgaactttcttaacaagcagtttttatcctaggacagtttccttttagtatgttactgtttatttatgcttggggagggtggagtgaggggctggccatctttttacaaagtggaagctatgaagtgtatcaggccatcttgcacaacaactgtaagtattcatttaacattttggggagcataaataatataatttttatttcaaattcagttttgtggtgctttcttttcctttatttctttttttcttttttatagtgggaaaagttacatttcaaactagcagacattgttgaagagttttcccagaatagtgttcttcaaaattgaaaggattattttaataagggccatttgaaatggacttcttaatggaattttatttcagatttgtcaaagtaaaactgctcttcatttgataaaatttaagtcacatagatacacaaatgtttcggcatatacagagcaatgttagaaaatggatgctgatctgtagagatctttgataataacagtcatctttttgtaataaattatttatttaacagaagtggcagacttttttcccccttaattccattaggcttctctgacaacacaaagaagtccataaagcaatattcttaacccacctgggacactagagcagattcccaaacacattctcaaggttcaaacctagtaaaatgtttattaaaaatccattatttcaggaaggtgatgaacttttgctgctgaaagacttttttacctcttcttttaaaaaattaattctgagactttcaatttgcttatcttgcctgaacagtttttttaaactggataggctggctttgaccaagagtagtacaaatactaagtacgctcaatcaggtcccgtcggagatttttttccgtaaggtctaaggggaactttaggagagtattttatgttaatatggtacacgataattttgtttttcatatacaattttatatatacttta

SEQ ID NO: 1881418 - DNA, 4001 bp, Homo sapiens
cccagtcctcgagaaaaatatttcccattctgcgaagcatgcgggaaatctgtggctttacttttgtcatctgcagttgacaggattgcacataaattctccaacttttttttccatctccctgtctcttttcgcccctaaccctggttttatgatacccagtcatgaaggcgcgtgtgggggtgatggtgctgattgtgactacagaataaatagggggaccatatttatcttctaaaataatggacattatattagcgtattcagtgagctccagcaactattacaggtggccggccggccttccttccttccgccctcgccctcttcatgcctcagaaacgtggcctactctgcattcggtgtgtgcggaagcagcaatcacagaggcagccctaataccggaggcggcggcggcagcagcagggccaggtggtagctcggggctgaggatcgcggcgggggcagccgctatggggcccaagccctgacacacgtaccattcgctcaagtcggcggtacgcgccgccaccgccgccgaggaggccacctgggacttgtggccgcagtccgacgagggcgacacgagggcagacggtgtagccgaatcgtagccagagctgggcggcggcgagcgcccgtgcaccttcatgtgcttacgcagcgagctggggtgcgtgtagcacttgtcgcagccccgcaccttgcacgtgtatggcttgtcgctagtgtgcacgtgcgaatgcttcttacggtcgctgctgttggcgaagcgccgctcgcagccctcgaactcgcatctgaagggcttctcgcctggcggaggcaacgcagagacattagtgcttgtgggtcgtgttcccgtcaggtgcttgccaccctcccccattcgtctctcattttctggaaaagaactacaaaatattttcagaaatccctttccacggcgcctcaggtcgagcacccctttccctcgtgcagagagcgcccccggtgccctctcttgaacgcctccatccctcccgccttcctcctctgggctcatggggagggtatggaggaggagcgacagtgactccatcttagtcgagtttccatcctcgaaaatcctgatccactcgggttgtttcctccaaattttctccacttggaaccagaagcacctctgctcggaaatacattaacggaggagctcacaatatagttaacggggaagctcacatctgctcgatttaaagttgctgtttcagactaacttctctgccgctaccccgcccagccgttcatcccccccacccacccccatcctggcccaaattgtttcctaaagtaggttttgcgcaaacgccaaagcgatgaaataatttaaggatgcgcagccgatgcacattgtgtgtgcataaagtggattcgtgctgcagggagaggtattctgagcaatgattcacttcagaagagatttttacaggaatggagccccctccctctttccttctaccccctgagggcaaacatttagcagcattcttcaaatcttgcctaaaccttccgggatccctccagatacgctcgccagtaataatatttcattacgctgctccagaggcttcctggagaccgtgctgtgggcagctggccctcccagtccgcactgacttgcgatgtcgaccggtctgcccagaccacccccacctggctgtcgggcctctcggtcctaagacgaggggttggcgcggtagggtccgcacaggccaaatgggatccgaggtgtctaccgcaaccacgcccttgagcgctgcggcttcgggaagaaaacagctgctgctgtcaggccaggcctggctccgcagcccggagggccaccaggcggctggcataggccggggaggggctgggatcggtggctgcgatgccctgtagagccgagggaaggcgcgagtgcacgttagagtgacaatattggccggaccgagccccaatcggggagctcacggccagctgaattcgctgacgtgtaggagaggaaaggaccccgagaacccggaagcctagattcctgccggagctgcaagtgctgcggaaatgggggaagaaggtttctgggcgctttaaacaaatggctgcctcccagcgctctgagttaagggaccggctacctagcgtctagctgaggaggaagacgcgcagctggagaactgttgcctttgtagttgcttctcccgccgcatccaggaaaaacaggcgctttggggctggttagaacaaacaaagccccaattcccgagccctgttgaggctcggacagagaggtttgcgcacaacctgcgcttctgcgcaatcagcggctcctgagcccgggtctccggcaccacctggtcgctggattcccaccctacaggagcacagctagtacactgaacagtctggaaggtgttggcacctgccatttcgcgggacactggcaccattttataaaacagtgatagaaagatgcggaataaatcagtgttcctatttgcccccatttttatctcctctgattcctgccagcatttgcaaacccaaaactttcttccttcttctctttcaaaaaaaaaaaaaaaattacaaaaaacatacaattcagggcctgcaaaagaaccaaggttattttgagaaaacagaggtgaaatggaattagaatttggtgcccctccccaacaacccccacccccaacaaaaatcccgccaaacgcttatccgatctcgtgagcgcctcactggacattcacgtaaaacaaaaacaattatttcgctccagacgaggagcagaggagaaaacagcagtgcactgagtgataccggcagccgggaagttcgcaggcccctaggaggccaggtgaggccgcgccccagcttgctccggagctgcaggaggcgccctggtctctgcgcttgacatcacccccgccccccgccaacacccggcctccagtccttccccctccctccagctccctgcactgcgccctgggtgggtgggtgaatgtgaagaggcggcgttgggctaggcccctgcagcccgctcggagcgtcctaggcccggggctgcgctgtgaaagacccagattctcatcccagaggcccagcagtcctgaaaggcctcctctccgaccctgagccgggtccgccgaacaaagttcggaagctcgggctagctgggccagcgccattttctcgcacttgtggctggatctggttgtcccggcgactgcgccccggcgcggtctcttttcctctacctcggatccccagcactgactcgccctcagacgccggggaaggtgtggtgagctcccggccccggccgaggggtccctggagaggagctgggtggcggtggccaggccgagcgcggttgctggcccgcgcctccctccccgaggcaccattgttccgggatcgctgtgaccgccacaaagtgaatcctttcggtgcggacagtcgccttcaaagccaggccccggattcaggtcagggagaatctcagctcctgagaaatttgctcctgtttgccgcttctgctactcgaggaaatgaaacgccattaatatttgaaaaggcaattattttcctgttgaatcgagaactgtcttcatgaataatttgtagtgaggtctattgccatttgagaaatattttttttccctctctctctctctctctctctctcactctctctctcttctttttatgactaggagggggatttgagggaaatgcccgagcaggccagactctgtagttcgttgttggtcgtgtttgtttgtttgtttgtttttgtttgttgtttcccccaccccccaccgctaatgaatcaggaccgcgaaccgaaagaacgcacaaaattctgtcctgaaaacacgaaaacctgagccagccgtggcgcactgaacttgcttctctgctgtaggtcgactgtgctaagaatttaaccattttctgcttcacagaattcaaac

SEQ ID NO: 1881419 - DNA, 4001 bp, Homo sapiens
tactcattcatactttgagacccataaagtactatttccttcttctcttcctacttgattggctgctgcttctcagtctcctttgttgggtcctccttacccttttttatgtcatccaaaggaccaccaggatggctagatagtagaaaagaaagttggccggcacagtggctcacacctgtaatcctagcactttggaaggccgaggcgggtggattgcctgagctcaggagtttgagaccagcctgggcaacacggtgaaaccccatctctactaaaatacaaaaaattagccaggcatggtggcgtgcgcttgtaatcccagctactcaggaatctgagacaggagaatcatttgaacccgggaggcggaggttgcagtgagcgagatcgcgccactgcactccagcctgggcgacagagtgagactccatctcaaaaaaaaaaaaaaaaaaaagaaagaaagaaagaaaagaaagttttattcacaacatcagtttacaaactcggagagatagtctctggcttgaactgaaagtggtgctctctctgaagaacaaagagaaggttagaggttttacaaaaaggaggaatgttacatattgctctttgagaaagttcattggcagtagtaagggtgtggggagctgacaagctccagttggtgagcaactgcggtgggcaaaattagtcctagagttgcagcaacttatctcagaagctatagataaaactggttttggcttataataagcagtttcagcagtcaagcttacagagaataacattcctggagcaatgttgtgtaccctgagtgcttcccccagctaatttctcgactttcttttattaggtatgacaaaaatgacccaattcttatgatcagctttcacatttcttagcatttaccaccacctgacacatttttatatttgttttctgtttatcccactagaaatgtaagccccatgagaacagagactttacctctttatctatgtccctagtgcccagaacagtatttggcatatggcaagtactcagtagttgaatgaatgaatgaatcaaggctgaagtttaagtatgttgtttaatgaatgccaggagagaacataaagaaataaacagaataagcctggcacggtggctcacgcctgtgattccaacactttagaaggccaaggtgggggtggatcacctgaggtcaggagttcaagaccagcctggccaacattgtgaaaccccgtctctactaaaaaaaaaaaaaaaaaaaaaaaatagccaggcatggtggcacgtgcctgtaatcccagctgctcaggaggctgaggcagaagaatcgcttgaacccgggaggtggagattgcagtgagccaagattgcgccactgcactccagcctgggcaacaagagcaaaactccatctcaaaaaaaaaaaaaagacataaacagaataacatgaaccttgctcattgaataaacattcatctacaacctatatggcttcagctttgtactaggtgctaaatacatgggatccatgcagacatggcctttgcccttttggagacttgtttcagccatagtcccatataggggtgtcagttccagaagtccaaacttaagagactgaagaccaaagagaggatcagagtgccagtttcctttatatacacctgactttacccagggcgatggacagctagaataacctcttctttcaggggagagatgtccctaccatttgcacattaccttgcaccatcaacttgattattatttaatatcatagctccaatatgtcatcatgtgggcaagagatacaccacagtaagcgaattcacaagagggtgatttataagtcatgttattatttatagtgagaattgcataagttcaagaagagaccagaaaagtcacctaccaggtcattcagacgtgaaggtcactccctatcaacctcaattgaaatgcaaatcaaaatagaaatgtccaactctcttaggaggcaacaggcatcctgagaccctgggtcctgtctttcatctctgcacccttccggtctgaaacagcggccagttcttgttcgatgtaaggaacactagtacccaagggctcaggagttccgcctctcttccccagttctgggaaaagaaacgaaccatagagatgtggcttcctagagatccgggatgaggggcggggtgcaaccggaagtcgcagtattctcggctcggccattattctgtgcctcggctgccggaagggctcgttcctgtgtcatctcctagcggcctggcgccgaggcggcggtacgcaaggctggagccgcagcgggagcccccggtgagcggggtgggctcgggggcgggtgggcgtgcagggaaggcggcccgggacgcgggcctgagcttgctgggactgcacagccctcggtagcctctcccgggccctgacccccggcatggtccgtcgccagcttcgtgttggggttcgacgtcgtggcctcggctgggcaggcagccggcccgagggaagtactgaggacagcagctccgagtctgtgtgtgtttgtggaccggtgctcctgtctaacggactctgctggcgctttgagaagagctgcctcagtagcctgctcccccagctcaggcctttctgctcttcctcagtcttgtctgaggctaatccacagaaacattctgaggtttccctattaccggtggcgcccagactcttgaggacggatttttttgtttgtttgttttaaggggtggaacgattttagcttttttagtcttttagttttgtaatataatggtatttaaaaatcaaacttgaaaaactcaaacttgaaaccacccataccaacattacttcaggcaatacattttaacacaaagtactaagaccgtaaactcagaataaatgctggcctttgcgcgcgcgcgcgcacacacacacacacacacacacacacacacacacactcattgccaacctgtcagcgacgattgttactggttttctctttttgcagcttaccagattaaagctttgtcgtggactggtgtttggaaactgttgttttagaacagtttgggttgtttgggtttcataagtttcttcgtagatggaattgttttggacttctggaattagaatccctgaattcagaatttgctcccatgtctcagttagctaagtggccttgagtggattcgctcctctgatccttttgttttttttaacttctgctttgaaaaccttttgtgagaagctaataaaatgtatgtttaagaatttgttatttttatgttatttgaaaattattcaaaattctttttaaaaattcctttccatcacccccagatcagttaccaaggactaccaagtttttctcaattgccttatccctacttcgtttagaacttaagtcatgtgtttagactattagaaaaacctaactgacctttcttgatatccagccctcccacccccaccatttctcactaatagagtcctgacaccacttaagactctcttcatgctcagagtgaaaaaggtctttctaattgtggtacagtacccagaagtcgtaaaagattgactgcatggcaaaaaacactttaagcaaagtcacatggcatatatagtcacaaagacacttgacaaactgagaaaaatttgcagctgccattgtaaacaaaggactaattttcctgtgataaaagtgtgtacaaattaacaagacccaacacctcaatggaaacatgggcaaaatatatgaatagttactttaaaaaatatacaaatgactctatattaattcgttcaaaatgcaagtcaaaaatttggcgaagagcacaaactttgagaaacatattggtgaaagtgaggaaaggcactcccatacagctgtttctgatgggagtataaattataaattggttcaatcctagtgaggtcaaattggcaatatcaaaattatacatgtatat

SEQ ID NO: 1881420 - DNA, 4001 bp, Homo sapiens
gaattccagattgccaaaaagttatttattttgccaaaatgatgactcagaaattttaaagaagcaaaaacctttcatgaatctttataaattttgccgaagaccagattagcattttaagaataccttctgattgtatttcaatgctcaatttgcagaaaaaccacataatacctttttttgaattcagtcaatatgttcacacagagaacctctttttcaagattaatttccagaatttttccaacacttctttgaaccttcagctttttcctaactcaaaacaatcctgtaaccctaggcgaaagtttacatttccacaccttcttataacctttcactaaaaaaaacacaaaacacattttactgttcctacacaccttgcatgcaaatccatttctagtaatgtcgataaactcctagcaatttttaactttaagggaaaacttgataagttgccttaattgtgtgctaactgcagccacgttttgccttcttagtcaagtctgtggttagttccatatgtccccaggccttaccaattgcgaagctggcaaagcaaatagttctcaaaacccaacaagcagtttaacctcaaaacacttgcatctgacctgcattttactaagtctttagggctgtttttatttcttaaagattaaagccacgtgaactgaaaggtaccacagattttatctgccctttaaaaaatattagatccaagtgcttgtctttctttaggacaaattaattagaactctttttacggacatcacacactacacacacacaaaaaaatccagtcgctaggtggggtcctttaagaaacagggctaggaaaacatgcagatatcaaaccagaaagaaacttacttcctaaggcaggattgctaaacaaagccttgccaccagttacaagccatgccctcaggatgtaaaacaacatggaggcttcatttcacaaccaaaactttgcagaaaatataaacagcgatagctgcggggctggggggcctaccttaatacaacatcttctagaaagaaagaaaaaaagaaactttaaaagttaacttgctgacaggacacagaaggggaaagaaaatcaacagtttaagaatgcctggggaagaacctcttattcttatgcaactgtttcctccaccagttgcataagaaaagttaaagcttaattactgtcggatggagtagaaccccttgggtggggaaggggaaggctgcagacgcttgtggctgggaaccagccaaccggctgtgcgggacccttaggccatgcatcccagccccgcaaggagtggggagcggctgggaactgctgctcgctagtccgtctggaaaaaggaaaagaccgtgaaaaggcccccgacccccaggagcgacaaggggtggggagcggtctcccatatgctcagaagttgcaggatgaaaagtcttagaaacaagggtgagcggttttccgagatagtcccgctcttgtcgcgcaggctggagtagagtggcgtgatcttggctcactaaaacctccgcctcccagccagcttcaagtgattctcctgcctcagccccctgtgtagctgagattacaggcgcgcgccaccacaccggcttatttttgtatttttactagagaggggtttcaccatgttggccaggctggtctcaaactcctgacctcacgtgatccgctcgccttggcctcccaaagtgctggaattacaggcatcagccaccgcgcccggccaacagtgagaggttttgagtccccctttcactcacctcttcaagagccccaacgttgcacgccaagaatgttgcaggacttttccttccttcatctgaagactgggttcttgtccgtcccaaggccaggaaaatttaggtttggagaaggtttaaagggtgaataaagcagggttttatcgagtgaaagtcggcgggaagaaaaaaagggaaacaagtttcctccgcaaggtcagagttccccgatcgaggcttcctgtcggcccttgaaatcgcaggttccacacaggaagaggaggggccaggctcctccctattgaacttcctgaggctacacctcagtgggcaggctgattagagtttgtccagggtacccccctcacctggctgtttcagtggcacacacctgtaatcccagtgcttgaggaggtggaagtaagaggatcactggcaggccaagggattgagagcagcctgggcaacacagcaagactatctctccaaaaatcttaaaaaattagccgggcatggtggtgcgcacctgtagtcctagctacttgagaagcagaggtttgaggattgcttgagcccagcggttcgaggttgcaatgggtactgatcacaccaccgctctccagcctgggcagcaggctgacacctcatcatctctgggaaaaaaaaaaaaagaaagagaagaaaaacccaggaatctctaagatggtttaagtttcataatttctgcattttgataaaaatgaagtttaggcttccttttccacagtgactactctctccacaatgcaggattcatatcctaagtaactgattctctgaaacctaaacatgaaaattcacatatttttaaagggaagtaaataagtgcaattagacttgagcatgacctagaaacttgttcttatgattctgaaagcttgttttgtagaagcctccgagttttagtttatttgaaaaaaaattactattgtcaaacatccccaaattttagctttatgattgtgaatatttcagagtgcaccagcgctgatgaaatctttattagctatggaataaaatccttgatgaaaaccagttgcccacaaattgctggatatacatatctattaaaattttaatcagtttttttgtatctctttttacaactgtatacacttcttaaagtattagtaggcactaacaaaacttatagaaaccaaaagtagaaactagattagtggtcaccaataattgaaaatctcaaagataaaatttgctcattccatttcattaatcctagttcctgtttatcaagactcttgctttttttgttatattttgttataatttatttcagcatatcataaataatcagtttcatcctagtcctgaaaactaggacagtaggagggtttgttcctggtcagatgagcaaagaaatttaagaaaaggtaactcatattaatgtctattcctgtgtaatttggggttttgtggccattcgtatccttcccttcctaacagttgctatttgttgttgtctaatttttactgagccctatcctctgtattaactagagtaattgtgatgaaataatttacctttctcaagtgtctccatggccaaaaatgtctatgtagaaaaaatgaactttatttttagagcagtttgaggctcacagtagtattaagcagaaggtacagagatttcccatttaccttctgcccccaaatctgtgtagcacccattcatttttaaccttcttcacactaaagtttcttatggtgattggtttaagagtggtgatttggttttattctctaattaaggggaatgaaattgtaccaggcatgcataaattacacactgcatttggattacgttgctagaatttcttagatgacttatcagaatttgaaaagatgaatgtattctttcatattctacagatctttgcacaatccaggtactactatattagaacactgtacttacacccaacactggcccagattcaccttttatgaagcctaccaaacctcattttaaatgcaaaatactgcctctgggatctgttgtctcagtccaaatctgtgttttgatataaattgaatctgatagtggtaaagattgcagtcgtttggggaagtcttacctcgtgaggagggagttgaagagaaacggaggcaagatatgccatgaaagtttaattctctgtgtacatgtgattttcagtggtacttcgaga

SEQ ID NO: 1881421 - DNA, 4001 bp, Homo sapiens
ttatttgtgatactttaagtgcaatgacatttatgtaactgtattattagttgcaaaataactttaaaagtaactttattaactgcatgaaatagaaacaacaaataccagaaacctgtattttatgctacaatcccagtagatgttatcttgtaatattgcattatgaaatctcagggctttaaagaaagaacattagggtttatattttctcacctggcataaaatgtaatacaatgtttcatttatcttcaatgatttctttttcttgaattatttgtaatgaaaaaatatacttgtagatggatctgttaagagagaaaaaataatatcgtgaacatccatggtttatatttagaaaattctctgattgctatccgcaagccatcactctacagcttaatatttatttgaatttttatttcaattgtgaagctttctgcagtaatttagaaaaataggttatgcagttataatagaatttggcgatagaatctagttctaccctgggattatattacaggtaaaattgttcattttcattgacttggaacaatggttttatcttttattagatatatagcttcttgtcagttacaaataagagtgatatcaacaaaataagagcccctattcattaatcccgtaacatgttcccagcaaggtggcattacataaatatgtctcacttagttctaatagtgatcttttggagaaatattattatttccattttaaggatgaataactggattttgaggtatgaaacttacacaaattcctgtgactggaaagcaataaagtataagctctggcctgacagcaaagcccatgttcctgacctctattgtcaatctccagtgtccctaactccaaaatataggtcttcttaatgtgatcacctcacaaaatgattttgcccattattggtgcacgctgatattcttaggtagaaacgatagaatatgatctacaaggcttagttacattaaatttgaaaacaaataaggagataaaaaatttcagggaggataaagattagtctgcatgtgcccattgcagtgaattgtaacagttttattaaaagggcaatgtgtgggtgcatgtgtggggaacaacactcgggcacactggcggtgatcttgagaagcagggtgctgatgtgaatacatttgtttcaagtactgtctgtttttctgaatgacaacattagtggtacattagtacattgatgaaactagtacatctactcctgagacattgtatttactagtagatgaatggtggtgaaggttggagagagaacctatgggctaaataatagagaattgaaggagaaaaagtcaaagcaaaatgttgggtaggcagactaaatgcattatcaccttctaagccatgagggaaaatccatgtaggagaaaatgggatggaaataaggaggagatggggcagatggttatgctgggaggcagagaactggagacaaagcctgcagtgattccccaacataagcagaacaccagttcaagcaataccttatgcatgtcctctggggtttgggtaggcttgtgccatgtgagttttgctaaaacaaaacaagagtcacctttgctccagttctcaacaagttcctcatcgccatctgagaccacctcagcctggaccttattgttcatattgctatcaggcttttagtcaaagccattcaacaagtctacagaaagttccaaactttcccatattttcctgtctttttctgagcgctccaatctgttccaacctctgcctgttacccagttccaaagtaacttccacatttatgggtatcttttcagcaatgctccactcccggtaccaatttactatattagtttgttttcacactgctggtaaagacatactcaagactgggcaatttacaaaagaaagaagtttaattggacttacagttccacatggctgggaagttctcagaatcatggctagaggtgaaaggctcttcttacatggtagcagcaagagaaaatgaggaagaagcaaaagcaaaactcttgataaacccatcagatctcgtgagacttactcactatcatgagaatagcatgagaaagactggtccccatgattcaattatgcccccacaccccccaggtccctcccacaacacgtcggaattctgggagatacaactgaagttgacattttggtggggacacagccaaactatatcaccacagatgataaacttgaaggtaaggttaaattggatcacctgatggagagagactgtggatcacaggataaataatacagattgccttctgcttgaggaatgcttttgttgaaggtcttagattggcccctgcagtcatgcatccatctttttgaaaccaggcttattacatgattattttgagagattatgtttagccataacacttactccaatgacgaaaatcatttatcactttttaccattgcataagtgttcctaaaggcagaggatgcattaaccactgtgaacaaattcctctgacatatagattgttttaaatatgtcactctgttggccaggaacttccagttattgaaaagctaagtataatgcaaagtatttagtttttccaaggttacctcttagttgtctcccttttacatatttacaattagatcactgtagagtgtcaatcctttttcttcttctcccactcaaactttatcattttaaacatacctttatcttctcgttattactattatattataaaatataataagtgtgaaaattaggaggaatatcacatttgtaaaggaagcccctatacagcaggtggggacaatgatctggttcacctctaggactctggataaataaactcaggttctttttctttttcatttcattttcttcttttctttctttctttcacttttttttgtttgtttgtttcctgagacatagtctcactctctcacccagtcttcaatgcagtggtgtgatcacggctcactgcagcctctatctcctgggctcaagcagatcctctcacctcagcctcttgagtactgggactatgggcatgtgccactagacgtggataattttttttcttttttagagagacaggttctcgccatgttttccaagctcgtttcatatacctgagctcaagtgaaccacatgcctgggcctcccaaattgctgggatttcagacctgatccattatgcctggccaataaactcaggttcttacctacttgtgaaaaaccacaaaaatattccctcctttgaattatgaaagaatgaattatctgtgtcacaccagtagtacttagcatgtgccagtatggaattggcatacagtagacatttaataaatgatgaagctaaccctcttaccaccataactcaatgagttaatcgaagatactcaattttataacatgtgggttaattaaatggtcaggctgaatctatgcagcagggtaaacagaatttgagaacagattgcaaaatttaggtaaattcaagtttttgtttggtttggcaccgcaagtaatgtttcctcacccaggcttcagttttaacagagatgattctgaatccagaatgatctttcttaagcttctgatttcttaagatgcatcagaagcttaagaaatcacctccctgtttaggtgatatttattggccagaattggggagatggatatggaagaacattggagacaagagaacccatcttcttcctccctatttttgggggtggaattacctgcattttccatgtagctttgttttttctttcatgccctgtccccactccctacaagaaagtaagaactttagtttccatctcctatatcacctgcttcctccagccattttaagaacagagccagcaagaaggataagcagtcagttgcctatagtgttgcatccacatttatgttactgtactgtgttttgtaggaaggagaaattttataaagttttttt

SEQ ID NO: 1881422 - DNA, 4001 bp, Homo sapiens; identical to SEQ ID NO: 316595

SEQ ID NO: 1881423 - DNA, 4001 bp, Homo sapiens; identical to SEQ ID NO: 316611

SEQ ID NO: 1881424 - DNA, 4001 bp, Homo sapiens
gccaccatgcccagctagttttttgtatttttagtagagacagggttttgccatgttggcaaggctggtctcaaactcctgacctcctgatctgcccacctcagcctcccaaagtgctgggattacaggcgtgagccactgcacccagccctaaaattcattttcctaaatgatatgttgcttcacttacagtttctgagaatctatcaacaatgttaagaatttactatacacatatataacttacatagctgtgtgtgtgagacacacatttttatatagatatatctcaaaagacattctacaaaaatagaaaataaaactcagagggagtattaggaattatgcattaaagttatcctcacctagggagaccaggtttctgtagttctccaacatcacatctctatacaaattctgctgggcagggtccaggcatttccactcttctggagagaattctatggccacatccctgaatgttaagggttcctgaaaatacatatgtatcaagtgacagagttcttaatttgactacaggtgaaatgtgttaagagaaccagttctgacatgtgactgactgggattatctgataaaacaactttcaacacagtaatgttctctaaagtattctatagctctgcggaaaaaggaaggcattccaacagtttctgttcctgcaataaaaataatgggctacactgacctgcccctaccaaaaccaagcagagtaggccctgtgacctcctggaaaacaggttgaactcacctctcatgaaaatatctggaagtcctcatgcttgaccttggccttgctataatatgcgaggaacttaatttaaaaaacagaaatgtttccacccagaacaatagacaggatgtgaggggagggcacaggtgatgatttcacttcactacgggaagactgggctgagagtcacttagctaagcactgtctctcaagcttcaatgcgcatatcaattatttgatgttaaaggcctcactgtaccaaaattttgcaggtttgaaaagagtccatgagttagcgtcttttatcaagtctcctgttaacggtgatgctcctccacctggacccattatagtactactcggctagagaaagcagacacagcacacagagtcccttaccccaacacaaacgcttttcatcccaagacaagaccaccaatcatcatcctgatgccactcgggagcagccacgcggaggaggcgcacagggcaaggggactggtgggaaagttggggcgggctggtgattcgcttcacttcctcacacacctcacaaaagtcttttttttcaagacccgctggcagcccccaagccacgagccacagccggcgctgccccattaatgagtccccgtttgctcacatgaactctatgttttgatggggcctcgatctcattccgtaaagtagggacaggacccctggaccacagctcctcctacgcggtacctgcgcacgccgcacctggcgtcttcccgatgagcttctcctcaccccacagcccggggaaggtgcagggttgcggcgcagagctgcacaaggagggctgcaggctgggccagagcagccttgcggggaccccgacaggagcgcgggtccctcaccggaggggactgaggaccgagggctaagcggcggcagcggggactccgttcgcagactcagtcccgccgccgccatttgccgccggttctgatgaggcctccccagccttgggacgccctgccccgcacactcaccatttctcagcttcaagggtgtcgcgaagtcttagctacgaatcatccaatacccgcaggttacagagcgatggaggctgaggctctggcaaaatcaccgaggcctccctgaggtgtggaagcagggaagtgaggccctaaccgagctcaggctgaagcaacaggccaaggccgccgaagatcccggatgccgccccctcctctcagactgcgcgcctgattgggcagttctcagtcaagcgctctgattggatatgggtccaggcttcacgccctcaggctttgaatgacagaaattgtgaccatacaatgcactgaatgaggcaagagtgacagactagtacctccaggcactttcaggcggcgcttaatctctgtgctaggcttggctctgcacagggttcattttaaccttctggtgtgtaacgttacgtcaatttataaattgtgcacgcgcgcgcgcacacacacagacacacttgttcacaaatggaaacaatatagtgacaattattttaatattttacatttcataacctttctggcctgtggtgttttgagtaggacacctgagatttgaagaggaaagcaaacctctaaaaaataaaatgttaggctgagcacggttgctcacgccagtaatcccaaagctttgggaggccgaggtggggggatcacggggtgaggagttcaagaccagcctggccaagatggtgaaaccccgtctctactaaaaaatataaaaattagccaggcatggtggtgggcgcctgtaatcccagctactcatgaagctgagacaggagaatcgcttgaacctggggggtggaggttgcagtgagctgagatcgcgccactgcactccagcctgggcgacagagtgagactccgtctcaaaaaataaacaaataaatgaataaaatgttggccgggcgcagtggctcacgcctgtaatcctagcactttgggaggccggggcgggtggatcacgaggtccggagatcgagaccatcctggctaacacggtgaaaccccgtctctattcaaaatacaaaaattagccgggcgtggtggggggcgcctgtagtcccagctactcgggaggctgaggcaggagaatggcgtgaacccaggagacggagcttcttgttagttgagatggcgtcactgctctccaggctgggtgacagagccagactccgtctcaaaaaaaaaaagctagctttatctaatatgaatttttttagcctaattatttagttattttacttttgactgccttagttcatcagcaattgttagtaatattttggcctttatattacaagtcataatactctttgcagacttactaatatttttttttactgtaaaccatcaccctctacagggaagtgtttgctatgcccctcctagatttaaacctcaaagtcataatctgagtattgatctctctctctaatactcattgtgttcacagtatctcttaatcagcaagcatctcactttggtcctaatctactttctgtggaactatgcaacctaatgctctatggtcattactcatacttctggctaaaatcaccttcatatgcactaattgtcaacaacctttttttagcactctataggcagctccacaactactaaagtctaccaattcttcctatgcctcaacctgttagctatgcatgaattcctcttcattcagggtaggaatgtcctacttggtcatagtacaagaatggccaacctcttagtcccaatatagcttcaactaccaccgagacctcactataccaaagcttccccctactaacgtgctatttctaacacaagctaaagcagcctttaaagattttcttaagcccacccccaccgttttaagccccttgttctcccgttacccttattgacctgattcctctatacatctatgctaccataaattccagaatccatgtgggtgtatttgactgagcacaatgcaacacaaacagcaccattattgatacttctcaaacttttttttactttcatgaaatattcccaataccaaatgagattctctgggccctttaaatattttaactcctggaccattcatccaaaatgataccactgaattctgcttcagtcacccttcttgcagtcaatccaactcatggtattgaccaagccagtatggattatgcaataagtttcaagtctttcattccttccagaaaac

SEQ ID NO: 1881425 - DNA, 4001 bp, Homo sapiens
aggccctgacattattctgaaaatcactacacaaatgattcccaagccccttctagctgtcaggccccggagcacaaaaatgaattccacctgctctgccctcgagttcacagccaagcaatgaccatttagagcaagagagcacatttattcactcagcaaacattgacggagcaccttctctgtgctgagaacgttctgtgtgaccttcacacgtgtaaaacagcgctctggcgactccccagaggaggcgccgggaagtcagcgggacccgggcatcccccccaggcagagtccccgctctcccagcccctaccctctgacgccccgagcatggctcctccaacccccactcctggcacccccctgccaggacggtctcatccattcccagggcttcactgtgtggctcctgctgagccatgcaggggacagagcccatccggagccacgcaccaattgccccttcccaggaaggtgactgcagggcacagctccttctttaagccctgatgctgagctgggaagcggccctgggctgtgcaagcctgagcttccatcagggtgctgcccaacaggagggaaggcatttgggaactggggtggctgttgaaggcaggaagccaacgctgttggcagagggcagagagagcaggagccggggaagcaggggtgaggcctgcagggtgggcataagccggcctgggatgggagctgctgtggggcctgggctgttggctttggtgggtttccccaactcccaggtgtaacctcacagtaaaaccctattcctaggcacaacccaagaagtccagtgaggccaggctccagcccatgtccacccagacctctctcttccttcaccccaagccgggcatctgcaggtgccctccgcagagctcatcaggaatcccctccccttgccactgcccaatgcagaactccccatctacctccccctccagcccccaccctgccgcccctgctggcctccttgccacccccagccaggccctggccacctgggagtcagccttcaacatcctctccctcaccgcggtcggccgagtcccgctcagctcgcctcctcctcatctccagcctctgtccactctcccatccccaccgccattcccaggttcaggctcctggtcccctacccacttcactgccccagtctctccagggtgacccagcctcgcagggaagcccttggcagtttctgaaacccaaatctgaccatgttcctggcgtgctccccattccgtgggggatgagggccacgtctgcagccacgttcaccagcccggctttacctctctccttccaccctccacacctgcccctcctcctgccttatgtctgtcagcagatctagacgccttggggacggttctgaccctaccagccctgtgcctcctgggagaggcgtctgggcctttacagtgggtgggactcactgtgctgtgcagaccactactcccatggcgcccgtgggcctttgcatcccacctgtaatgaggcaccttggggaggaccagaccaggtggtcctccatgttaaagaaacagtggaaagagtgacacttcccctcccaacctcctcaccttcctcttgggcctgacagttttcctgcccagggccctgcgcacagcagcccccctcctgcactgtctcggagctctccggacactgcccgtgaaatgggggtaatgctcctggttggtattaccctcgggggatgcattgccaggattcactgtgtgtccccttccttttttgcttttaccaagaatcagccgggacagccctgcttcccaagtgtgccgcacagctgcttggcccaattcctcctgtattagtttgttttcacgctgctgataaagacataccccagactgggaagaaaataaaggcttaactggacttacagttgcacatggctggggaggcctcagaatcatggcgggaggcgaaagacacttcttacgtggcagcagcaaaagaaaacgaggaagcagcaaaagcaggaacccttgataaaccctccaggtatcgtgagacttactcactatcacgagaataacggggaagaccagcccccatgattcaattaccttcccctgggtccctcccacaatgcatgggaattctgggaaatataattcaagctgagatttggatggggatacagccaaaccatatcacctccttccctgcctctctaatgcctctctccctgcacaggtgtgtgtcccaatgcctctctcttcctgcacaggtgcgtgttctgatgcttatctccctgcacaggtgcgtgttctgatgcttctctccctgcacaggtctgcttcttctgcaatcaatatgcacaatgctttcaggtcccatcgctctggatgaatccatcaggagaatcctttccttgcacttttcctatgatattacccctggttttaagcctgtttcacattcccagagactgggaactctttgggggcaggcgctggctgcctgttgctgccttgttgctgtctagcactggcttggcccaggaagcttttcagaaacactcatttaaccgcagcagcagcggcggatcctctcacggcgtccgctctgtgccaggctttgttccaggtgctttccatgagtcagctcaccggccgagcattcaaggtctgtttttctttttttagacggagtttcgctcttgttgcccaggctggagtgcaatggcgtgatctcggctcacaccaacctccgcctcccggcttcaagccattctcctgcctcagcctctggagtagctggattacaggcacctgccaccacgcccggctaattttgtatttgtagtagagacaggtttctccatgttggccaggctggtctcgaactccggacctcaggtgatccgcctgcctcagcctcccaaagtgctgggattacaggcgtgagccactgcacccggcccaaggtctgttttacactcgtcaagtattgggcacgtactgatccgtgacttatcccacgacacccgtaagactttaatcgagcagaaatcctttctctgtgggttatcttttcagctttagagactgtcccattttctttgactaatcattcaattataagtcatggagaggatatagaggacttgggcttctggctgtggcggattgcaaagtgaagcaggcctcccatgggcacatggggaggaaaccgtcaggcatgggggggatgggcgtgtcacgtgggtctggtggtcatgtgctgcagcctcaccctctgtgtcatcatgcacttgcagggcccagaggacactccattggctaaggtgttgggaggcgtccactggttccaagatctttcttgaaaagctctatgatgactgctttttcaactcagagctgagaacaggagccatccccactgaaactgggttctcgcattccataggtataatggcagctcttaatttccagagacaaagtgggcttgtgtattgggatgggaaacaagagctcagccataatcatcatggttgaacccacagagtgtcagtggtgatgaagggatcagggtgtctctgggattgaggtccccacacaggccactaaggtcttcccttgatctgcacaaagcaaacagagaaacaaagatgccctatctggctctgggaattagagaccctgcttgagtcaccgagaaacttagggcccttatcaatccatccccagacctgagccaggtggcagacccgaaggcccttgaatacggggggatgttatagccccttaggcatggtcctggcatgaatttataacaaagatttcctcctaaccttccccaaagacacttactggagtgatgtgcaccaaggaagactcctcacagttttgggggagtgaatggacgctgtctctgacctcgagcaaattccttgggcaaccagaccatgtggctcaccaatcatagcaagggtttgtggtggtcag

SEQ ID NO: 1881426 - DNA, 4001 bp, Homo sapiens; identical to SEQ ID NO: 316646

SEQ ID NO: 1881427 - DNA, 4001 bp, Homo sapiens; identical to SEQ ID NO: 316657

SEQ ID NO: 1881428 - DNA, 4001 bp, Homo sapiens
tacatatcagagctcccctggcctcccaggctcccagtccttgccctgccaagagccatattactagggcaacatataattatccttactgttgaagaaatggaagcttagagaagtgaagcccctgccttttaaattgcacaatgattcctcttcattgaaaatgccctttaactatttggttttccaaagttgatatatttgatgcttctaatacttgaaaacttaagtgtatgcccactgtgagtgagttattacattactctaatattgtattagaaaacaatcctgaatgagtttagagaaatagcttagagcatctgttgatgatgatttaaaacacagggattatatttccttgactgttaaagagtttgctgactagaaaccatgagctggttttattagctattatactaaaaagagtcattgaacaaagggtaagtcagatgatgtgggagggaatgaaagaattacaggtgaatagtctcaaattatttaattcattatacaccataccttaatgagtagatgaaaagttgaatgaaacactcattttactctagaacagtgtaatttaaaatggatgtgtaaaatcgcttagcatgaattcagagactttacaggaaaaaaatatatatttttttacttgtttctaaagtacaaattcagtttattaatccgtttatgacacagtacacaggaggcaaagtgtttcacatcatagacttcacttccaattccttggaatgttcatttctttggcttacaggagagactagacaggaaagccaggcaatgcttaggcaactaaaatgaggttgggggcaatgctaacgtcatcctcacaggaacagccacagggactgctagtcacaagcgggttttctagacctgttagctggaagcatggggagcaccatttctggacgctcgtgctgtgtcggacttcagccatctccaccacacaggtacagcacccttagtgtcttgctggatgtaatagtacagggacttgctatactttctcttgaattcagacctaattttcaacatgtccacttcattgtgggagaccatgattctgatcaggaccttatcttgagtccccatgcccattatggagtcgtacagccggtcagcgaaatacaggggcttgttctgaatacactggaccaggttcaggaaagaattttccaggtctcctttaacctctttcttgatgctctccaacatgtcataaggactgtagctcttgtacctatcaaatactttctggaagtgggacatgctccgctcggtcatgacgctgatccacttgggaacttcagttcctttcctcttcaccccagcgtcatagagatcccgggcatcttggtcaatcagttcataatcaatgacagagccatcctctgctcttctaccctttgccagggcaaccatcagcttgcagaagtcaccagatgtgtccgaaataatgtccttctccagatcagtcttgtacatttccttgtagactctgttaatttcctgcagctcttggttggttcttgagcagatgatctcaatgagggagtccttgttggttcccagccccttcatggaagattttagctcagaagcatcatactgagcaggtgtctttaataggcccaaagccactatctaggtggccagataaggctgacttaagtgctgatacaagttcctttttggtccttctctggtaggtgaaggcaatatcctgtctctgtgcattgctgtggttagtcaaaatgttgacagtggtgatctcatccacacctttggtcttgatggccatttcaatgttcaaagcatcctgctcagcatcaaatttggtgtaggctttgactgacccaaatgcacttgggagtgtagagtgttcaccctccaagctgagcttgcacaggatttcatgaacagcagatattttgaaggaagctgggctgggcaccaagacctgagagcgtccccagatgctgagctgaaaatatattattttatgcccctctcccctgccccacctctgcaaactaccacctttcctccctaaaatatatgaggagggaggtcgtgctaagttggcatcttaggtcattataggaccttcaccccatccttgagaatctcatccttgggaactcttcttgcatttcaagtggaaaaagatgcaactaatattgactaagtgctaggcactatgctgtgttatagggtgcaatggtgtacaggacagatgttgctcctgccctcaagcaacttacagtgtagtgaaggatacagacagttaaataaagtatcatgtgttaaaggatggggttttctaaaggattttaaagagaaaacatgattcatgtgagcccaaaatgtaattatcttcaccaccaaaacccagaagaagccatgtgtgtattggggaaaaaagtgttatgtaaaggatcaggagaaccaggttttattcttccccctgtctctgatgatctcggtaatgtgtctagcttcaactttctcatctataaaatggggatgataatgtttgtcctgctatctcatgggatggtatgtgagaaaatgtacatgaaagtgctataaatataattgaacattttgttttccagtgatacaatgggggttgtaatttactcactcattaataacttattcatgcactttttcatccagcaaacatttgttaagcacctacttgattgaagatcctgtgttagatcttacacttggctcagtttcatcttgttgcatgattccattcaaaacatctagatttatttagcattaacttcttttttttttttttttttgagatggagtcttgcaggctgaagtacagtggcatgatctcagcccactgcaaccactgcctcctgggttcaaacaattctcctgcctcggcctcctgagtagctgggattacaggcatgcgccaccatgctcagctaattttttgtatttttagtagtagggatggggtttcattatgttggccaggctggtcttaaattcctgacctcaagtgatccacccaccttggcctcccaaagtgctgggattacaggtgtaagccattgtgcccggccagcattaatttcatattaagttggagtgggtggtgagaggaaatctgcatttattgatcccctatttcagtctaagggttcaccttatgtaatcttcctggaggggtaggtggaagtgaccaggaagaatatgggtgagaagctgttgaattaaaaattcattttgtgcttcataggctagacttgcatctggaaaaacaaaatgatttaattatggaattatagaataattgttaaattgattataattactttaaaaattcttgttattcattctactagctaatatgtaaccatcaaatgaaatcttttacattaaagtagatagaaaaatattttataagtattatatgtgttttgtgttatttatatttgttatgaaagaactagtttttattatatatttagaatactttagagagagagaagagactttctacaaatgaaacagaatttactgaaaagcttgaagagtaaggcatgatcccaaattatttctaacttctggaattgccttaagacactttacaaacacttgaacattgcagcataatgacaatctactgtagtgctgcatcaccatcaagatatttctagtttaactgttggtgaaaatagttggcatcaattgtcttcccaagtatatgctagtggtgtccttttaatcttcaggagtaacacactgattctgctgtgctttcaggtagagtttaaaaaataataataatcaataatctccaatacgacaaaagaggaccgtaagaatcaggagatgttaccaggaatcccaaccagccattcagaaaccaagccatagagcttaaagaaaagattttttaaaaacaaatattgcaaaataaaaatggtagtgcctgtttcgtttag

SEQ ID NO: 1881429 - DNA, 4001 bp, Homo sapiens
gacttcaccagttgctattaatagctatgtgaccactgggagaatgcttatacctctcttaacctctgttttatcatctataaatatatggcaataacttatttgcaaagttgctaagagcatgaaatgacgtactgcacctaagtgcctactacagatgttcagttggtgtttgtacctgctcttccatttagaaatccccaaatacaaaaattagtattattaccttgttccatgtatgaggaccagcataatccctctgcctggaatggcttctgcccctaaaagtcctaattggatttcaagattcagatttcagtgtattttcttttggcatttcagaggtgcaattaagctctttcttatcatagctcctatattgctttatttgtgtctctaataataataaccacttaatatgtggtggatgccatgttagcacccgttccccttaaaggaagggataaattattatttcagctgccgggagtgcaaccagcagatatgccctctttaggaattatctcagatgaaagcacctctcaggccatgccttttcccaagatagccacatccccaaacgtaaagtgtgatacaagggcccaggtccttcacaacactggagacaactccaaaaaatcatctgtcttcagaacttccctcagagttggctaaagcttccaatgagaccacatcacagctcggcctctccctgtgcccaggcttatgtccttcccttttcttccccaggtggtggtcacagaatgttgcctaataattcccctccacccgaatctctatttcagaatttgcaagtcggaaacccaatttgcagtatacttcaggcccttgttacattactgcaataatttgttcacaacctgtctcactcagtgggctgggtgtgcttctgatattttaaaaaacattcttaggacctagtcatacctggcacatacgaatacctagcaaatatttgttgaataaattcatttaaaaagagatcctatttttcttggccaggaaactctttctagtctcttctttaattaaatttatttatttataatctttctttacagaaaaagaatgtaaagaaattaactgaaagttaactaccattacatagtgggtaagtgaaaatgacagaattgtaaaagcaagtatgtcataaggatcaatatagttgtaattattcactggatattttaaagtcattcaataaatagtcattgagcagaataactgtataccaggcattgcttaaatgctaagtctttttccccaaggagaattatattcaaatgacagcaaaagccaaaaatagaatgaagtagtataatttcatagagtaatagatggtatgaaagccactgagggggatcagaacacaccatccctaaatatgccactttgggatactgattattttgagctggagatgctcaatagcagatgcaggaagggctctctgccttttccttttttacttaaaagcagagtgtaaatttaccatgagaaaagtgccctccctgtatcaccaagaagggaatattctcatcatcagagacagggagttgacacagagatgaatctacacaaacaaatcttacaaaaataacccttatcttccattagcttctcccatgtatttcctagtcacttttccacaatttctttccccaaccctaaactcttttactttggctttgtcatatctccacaatttatgacctttgttaaaatgttatgtaaacccctaggtctaactgcttctttgaggtttttacttctttcttcctacaaagcctcctacgacacataaaaatgttaacctcaagtaaaatgtgtatgctttttcttttgttagtatgtcttttgtctatacaattcacaggtcctagtcacagaatttaagagggtagaggaaaggtattcccttacctacatcactttaggtcggatggtcagggagggactcccaaaaaagacgaacagagacttcagtgataaaaatctgctcttgcagagatctggggaaagaaacttttctattctattctattctattctattctattctattctattctattctattctattctattctattctattctattctattctattctattccattctattctattctattctattccattctattctattctattctattattctactctatttttgagactccaggctggagtgcagtggcatgatctcagcttactgtaacttctgcctcccaggtttgagtgattcttgtgcctcagcctcccaagtagctgggattacaggcatgcaccaccaaccagctaattttttgttttgttttgttttgttttcttagtagagacagggtctcaccatgttgcacagactggtctcaaactcctgggctcaagcgatagacccaccttggccacccaaagtgctgggattacaggcatgagccaccacaccctgcctctatgggaaagaaacttttagacagacaaaatagttaatataaaggccagggaacaaaaacaaatttgaccctaagctcctagcagctaaatatagtaaattgcttgtttttatctgggaggggatgtgtttttattcttaaggagagtcagctttccattgaataaaatctgagagaggtaaacaatgtcttcatcaaccatttcacaacaaacacagaaggagaaatctgtgatggctttttgtagtgacactggagacctaacattaagaagcattcaggaaaaacagtttctgtgaagtgctataatgactcacaatacttagagtagtagctagatgacatgacctttaagttttcttctttaagtaagaattgtatgtcagtctaagattgcatcctctatcgagggcttcagtgcaggtatcttagactattcatttattctctgattcattaatcaagaaaaacattgttcagaaaaccttggacaaagtcttaaatcatagcactctgtgttcctgctgcatttaagttatgactcacaatttaagctgacttcatacaattctactgaaatatcacctatccagataaaaagttgcttgtttcccacacataattccattcttttcatttgcaaatgtattccctcctctcattgctgtagaataggactctcagttattctgatatatattaagttttattgagatgcaaataaatgacaacaggcataaaattaaagaaagatgagtttcagtgtcaagatacgcaatgaagcaggaaatggagatcattaagctattactataagacagttttgcttaacctacctttgtaattttgttccccgacaactaaacaaaaaaagtatttattaaacagtgacagtctggcagggacatgccactataagtcaaaagaaagaaaatatattccaaagtgaaaaacagcaagttaagctttattatggtagcagagaaatgtcatcacattacaaaacatgtgctgcaaccatcaaatggctttgacttcttagtaaatcatatgtataaaatacctactgagtcaactagttaaattcattccattttgcaaatatttcaagcatgtgacatctcaaacccaaggcctaccacctatttttctcaatgataaaatcagaactgaacagaagagaagttgggattcagtaacagtgtgtgtgacagcatctggctagcatagctcctagcagataacataacactaatactcaatctcttccttccctccccttccctcttactttcacaacctagtatagaagaagggttatatcctgaaatagattacagtcaaaaaccacacatagctgcctcctttgtgggacctggagcaaggatacagatggaggccagcataccagatctacatatttaaaagttataaatgaagctggcaaactattaaataaaatgtgatatttccttctgtcttgataaatatattttataacaatctgaaaggc

SEQ ID NO: 1881430 - DNA, 4001 bp, Homo sapiens; identical to SEQ ID NO: 316694

SEQ ID NO: 1881431 - DNA, 4001 bp, Homo sapiens
attttaaaaaatatatttaaacaaggtatttaaaaaaatctgtctccttgtctgcaagttgattgaagtggaatctgtgtcttctctatccagagatgcctgtattccctgaatcagtatcttatacccagcagattctctgaaggatatttgctgaatggaggagttaagccaaggaaagataatccttagtgcaacttctgaaaagatacaggtgacaataccactagctccaaaacattctgcataatgtctgctttatttcactgcagtttatgagtgctccaattctaagggagattatacagctgtcaaatacaaattatcagtaattcacacagtagaaaggatagattcaatcaggtttctttcctctttaaacttgcttaatgttgatgagatattgacaatgatcaacacattacatttttagttctatggatttccagtaaattctctaagcttttctatgtatacaatcataagctctgtaatgaattataatttggtatcttattttcaatatttaaaactcatatttctaaactcacatttcattttcgataatttattatttttagttaattacataatagctcataattccttgctttgtcttttattttaatggtgtagaagttataatttccgtgtcttcaagcccccttctccccacaaaacacttagttaatatgaggatggagatgatgaaaaattggattgaggaccaggtagaaggtaatttaggtagtcatatgctttattgttttgaaagaaaggaggtggaaaagggaaggggtgggagtgagggtatcagagaagaattgggatgagagtaaaatgaatggattttatcttggaattcttggggcaagaggatgagtactggtactggggactggaacagtggttgaataaggaaggtcagatgatgtcaatgactaatttcacttgttttggaaattttctttcagatacctttcttcttccagtttggcattagaaatcacaatgcagatatatcatggggcaaaaagacctttgtggagactctaacattgcttttatagaaaaaacatgaccacatcttcatacactcaataaacactgggggcaccgcctgctttaagtgcaagctgcataaaataaattgatacacaaatgaattttttattgataagtgcaaaaagattacatttaatgtttaaaaaagatttaatagaaacaatttaagaaaagggagtagttgaaagaaaatagtaggctaagaattgaatatagaaatagatatgaagaaaattggaagaaagttacttcagggtgaaaaactgttaaaaaaaaaaatgacttagatcacacacttggtggtgaccagagactgtttgtcaatattttggaggaaaaaaattttacagaaggagaaaataagtaatgctggagagtgggaagctgaaaggtattgaaaggaaaagagtatttggaagtcacgagatatctccctgggaaatagagttggcaaaatggctgattttaaagaggttaactattctccccaaatttctgactgtgaactagcttactttatatttacccacttagaaagtgtttcaacacttaaagacttagcaaggagaccacaaagtataagacgttacatacttttccaaaagaaacacgactaactgtaaactgtcatcaaatacaaatggaatgggttttctcttttgggttttatttttttatttttaattttttggtggttgttttcgtttaacggtttcaaaaaatatgtagaagggaaatatttcatttcccttggacgctcaactgtatatatttcaagattcttaaaacccccacctcaaactgcaggcttaattttaatgtgttcattttttacaaggtgtgtcaacgttttatcaatttctgaaaagtgtctatggccccgaaaagttgaaatccacgacattatatcatctctgcgagccctttccagctctcaaggtacaataattccacgaatctttgttcttcaaaccaggaggttttctggaaaccttcttaaacaaccaggacaggacccatgagggaaatcttggggatgctctgagcagcggacggggcttgggaagcgcacccctgtacccgggctgcctccggcccgcaccccgccgctccccaagtcggctccgcactccgcacacaggcggcggcgctggggccgctccaagtgcgttgagaagtgtaatccctccgctaagtacttggctctcagtctccaatcactagtgggagctggagagggcaagtgaaaaaaaaaaattccagaggcagccgaggagcgagagggaaaaaaaaaaaaaaaaaaaaaaaaagtcccgcggtggcggcggcggcggcggcggagcggccgcggcggccagaagttgacggcgcagccgggcgcggggcgcggagtcggcggggcctcgcgggacgccgggcagtgcggagaccgcggcgctgaggacgcgggagccgggagcgcagccgcgggtaaggcgcgcgcggcggggccccgtcccctgcgggtggccgagttcccgagcgcgcgggaggcggccgagccggcgagagccgggcagagcgaggggcggcgcgggacgggtagcggctgggtgcggagctgggcggcggtcgccctaggcaggacggagcgcgcgagggagagggcgagagcgagggcgggctgcgcggccgtggggcggtggcggcggcggggagggggtcaggcggtggccgcctcggctttgtgcgcgggcggctctgccgggaccccgaggcctcgtgcctgcgcaggcgaggagtcggggcagcggcggcggcgggcgggacacgtgcttcgggctgtagggacgccccaaggcagggagtcggacctgcgagcggagggatggggcgggagggcgagctgagggcagtcgcggaatccgggaaatgggagggagcccggcggggcgggggcccagggccagcccaggcgggacccgcaggcacccacctgccccggacgcctcccgagacccagccttgccgtgggggaaagtgcgcagcgggctggtcccggcgccttggactgggctccgtctctgcttcagttgcctgtctcttctcctctctctcctgcttctctctctctatgcctctctctcaagttctgggtctttcattctctcccttttcttcctttctcccttcctctccttattgctatcctttgcctctccccccggtctctctttccttccgtgcgtctgtctccctctccccaccgcctgctctggctctcccagtgtgtccctcctctgtcccttcatcctcttccctctgtcactttcgcacaatcttttggtctctctctctctctcaagaggctttcgctcccggtcttcctggctcccctgtctcttgctctctgcgcccatctctctgctcgtccctctttctgtccaggctccgtgtttccgcctgtgtttggcggtgttggagaagagcctctggaagttgtccgctgtggtgcgggtcttacttctttagagctgcacccctccagctgggtcctgctgtttgttctgaatggaaacgctgcagttcccttgagttattagaaactgctcttttcttagccacctttccagcaaggtgaggtcagtgactacgagcggccacaaaggtgccagtgaaagacaacggaggaagagagccgtttcactacctccaacagataaagaaaatgtgttaataccaaacttacctgcagcaaagcagagccacctgagaaaaggttcttgagttctgcaaagaaacataaaaggctccactggaaatgagagggttcagctaaaaagtgtttgcaaataatttgaaaaagcacttaatggaaatctcttgctgtgctaaattgatgccaacgaatctctgttttcttacatatatttttaggattccagtgacaactctcc

SEQ ID NO: 1881432 - DNA, 4001 bp, Homo sapiens; identical to SEQ ID NO: 316719

SEQ ID NO: 1881433 - DNA, 4001 bp, Homo sapiens
caggtgatccgcctgcctcagcctcccaaagtgctgggattacaggcgtgagccaccgtgcttggcccaggattgctgttttctatgaaaatacactagagtctcagctcaacaagatgacttggaccccttgacactaagcgccagatatatctgagagatttcatcataaataattcttactgctatttgggtaacatgggcattgacctgtgaacactttaaacaatgaaaatgtatagatcaaagaacagaaactctgagctctgacaaataacattaaaaaatcacacacaaatgcagaaaacactcagctcctggtggaaaattcacttttcagccaaacgttttcttcaccaatgatataaaataaaacagtgttcctcaataacacattagcacttcattctacatatttacttgcaatcagtttgttctgcaaaaataaaagctggttaagcactctagtcatccttaaaaaaaaatacttgcggagcaatgagataatctagttcatcccctagtttccaatctgcaggaaaggtcaggccacagaactctcccaggttacactctacatacctcattccacttgacccactcaagagaacataaaactccccttccctgtcttctcccctccagtggtgtgtgagttacggttgggaggtggggtgctagtttctggggattcgagatttaacagaaactatcctaagtatgcattctagcaatcatacaaagggaggagtcctgaactaaaccgtcaaagaagccaatccacgtgacctaaacccttcaagctgggtccagcgctaagcaggcctggggcagacaatggcattatcagctgtccctgggcaggtggccaactagaacagcaggctctaagtcccatggaaagaaatcacagcctgatctcaagtacccacagaaagccagcaaactcatgcagtgaaaactattctccgaaacccatgcaatgaaaactattctccgatgggaaaggaggaggcagagagccagcaacaggcagcgcagagctgcgtggcttcgggttactgcggatgattgaaaccagaaggcgagacaaaaagaaaccagtgaggggtggggcgggtggaaggaaaaccccttaagactcctcaccactaaatctaaagggggaaccctcagagaggggtggcactttagctgctggcatcccccccgcttcccgcccgcacgctctggggcgcagaagggccggtcgtcccgggtcatgggggttgggggaccgattccctagcctcgcgagccccgccgccgccggtcttcccagaggcgccgaggggggacgcggtcccgacaccacactcacgtctccgatctgcagctccacttcctccagctggtccaccgttgggccgctgctcctgctcggaactggccagcccaaactcactgggccgcccggggaagatgctgcagaggcgtctgaagaggagggagaagagggaggcggcgggggcggcgaagaaacctgcaactcctcagggtcggccatggggaagggttgggaccgcggaatccgacccgagaagccgaaccgacaccaactgtcttttaaccactcgcgcccaaagccgaaaggccccgcctcctaacgccagaaatcccgcccagtctcctcgtgggtctcagccccggaccacaaagacgtttcatttttcgggacagccaatcatatgagtcaattcaccttaggcaactcacggctcctgcgcgagcctccaatcgatctcgaagggcactcgtagagaaaactacacctcccaggaagccgtgtgcgtcgccccgccttctactgcctttcactgcgcgtgcgtcgtgctgtgggattcgcggacccctctggccgcgctgtggctgtttcaccgctccccggctgggacttggagtcccttatctttccctggtttggtacatgacccggaagcctcggctggccgttgcgtcatccatggcgccggcgcagagcgagaaggaggtgggaacgccgtgaagcaagagcggtcggcagagcggggaggcgaactgcagcagagttcttgctttccggcaggtgatggcgccccccgcggcctagaggtccagcgcccgccgcgagcagcggacagtcctcctgttgtgtccgaccgagagtcctggtgactttgaacatgctggtgccgctagccaagctgtcctgcctgggtgagaggaaacgggcggtggggataagtggaggagttagggcaaaagggacaaggccggtcctgggggctgtaggcacctctcgccccttctctcatcagctttctcaggctatctagggcaaaggtcacgcgctgtcagcctgttgggggaccctggcttcctccctctggggttgccccagttggtagaattaatatctaggctaaaggtcaagggcggggaaaacttgtcaacacgccctcggcatcaccaccacctgtcaacacacacacacctcggtggactcctgaactgaggcttcccaaatcctggttctaatcttcaaacctctgttggaaatggaaaaaaaaaaatcgtatttgcccagtttttctccctggtcctgacctgactttcgtcttcggagccattctagttcagtctaaagaaattgaagtctgatctgtcacatcatggttaacattcatatgttgaccaagtcacccaagtgtatctggagccagtttttctgcgttgtctaaaattaagggctgggcgtggtggctcaagcctgtaatcccagcactctgggaggctgaggcggatggatcacctgaggtcaggagttcaagaccagcctggccaacattgtgaaaccccatctctactaaaaatacaaaaattagctgggcgttgtggcccactcctgtaatcccagctactcaggaggcttaggtaggagaatcacttgaacccggaggtggaggttgcagtgagctgagatcgcaccactgcactccagcctaggtgaaagagccagactccgtctcaaaaaaaaattaaattaaattaactctaagggctttatcgtgttatgggtattctgtgaaccatcgtgacagatgaagttggatggtctttttaaagttttacttaaatttttgttgttgtcgttaattcaaacagaaaagttccctaaaggatctcatattctgtcataactggcttaatttttttaaatctttagtttacttaagttttggtgatagaatcattaagtctaaatattccaaattcaaggatattcttatgaaatttcatgaaagtagaattttgttaaatttggcttccatatattaagaaattagaactttgtttaaatttcatgtcacccatgcattttttgctgcacttaatgtatggataagatggtgtttggaacgttaaagtagtcagatgctatctgccttagagcctaatttagatgcaatcagccttgggcccagtgctaaccaaattccactaccatttctgttttctttggatggcaattcattgccattttcgtagcctgctggcatgaaagaggtagacaccaatgtgccatcagtgtgactttgatatggtgatgctatgagttcagtggactttgtgacttctcttctcaaccacggagactgaatattccaatctctaaagtgagatatcagatgtgttttcagaaaaggggtaaaggttgtgacttttttttccaatcctttggagaaattcagactacacagttccaaatattctcaagaaaatcagtagctatacaagcagtagaaatagtttgtcatatgtcagtcatcagttttcagaagtaaataacttctatgcactaaactacaatgcattgaaaactaaatattttaaatattcgttatagtgtatttgaactcttgaactgagttctagaatatctttatgtatttaatatacttttttttttccaaaattgagga

SEQ ID NO: 1881434 - DNA, 4001 bp, Homo sapiens; identical to SEQ ID NO: 316760

SEQ ID NO: 1881435 - DNA, 4001 bp, Homo sapiens
aatgttttggggaaaaaaaactagttaaactcctagaagcaaattgcaaattacatcagagaaacatacagaactcttctcttcatattgctaaatctgagatttccaatcttctatttttatcacatacatttctttaaaaaaaacttttttttaatggagacagggtctcacttgtccgaggctagaatgcagtagtgtgatcacagctcactgcaccttgaactcctgggctcaagtaatcctccaactttggcctcccctaaaatactgggattacaggcatgaaacactgtgctggcctaaaaatattttagagacatcatctaaaatatggaattggaaacattatggaattatttttacatatccaattgggacaatatcacaagtgctaggttcagattatttccaaggtctttaaagtttatactgtgcacagcaacactgatcggcatgatttaacattcttttaaatcatgtttcaaaagttaaaatttttcttttctttttccattcaaaatattataattatcttaaacagaaatattataatatcaaaggcacctaaattagcaaaatcaaacaggtaggtttgtttgtttgtttgtttgaccaccttttccatacagctattatagtatgttctcactgaaggaaagatcctggccactgtcctagagaagatctaatactataagtgggtatcttgagagaatctgaatatacaatcctagattacaatgtggctttacactcataaggtggaatagagaatataaactgggtaaaacatcagaactgcaaagattttagtaaacaataccaaaacctttatattgtatattgaccttgcatatactcctgataataatccagtagattctagctgtcttctggaagcttgcatacaagtaaacactgaaactatttcttagagctagaatagatacggtagaaaaacaacaggctggggattaaaagtctttgattcttattctgcccctgccactgccatgtgcccagggcaggttatttcctctcttggccttggttcccttaagggaataatccttctaacttttaaattccatgattctaattatttaatatactgctagtaagtacgaaaagactaaaatcatatacatcaatgtgtcctagggaatttcatacacaattcaaggttatttttggacacagaaaactgaatatttatcaagttctgtattcaaagaagcagaaaatgaaatctgtctttatatatagcatcttacagttgtttcttagacttgctgaagtaatcatatttagcttgcatctcaagccttatcctaaatatcgaggaataaaaccacatcatgtgttaagaggtactccaagctacctggtaacatagaaattatgttaagacaggaaaatacatacatatcttaatggagatgaggtgataaaacaaggagtacagcagaagaaatttcatcaggaaatgcagcacagatgaaatgtgaattgaagaagtatagccataaccaaaaacagaatgaaaataaaccaaaatgtagtagttagttttaaaatatttggcaataaatttgtgaaccaccaaccaaagcttcaagtgtggaaatgaggactggggtaataaggaaaatgttgtctatttttttttggaatcatgattatatgttatctggcttcaccctacgtccatttctaccatagacagtgaccatcattaccaaacccactgaccagcaaagagatacaggtgaatggagtggaggaaagcagcagtgaaaagaggaagaaaagtgaaaaaagtatcatatgcaaagtactgttcctttagggtcttgtaggatatggtgtggtagatgtaaaccaatcaaaaataaaaagatgaaatttcatatcaattcccctccactcttaactcaagacttagggcttacttagatgtctgcctactgaaaataatcacacatcttcaagtctgttgtaacagctggcctcccacactggcctttgcagccacgcccacatatgaggctcattatgaagtaatgagaacatgcatataggacacaaagaaatatccacctcatcactctttggtcacacatgtatctcaatggcttcagctctgaatacaaagcacataagcaaacaaatataacagcatcagttaaattctggtggaaagtaagtagtttttgtagttattatattcaattacacctaattactagagttaaatgatataacagcactttgtgatataatgctcataaccagttaaatttctacagcccagtttggccaatatatgctgagtgattccccatgaatccatcttcttccactgaaataaattaaggttagttttcacctgctccaactataaacagatttaactttaaaaagtataggtaaagtatgtgagacatttcaaaatgggtaggggaaaaaaagaacaaaacattgattatttcatttaactctgaaagagtaataaagcatacactgcttttcttcaagttcttaagggctttgaattatgtgaggatatttaaaggttaaacacatgcttttagaagcacaatgttaattcctatactttaaaccagataattccagataatttaattttgacacacacatccaaatatatcaccaactggaaaattaaaactcctaaatcagctcaatgaattcctaattttgaaatcactattttgcgccaggactctaattggaagtatatataacttctgattttccatttactatgctaaataaaactgttttatagacctccccccacccccgccactgccccatatatcataacttttgttttgaatgagtatcttgggaagacaactagaaccttacctttttttcaaaaaaaaaaaaggagcccccaaatatacaacatgctaatgctattagaaatctggatccaatttacctgaagcagagccatgagctgaggtcatacttttaaccttggagtctgagagtcgagagatactgttagctctaattctaggagaaaatttatctgatggtactagtctggctccacttctaatgatggcttctgcggtcctcgaagaggcactacttctagaaattgttgcttcagagtcactacgagctgacagtgagccaagtcgtgttctacgaggctgagccaataaatcaatccgagagatgttacgccttcctgtgggaggttttgatgtagaacttgttgtggatacttcagaagcaacagatgctttgtcagcatcggcaagttcactgtctgaagcttcaccacgtcgtgctctgcgcaagagggaagtcctggtaggtcgcggccttggaagggtggttgatttactagatgaaccagataccaccggagaagtcttagatttcgttactttacttccttccagtttggaatgtacatgctcatcagctgaggtaagtggagtccgtccatgaggtttacaagagtaagtttcttgatcagatgacataatatcagagatggcagaatgaggtacactagaggtttggtcatcatctgttaagtctactgaaggctgtcttattctcccactggactgaacaaatttatgaccatctgctcttgaacccacatctgtggaacgactttttgttttcttttccattttttccctagcacctgaagatgatgattttgtaacatctttggaaggagaacctgtggaacacctatctttatagaggctagtgaaactctttcgcttttgggttgactttctttcagtttctccagtaaccagactgattgtactagctgtatctacatcagattctggtgaaatagaattgtctctcttataactgggagtatctggtccttcatcagttttattatcttcacgtagtttagcttctagaaaagccattactgcttctgtgtcttttagaataagggttgtgtccatactagaatcagg

SEQ ID NO: 1881436 - DNA, 4001 bp, Homo sapiens
gaaaatgaatacattcagatattaaattataaaactgcataacaaatacaaatttgttaattttccacaaggactaaaacaacgctattaataacgagtagtctttttcatcactctcaaaacatcttcctcgtttatttctccatctctatcatgatcagcttcatcaagcatttcctgtaaaacaaaatgtaaatatatgaaatacatttaaaatgacataaatgaagtcaaacacatattcaaaaccaaattttattttaaatgcataagtgcaactaaagttagaattataatcctaaattatcacataagttataattacatataaattataattataaaaataagcaaaatctacctgaagttcatcatgttaaattttcccctggtttcttagcaaacctcttgataccggttagtattatacttccagtatcatcatcatcaaataatttgaaagtcttcaatatttcttctttttcatcttttttactcttttaaaaaagaagcaactatccagtctttcatttatttattttatcaagctggacttaattagatctttggggtctaaagcagcaatgtgccaagtagctgtgttctgattttatttattggtcttttaacaattatgtactcacacctgccctcaaggtgcttaaaggtagagcttgctaaggtggagaaggcacagggtggtccagaatgcatctcttattaaacctcataattcagatccgttaccaaaaatgtaagcttcaaaatggaaggttgtatctttcaatgctccttagaatagtgcctggcaaaaataggcattcaatatatgttgctgaattaaaggcttccaaattctggccccattctctctatcctgcaatatagcctcattatttcctgacaaaaacctcttctccacatcatagtcttctcattactaccctgaaaacatatttaatcttgctcttcctatctcccatccttaaaaacctagttctaattgcttctctataaaacttctgattgctccagccctaaaatgtagcaggttattgctagtatttctttgaaaaataaaatcataactatatcatttttatactcataatggcaaaaaaaaatcttcaaaactaatggtgccaattccttctttatcaacttcagctaccattttttaaatttcttctttctttggttcaaatcctaaggcccacactgcaatctgaaataggaagaaaaggaattataatatgccatgatttctttctaagctttttaactccctattaagagcttctctcttttctattatggactgagcataaacagaaaattaggtcagcaggcctgtgtttcagtcctactgtgccatcatgtacatcactgttacaccctgggcttttgcctactcatttataaaacacaattaaaatgcttaacaagatatcgttttgctaatgcagggcaggcatatgcactgaagagactttatattaagctttcagaagactacttttaaagaaagccttaaagattgccacaaataatatggtttttaaaatgatttagaattagaaataatttcagaaccttcttttacatcgatggttccagacccatcaatatcaaataaattaaaggcgtctttaatttcttgcttttgggattcattcagttcaatttttgctgctcttttcttccattggtctgaacttgtatggtagttagatgcctgtaatacacacacatatgggtgaaagataaattatataactggaatagttagcagaaccagaataattgatgataaactatattaaagtacctatttcctactataaaatgaatctcaacaggagtaaggaaggagtgcagttgctgccaggggcagccttccttgctctggcggaaaaacttcggccccggccccagcagaaggttacagcttcacactcaccaggtccccagccggcagccggcgctctcagccgggacctcccggcgtcacctcccgcagccccgcccaacccaagtcttcacagctcactggcggttgctaaggccgctctcaccgacctctctcagccccgcccacccagcctgagttattgacatccagttcatccaatggacagaaaaaaaggcctttaaaccagccctttctctctactccctaccaatagcgtgacgtccccgcctttcgcagcccggcgttaagcggaacttctctctccagctgtgtctcttagcaactaagcccccggctcctccagaagcccctcttcgcacatgcgcaaactgcggacggggaactgggctccctagccctggcgtttttggtgttgctgtcccagccagaatcgcgtctggccggtgggaagccgggaactccagccccctgtaggagaggagaaaggagcgaggttagtagtgaggtgcttccgctgactgctaagctaagtctttcctgaagacgtgggagcccgtgtgtttgatttttctgtcctcttcgggccagggaaagaatgagaatctagggcctggaggtcctggggtgaattggtccagcatgtggctaggagtactagaggaagaggggactgccctttctttttgccgctagactttcctcattttctacagtgcctggagctgggccttcagccatttacctcctccctgttttgggcagggattctggcatggtagacaccagaattctgtatagcagtggcatggggtaacagtgtcgttggagggacgtgggtattgggataagcatgggtcttgggatgtatttaaagcttcactacatacatagataaacgtttttacatgtttcgtgtagcatttgtttacgaggtaggactttggccccacccataattactatcggaccccgccctccaaccccaacacacacacacacacacacacacacacacacacacacacacacacacatccagccatttccttggcccagtcctaagatttggccagttgtcaacgatatcaacttgatctgcacttcagagtcagacacaggtagtctgattatccagttgattcagtaacggcctagatttagatacttgtgaaacttttgtaaaccaactcaatctcttgtccagagggccagatttactgcttctgcccgttctgaatttggccaggaatcagcttaaaggacaggggagaaagactgaggtaggatggaccactgacttcctggtgggaatgaaggaatgagagaatcttaaaacttctaacctttaattgctcacacatgcggaccccttttatgcctcctacaatgtcttctctagaggaaatattttctaaaaattatactggattcttcaaaaatggattcaggaagaatactaactttagtctttttttttttttttttttttttgtctcacttatcttcctgaaggcaggagaggaaaacaagtgcaaagtgcattcttgaagcactctgtcaaatcacttttcatgcttcattgagtagaaacatggcacattttccaaagccatcagcctgtcttgttcatattatatcccagacagacacgcaagtattgtaatcattgataaaaatctcattaggcttctggaaaataggtaagtttatcctcatattgcaggtgatttttccatataaagttacccagtgaaaattaaaatggcacaaatccaagataatttttgagttaagtaaaatgtggtcactttaatatatgatttttcacgtcatttatctcacttggaaagttgctcttgatcagtttcaaggtcatacacttttttttttttgagaccgagtcctgctctgtcgcccaggctggagtgcagtggctcaatcccggctcactgcaagctccacctcccgggttctcgccgttcttctgcctcagcctcccgaatagctgggagtacaggcgcccgccaccgcgcccggctaatttttttgtatttttagtagagacgga

SEQ ID NO: 1881437 - DNA, 4001 bp, Homo sapiens; identical to SEQ ID NO: 316782

SEQ ID NO: 1881438 - DNA, 4001 bp, Homo sapiens
tcaataagggcaagatcaccagcttacaagatgtcagaaagtaactttctgctctaaaaaaatggggccctcacaaaagtagtgagtagaggccctggcaggatttggaatttggtgtatttaatatgaagtttgacattattatgtaataacaaacttgatggcttttccccgtttcagagagctctaaatcctctaagacaaaactagtaccagagcactaagaaatcttgtttttgttcaaaactctagcccagaaaggcaccagttagcttttaaaagtatgtgctctctcctctttactaactgcggtgttagtggataattgagctaaggtttatacctgtattttccccctatttcaagatttgttgttggatctgcaaatgattccaatcaaatacaactgtacttggaaaaaaatcatccgttgttaagactttacattccttagttgcagaagtagttttttttcctgcacaataccttttaaaaaatgaatatttaatatgtcaatatatactctgaaaataaccatttatattttaaattctgagctcaggttattttctagacattgtaatttagaataaaaatacttctccagttctacattttgcctgactgttaaaaatgattttgagattaataagttgaaccaattttctattcacctgaccaaattctgaaccatttgagttttttaaaaagtactttttccttattgtaaaggcaacataaaacttggttcattggacaggatagcagagataaacattatacatgaagtatagttccctggggcaatgttgctctctttctaccatgtttatttcgatttatataaatttgagacactgaacagaagtagaattcaaatagagaatgaggacttataaaaatgtacactctgcctacatcagtaagagtatgctaatttataaaattaaatatttaatcttagttcacttgtaaaccaaaatcaagtaaagtctgaatccaccttctattgctttgggggtttgagtctatattctaggattcatttaatagtttcatttctctaagcatcaagcaaaacagttaaaattacaaaacagaaacataaagttcacctcatcatgtagtatggatcactctgttattctttatctagaccttcaaatactttatgtaaaatgtttctatacaaaaggaaacacaggattagttcctcctctaatgcttctaaagagctctaccatggaaagctctctcccttccattttgcaagtctcaacaagtctgctgctgagtcagaacctccttttttccctgatgtaagaactatttctcccttgaaaattcataaagcttaggaataaattagagtctccctggggggaaggggcggggacgccggaatgaatgtggtggggaggagtcccacgctgcagccctgatggcacacgaaaggcttttatgaagcggagctggcccggggttactatgggagctcgccgtggaacccgttccacgcatccgagtgtgtaaataaccacgcggagcgtgtttgttccagggactttgttccttcttacccaagtgaaaatgcctggaatatagccgaggcttcatgtttaccctacagaaacaccctcggcggctctacgacgtcggtgacagcactcctaccagcgcctaaaaacagaaacaagcttagagggcgctacctagggctacaaggaggccctagatcggggactcggggtctagaggtgcgcggcgaggcgctcagcggacttcaagccggcagagcccagacgctagttcaccacaggacccccgggctgggccgggctcccgcgttgcgctgggggcccctcgggcgcctatttctacgcgggtcgcacagtgcaggcgccggtcggggtcccgggcctcagtttcccccgcgggccagccccgctctgggaagcccgagtggtgcagcagggcttctccccacccagggcggaaccgaggtgacaggaaggaggaggcaccgcgaggggcggagacgcgtgcgacccaggcagactctgcgcggatcccgcgccaaggaggggccgttgcccaggaaccgtccctccctcccgcgcgtgcttgccctcgtgcgcgcgcccgcccaatgctcccgaccactgtttgccagccgacccccaccccaaccggcctgtccatttccccgggagcggagagacccaacgggacacgccgctcgctcccgccctcccgggagcgcgagcgcgccctcggctgcgtctgcatagtaatgaggggcggggaggggcgacggggacgcggtggcctcgcgcccgcgcgtgccgggacgcaccgcggggggcggcgcgattgtgaggtggcgctgacgcacgttccggggttcttaagcggccagggcggctacggcgactgcgacggcggcggcggcggcgatcgccgcgaggggtggtggggccgaagtcggtgccccctggctcagtcacggtgtccctctctcactgactccccctccttccaccacggccgcgcaaccccagcgccggcggcttcctaggtggggcaggggacgaggagcgtctcctcccgctgccggcggcctgataaatgagggatttcgggtttggggtgctgcagaccgccccgctccgaagtagcagtcctgggcccctgttctgcggcgaggcgtatggtccttacgccgtggggtccgtcaacccgctgccctccgccacgcccttcggcccactgtcgccaccaccgttgcctgtcaccggcttcttagaggccgcctcccccttctccgtccccctcggcggcggcgcgggcagcccggccgccgccgcttcctcttcctccccgttcctggcgcatcagcagaccatgcaggatgagctgcttctggggctgacacagcagccggcgcggccgctttcgggggcggcggccacggagaaactccccgaccaccaccccggcggcggcacgatcgcgggtgtgacccacctcctcccctcccaggacttcaaaccgagtctgcaccacccctcctcctcctccgcctcctcctgctgctgctgccgcacctcctccccgcaggacttcagtaagcggcagcagcagcagctgagcagccagaagaggaaagagttcagccctccccaccttccccaccctccggactcgaagccgccgccgccgcctccgccgctccactgccccggtcggttcagcccgccgccgccgccagccggcccgctcctccagccggcgcagctcgctcagcgccagcagcaacagccgccgcagcagttcagcctcctgcatcagcagcacctctcgccgcaggacttcgccccgcggcagcgtccggcagacctgcccccgctcccgcagctccctccctcgccgcctgcagccccgcggcgccgccacggaggcgcgggcagccctcgcaagaccccagccgcgggcgagggcagcgccgccgagtcccccaatgcgggcttggcctcctcgacgccggtgaaccccgcgccgggctccatggagtcccccaaccaccctctgctcaacagtcccagtaacctcctgcccggaggtgcgcttggcgcgggcgccttcagcagcctgcagagcccggaccttccacacccgggcggcggcggcggcggcgggggcggggggcccccaggaggcggagggggaggcggctccgcgtcgccgccgccgctgcccggcttcggcaccccctggtcggtgcagaccgcgtcgccgccaccccagccccagcagccgccgccgacccagccgcagcagcagccgccgccaccccagcagccgccccagccgcagccgcagccgcccggctcgtctgccaccaccccgggcggcggcagcggcggctcgctcagcgccatgccgccgcccagccccgactcagagaacggcttctaccccgggctgccgtcgtccatgaa

SEQ ID NO: 1881439 - DNA, 4001 bp, Homo sapiens
tccaacatattacggaggaaaattcctgccttttttccctatacatacagcctatccaatactaaagtgaagtcactttgtagaaagactatttgcctgaacactctgtttaaggtagagtcaataatgtcattgatcatagactaaaaggtcacatatttagtctctgtttattactgttaatgcctgaatcttctgcatatagtaaaaagttcatttttcttatacacttaaataagaattgatatcactatatgtcccagtatgtttacatgatgtgccagagcaacagccaaaaggcaggtaaagatgaagaacttcatggttgtttggtcctgtaaaaacatgtacagaaaattaatcacataatttatagttccaaaacttatacattcttttatttatttacctattattatttttataccagatgattgagaaaagataatgaagattgaaagcatttgcttttgagaagctcataaatatgaatatgaatataatagtttattttgaaagagacttttttttcaacaggactaatttaaaggcatatttgttaaaatgtggaagattcattcaaatatcattggttcttggggctaatctccaatgacaggcattttgtgaagaatgattatcagaaaaacaaaatacaacaggaactccttttaaaatcagatttcaaggagtcaaaacatgcagcctggctccctaataggaaatagcagatagaattaacactggattgggaataaagaatcctgcaggtcccagtttaaccctggactggccactaaagcttcagtaagccagtgaacatcaccataccttatttaacacatttaataaatgtgagttgactacacgatctctaagatcccttccagctagactgatgtctcatattattgatataaacaaatccacaaggttttctgaatacgtgtcactaaatttctcttccttatgtttaaatgaataagtaaaaattaaagttattctaaaatatttttgatatatgtaactctttatagtgtacatatttacaatttatttttaaaggataatttaaagcttacccaatgataacaaaatgggcttatgatccacacctttgtgaatacagagggtgtgtctatacaggcatcaaattacaccttcatattttattgcataatttttgaaagatttctccattatatagtataaaatatctcacccttgaagtgaataataataccatgtagttgatgaaataatcattaataataccatatagttgatgaaataattatttattcttctaagatgcaaataataaatatgtatagagcatatttcatataggcaaagctttgttcacaattgtaaggcatatttcgttatctttataataaatacctgaagtaatatattttatatggctgtgtttatatcaattttacctataaatagcattttacatagatgaaagaattaaaacatggaaactgttagttcttaattagacatattcttaatattttgggaaaggaaattaaaaatagctgtaactactaagcaacaactatggcaaatattgtgctagacattttactgttatctgtaatcttcagaataactatgtaatgtcagaatttttgcctcccatttccagacggagaaagtggtcgagaggccatatacaaactgattatcttggtcatgacttcagaaaataacctcagtacctataagactgtgtcataataagcataacatattaattgtattattaaaaaataaaataacaaagaagtttgtcataaataaaaatatttcttaagcaatttatggtgtgttgatattgacacctttaaaaataattgcatttttattgtacagaagagtaataagctttaaaatattttttattagcacctaatacaagaaaaataatatatgaagatattaccttgtttcccaaatagaagaccagtggactacacagtggaaaatctgcagtgggttattttaatactatttaaaccttgttcctccataatagggtaattctgtgctttaaaatatctaaaaaggcacttgaattctgagaagtcagaatggttagaaatttttttcttgatttttgttccacaaattccaaggagtgctttaggacagtttgatttagaacatgataacaggaaatgaggatgttataatacttaataattggctgtattttgtatgtagcctcattcatgaaatagttttttgatttaagataagtatttttttatttccttgtctcctgttatcaaatttcccatagctaatatttgtgccccatttcttgttactctttatgcctcattcagaccctttcctgagcacaacatgaattcttgtgtctttgtgactcctcattttgtgtgagcaagaatttccgtctctcaaattctcattggaaatgcctgataaatttctgttttaaaacatcagcttaaaattggacaaagctgtgaaaatatcctgtgattctcatacaaacacaattccttatacagttggtgtatggttttttacatttaattaaaagaaaatataaaaatttatatgtagataggtgctaatatataactatatttgactgaacaaagatttactgagaacctactatatgccatgaactcttttgaacacataaaatagagtcatgaaaaaagaaaagttccatgctttatggagtttatggtttaactgaaagggagactaataaacatgataattaagtaatctatagttggtttgatagtgataaatactaaggggaaaacggaattggaaaaagaaataagaagttttgttagggaaggggttttcaatattagatagcatagctaggaaatcctccctgagcaaaagagtaaaaatgtaaagaagtaaatgtataaaccaggaagaatgctgggagaagagcaacctagtgcaggccttaaaataggatcatgcgtggcatgtttaaaaataacaaatagaagagtgtggctggggttgagtaaatctggttaacctgaggtcagagaaacaaaaggagccaaataacgcaggacttttagggccttgtgaaaacctcaaaacacttttactctggaattcagtttttggccagaattgcgtatcagggactgcatttaccttaactcctgttttcagtaactagacaaataacaaaataaatgatataaaaattttcctgtcttatacaataagaaatgcaggatggtgattcccaagagaagggaaaagagtgagatgagccctataataattatctcaccttattatgaggaaaaaatgtacaaattgcaacagagaaaggaagcgtttaaatagaataagcaattcccttaattgaagagatatagttgagattaatggatggaagcctctaaaattaatacctaatactgaagaggaaaagatttcaaagataggaaggaattgcacagggaaggaattctggagatctaaagagggttatctttaattatctgctgagttttgattagcaggaatgaatgcaagaaaactctatgaggctggggaaagaacatcagaaagaagcagatggtataatgcctggagcacaaacaggactgggaatagatcatgttaccatcagccagagtggaaataccttgtagtatacatggcatggttagaatacttagaaaggtattgcttgagtaatgtgttaagtttacctataaatgaatgaattttctgttctgcatttcctagtaaagctttaaagcaagtctaaagtgaaaattgtttaaaagcaactttactatgacctagaacatagctcaatgatatttaaatgaataaaaaaattcagggctcaaacaagctaatcacaaggtctgtcagccaataaagaattaccaggcgtgtaacaaagaaagaaaacatgacttgcagtgaagaaaaataatcaatcaatacaaata

SEQ ID NO: 1881440 - DNA, 4001 bp, Homo sapiens
acttatttgtcactattgctactattgttatttgttattgtatttggactgccctattttaaagttagaacttttgggtgtattttgcctcgagttactgtatttttttttgagagggagtctcgctctgttgccaggctggagtgcagtggcagatcttggctcactgcaacctccaaccccctggttcaggtgattctcctggcttagtcttccaagtggctgggattacaggcacgcaccaccaccctcagctaatctttatatttttagtagagacagggtttcaccatgttggccaggatggtcccgaactcccgtcctcaggtgatcctcctgccttggcctcccaaagtgctgggattacaggcctgagccactgagcctggccactgtatatatttttatcctgtacccctcgcctcttaaaaatgcaaaacttactaagtgggaacaaaggggtagacacttgtcttatgctgatctcctgggtttataaaaatctgatgttgataaggaacctgaagaaatgggaggaagttccacttctgataaaatgggttgattttgttctagagagaaaggaaattatgaatatttattccaacattttatatccttcatgagtcaaagcaaatgttagcaaaactgaatgaattagaactttaattagaaaatttataattggtggcaaatttgcttagaaaaagaatagtttacatacataaaaattaccttaactgttgcagaatttaaaaattatcaaattaagtaagaccacgggagaaaattatctatgtggggaagaaaagtatgtttaagaaagaaaaagaaaagaaaacaatcacaaggtacatgtctcaacttattccttttccatgtgtgttggaagttagtcttgtctttggagtcagaaatgaactttcattctctttacccagggcactggaatccacgaccctgattaaattgcttaaactgtttgagcattacttatcatgtgggattatatctgttaaactataaagagaagtttgcctagtaactaagtgttctagtaagctccggcgtctttgaactgattttgcaaagattatttttagggattaaatataaaaccacaaagcattttttcctcaggagaattttcatttaatagagagtgaaaaataagtgtgtgtagaaagtcaacgggtctttagaattgttggatgaatccatggttacgttaagagaggtacaaaatgagaatgttgctggaagtattttgacaaaatgtaagaaagatatttatagcaacgtggaagttagtaacgatctaaattcctaaaaagacaggttttatttggagcattccatttttaagtgttcaaaacaggtgtttctattataaaggttttagaaagcatgtctgctctgtgttgaaataagataattgccaaatttttagatgaatttactgtgttccaagcaatttttgtataaattaaatgtatatcatctaatacaatcttgcagggttaatgcagctctccgtattttcagttaaggaaactggagcttggagaggttaagtagtaactcgtgtagctggagttggaatacaagttgcctgacaccaaaatccatgcgctttccctacacaggaagcaaacttctctaatccgcagacgatggattacatcaggagtccccaacttttggacatcaaggactggttttgtggaagacaatttttccacggatgagggcgggggtatggtttcgggataaaactgttctacctcagatcatcaggcattagaaagattctcataaggagcacacaacccagatccctcacatgcgcagttcacaatacaattcgctctcctgagaatctaacgccaccgctgatctgacagaggcggagctcaggctagtgctagcttgcttgcagctcacctcctgctgtcctgcgtggttcctaacaggccaaggaccggtaccggtaccccctgtggtttggggaccccctagattatatgacctcccgtagcctgagaatgtttacacttcagataatcatctaagatcccgtcgtcaaagagaagttgagtgcgtaataatgtgatactttaactgcattggtatctaacaggtaatttaaacttgcaacaaactttctgaaatttgtaactcctccaaaatcagtggataatttctcaatactcatttttcttaaaatataaatccagactgatttgacaaaaataatagccagaaatcagagcaacaaaaatagcaaaaataggctcctacaaattggggataaatttctttctttttttttttttcttttttttttttttttgagacggagtcttgctcggtcgccagggtagaatgcagtggcctgatctcggctcactgcaacgtccgcctcccgggttcaagcgattctcctgcctcagcctcctgagtagctgggattacaggcacgcgccaccacgcccagctaacttttgtatttttagtagagacggggtttcacgatgttggccaggacggtctcgatctcttgacctggtgaaccacccgcctcgccctcccaaagtgctgggattacaggcgtgagccaccgcgccggccgataaatttcttaatgggatataatgaattgtgtgaatatttgagagaagaaacagccaaaataagatgttttacttgaaatcataatttatatgagaaatttaccagttgttttacgtagtgcttttgatccacagtgtgcttaacttcctggtaagaaaaaaaattaatttgtatacaaatatacaaaaataaaacactactaagtggtattaattttattttatttgaatgaaaattacctctgtggaaacttctgcagattccttttaggggaagaaaagaagaattaacattacttgcatgattaagcttcggagtcatgctagaatattaggggtaattaattaaatactcagggcccaagccactactactcaaaaattatgtcatttattaggaatttaataaattaattaaaaaattaaaacatttataatcagagtcatcattatcaaaatagcacatgaataaaaatgttttattttaaattttcataaattttttattattcatacaatatcaaatgcctacagaaggtgacaagtgacacaaaatattatgacacaggcctggtgaggtatgtggcaaaccaagtcccacataccctttctagaggacacaaatgttatctttaagcgactgttaactctccaattgaagatgatacttgaagcttggaagaagagtaaagcatgtttcctagtccctgactaggaagagtgtaggcttcacctaaggccacaaggtttgtggtgccaccatgcttcttcctttcccagatactttttcccatcatgtttattgtttgggtatttctaccatggcaggtgttcttgtgtcagtgatatacacaactcataatcgaatcccttattcagcctcttatttttaaaaacaaaagaatctcaaattttaaagtgcaccagaatataatgttgttgctgctagctgaggggcaacactttcagaaccaccgctctaagagatattgagaggtttttcaggataaaactatgctgaaggcaaatggcagcctcttgatttaaccctggcttcctttaaaatgcaattttctctgaaatcagatgtttgatacacactgtcaaaaagcacaaaacgggaaaccaatgttcggatagtcagtttcaatctccctcaaataccattgagtttgggttacaatttgatgaacaatctaattgctaaaaatctgccacgtcttggtgaacctgctttttgatgttaaaagaaaatagctcttacctcactagaagagctgctagaagattgcttgagaaataataataataataaaaatttagtgaccataagaaatccccagcattatttctttaatgatagaggtt

SEQ ID NO: 1881441 - DNA, 4001 bp, Homo sapiens
tcaggaggcgggagggggcagcgctgggcctcgtgtcgcttgtcgtcgtccgtcctgtgggcgctctgccctgtgtccttcgcgttcctcgttaagcagaagaagtcagtagttattctcccatgaacgttcttgtctgtgtacagtttttagaacattacaaaggatctgtttgcttagctgtcaacaaaaagaaaacctgaaggagcatttggaagtcaatttgaggtttttttttttgttttttttttttttgtatgttggaacgtgccccagaatgaggcagttggcaaacttctcaggacaatgaatccttcccgtttttctttttatgccacacagtgcattgttttttctacctgcttgtcttatttttagaataatttagaaaaacaaaacaaaggctgtttttcctaattttggcatgaacccccccttgttccaaatgaagacggcatcacgaagcagctccaaaaggaaaagcttgggcggtgcccagcgtgcccgctgcccatcgacgtctgtcctggggacgtggagggtggcagcgtccccgcctgcaccagtgccgtcctgctgatgtggtaggctagcaatattttggttaaaatcatgtttgtgactgtaaccatttgtatgaattattttaaagaaataaaaatcctggaaagagccagcgtgcccagcatctattctggtgactttctctcatgaggacacgggtgagcctcagtcctggctctggtgacctccacggctcagctcagcctctctgaagtgggcggcctaagagagacccagagacagtgcagtggcaggttgggcagtggtctctgtgtgtaccgggcctgtccctctgcccactgggtctgtgggacgctgtagggtcctggcttggaggcggcctgcccgcagtgccccagtgggagggaagcagtgtgccagccgggccgttgtgtggatgatggtgtgactggctgaggtcctgccccactgcccacccctcccttcttggcatagctcctgcaggccggcctgcaacctgggaagactgtgggccacaggaggaaggaaagcagatgtcagggctgaggaagctccccagaccatgggtcagccagcctacggaaatgggcaaaaaagccaaaaggggtcatgcctcaccttggcccacagctgagcctgtttaccggcgtcctcttcaaaatcccagcctcctggtttctcagagctgcttttggaagcgtggtccatgcaaatcagcagagtcccaactcatttatgagaaggggctgcagcgggtccaggcggtgcgaggaggggctgcagcgggtccaggtagtacgaggaggggctgcagcgggtgctggggaacccgggtcccctcgggatgtttccatcccaagcctttccctgcatgcaggtgggttatcctgccaccccaagtgtccagaccctgccgcgtcatccgccaagtgtcaacctccccttgctccctgccccatataaagcagaaagaagcgggggggggctgctgcctttggtggggtgccccctcctacctggctctgcaccccagtgctcgcagaggtctcttgggtatgggcagtggctcccagtctcgaggcccacgccgaggacagccccacctcatgactgaggcctctgctccctgccctctccggaggtgagtggcagaggccgcccagcccatctctgacctgtcttgggctcttcaacttggagccccctgggccactgagggaggtggcctgggcagggtgggaagggtgggttctggacacggttaacaagccggccctggttttgctgacgtgggcacgggtgtgaggaggggcagccaaggtgacttcaagtgtctgggctgcaggctggagctgatgttttctgatatctctggtgggggctgcagaggtggcagtgggaagaccaggagttccgcgctgacggctgactccagcctctccacaggcaagccctgggctgggtcactgggccctggtcagcccccacggcagccgagggtggggctggcctctggcagggtgggccgccctcccagctccagctggagacaggccccgccctgagaggcagccagacactgggaactagctctggacacaggcctggaggctcccactcagctggcctcattgtttccatgtttccaagttgaagggtcggggcaggaatggaatgcctccaagggctgtctgtggtgtgagcctggcggccagggagccgggacgctgaagtgtaactgagtctgggatgtaagggacagaaagctgtcagaaaagtgctctgagcctcgaaacgaacctccccttggtgccgcctccggggagtcaccccgcccagcaaggccccaggaggggtgcggggtagcaggaggtgggtggggggccctcagcctcggtttcctggcctgtgaaatcggcagcactgtttatctccctagaggctggtattaggctggaggttgtgccaaaacgcttaagacaagaacatgaaggaaggtttgcatgttggaagggaagagataagtctctggtatttgctgacaagcatctgtgtacaagacccaagaaaatcagccaaagcctgcagctaatcctgagactggccaggtgacctcacaggagcgcctctggtgcctgccaactgtctcccccaagctgaggcggaaacaaacggaaacaaagtcgcagacagcgggtgccccatgacaggacgtgtcctgctctgtccttacgacgcagggtctggcctgctcacgcgattccacagtgagtgggcacagtggtcagaacctggtcccagccactggcacccggctggtaaagaccgtgggagtgaccagggccgccaaccgtggtgaacggtgaggccgccggatgaccagacgggctgtgctcgcgggcggcgggctgttagtgttgtaaactacatgcgctttaaataccttttaccgagtgctagagccgttcatcaccaccccacgcagaatttcagctgcttacgttgaacaaattcaacaagtttatcctcaagtttatatgcagcaacaaaggtctatgaatttgggctcataaaactcaggcgaattaaagaggaaacagccacagcagcctggttctgacactgagggctccggggcaggggcagggcccgctggcttggcgtgcgcgtgcgtgcacaggtgtgtgggtgtctgcctggtgggcgggcggcgtgtgcgtgtgcgcatgtgtgtttgtgaactggcgatgtgatcgagggcacgggtgctgggcttccccctcatgggtaaaaccagagctactgtatgccagccgtggaggcatggacggcccctgagctcggacagcagacggacagaccgttgacgcgttggcaccgtggccagagtccgttcaagaaaggtcggcagagagggctgagaacgcggcaggcacatcctccaagggccctgctggaacccctggagcaggaggaagcggtgattctccaggccttgggtagggctcagaggcaagaggggtggagctggggagggtcgggcagccccagcacctcaggctactgcgccttggtggggaactctcctgcggctgctgatgaacacccgggctctggtctcctgtagacttccgccccgggcacgggagcaaggggaggctgcaggcagctccgggggccttggcaggaagttgggagggtcgggacagtccctctggggtggcccaagcagggcacagggcagggagccaggctcttcggggccccaccccaggctggccctgcaccccatcctgccttctctccccactgtgggcccagaacttgccccgtgggggccgggaagcacccaccatccccacccctagctgctctcagccagagcccagctggacttgcaggattgattttccagcaaaaaacaacagcagagaaacccaagagcagctgcatga

SEQ ID NO: 1881442 - DNA, 4001 bp, Homo sapiens
gcaggcacacaaacagccaaacgctgaccctggagggcggtggtcatctgctcatcacaggggaaagactggaggtgggagaggcaggtgccacccgcaggagttgggacgagctgtgcacacggctgggcacacgcaaagctgagccttcttcgtgagcaacacggtcacatttgggtgtaggaatcttggctggagttgcccaacgtggggagcagacagctctgcagccaggaccccagttggagaaggcagcgcttggaacaagccaggacagtggacagacgggccggtgccaaatagaagtcatgataacgcgctgacaagctgtgcagacgaacactgtgtgtagacggaggccatggagagtgacgatggggaagacgctggatccctggctggcctgcatccctctccgttctcagttgcctgtggaattccggggagctctgctccagctacactgcacataaaagtgcgcaggaagtggatcctggagaggaactgttcttctggactgagcttgctgctcatggcagccccacctgcaggacccaaagccttatgtgatgtttgctggacactcagccacgtggctgcctgttgagctctgcaagtccacgcgggagccaggaattcctccccagaagtctctccattatattcaccaccccctagtaaatcacaacctgacttgctgcagaggatggagtgcctgggactcgtctgaccccagctcccctggggaagtgggggtggtacgtccctgcacccggccacgtgctgccttctcctgggctgcctgtccatgctgagcagacaggaaagtccagtgaggtccctgcctgtgcactccaccaaccacatcgtcccttcccggcagcctcacctaggcccctccagctacgaccccttgtcccctgcaccgatgcctggccttggaggttgctgctcatttttctggaattttttcttagatctctgcagggctgcccctccccctacaagggctccacacgtgttccctccttcatgactcccactgggcttccccgacagggcctcaccctccccaaagctctggtgacacctgccaggtttcctccaggccacagctcggcagcccgatcttagaacagaacgtggcacgcagggcaggtctggctgagggcccagcattgtcagcggggttggaggtcttcccgggcctcgaaggggagacgtaggcttctcagggcagcccaggacgcgtcctcacgaaccacagcgaaattacagcaggtatctcgcggataggagtctgcatcattccgtctccatgccgtggtttctgaaattatgcaactatctcggcattccagagggctcagagtagccacgcgcagaggccctccccatggggtggatggaagcgtccactcgcggcgcgaggaatatccctgggcccctcgggagagtctgcaggggcagcccctgggtgagcaggcccagtgcggcctctccctgaagggactttcgggccctcccgggtcggggcttcaccggtagcaggcagggctttgatattaatgcttaaagggaaagcagagctgagctgtcaggacgttggttagctacaaaccctactcttgttaaaagagaaatggggtcggggaaggggttctccagccctgaacttcccgggccgggcaggacgcggtccctccaggagtcggggctcccccgcctggggacgcactggggcaggcgcgcttctcctctcggggtcccatgtgccgccggctctcggacggtaaatcagggctcgggtgggggcgatggggggcccgcggcctcggtgcccctggccagcctcggaggcgcacgggccaggccgcggggcgagaagcgagcgcgggagggcggcagctggcggagcgggaagggagcggggcggctgcggctgcggcgcggaggagcgccatttacgttcgggcccgcgccaggcgctgacgtgggcggccctgtctcggcttccgggcccgcagggtcctcggggcggacggcgctcccgccagcggcgctgagtccggcccgaccctgcccgacttcctcggggacaggcggtttagaacgtgcggaacaccaggcccggggcctccgccgggctgcagccccgcgagcttcccgccaggctcccgccccgccccgccccgcagccgcgtcccggccgggcgggccctgagccgcccgcgtgagtccgtgcgccgcccgcgctgggaaccaggagaccaaccgcgaggccccgcccgcgcgcgccgccgtgtccccgcccgcgcggtcgtcggagcgcggctcagcggcgcggcggagactcggcacggcggcggccaggcgcaggcgggcgggcggagcagcggacggcgccgaggccgccccacgcgccgggctcgcggcggcgcagcgcgccggagtggtcggggcccgcggccgctcgcgcctctcgatgggcagctcgcacttgctcaacaagggcctgccgcttggtaaggccgcgcgcgcgcgcgtttccggccgcgggcgggggcggggcggggcgggtgccgcgcgggcggggggcgcgggggcggaccgagcgcgcgcccgcgggccgccggctttgtgtgcgagtgcgcgtgcgcgccggcgtccgcgcgtggccgcggtcgggggcgggaccgcgggaagggtcttgcgcatgcgcgggccgctgcgtgtgcgcgagcgccgcagtctgctctccccgcccgcggcccgtgcaggtgacacaaaagggcctgtgggcctctgggctgccccgccggacccccagctccaccgaccccagccccgtcggacccgggacggcaccccgggtcccgatccccggccgctaccccgtccccggtcatgaccccgtggctgggcctgcggggccgggatggggcgggagccgtgcgcagctcggggtgtcctggggcgcgcgctcccgggccactcgcgggagcgcgcctcccgcggggaggccgccggcgaccgtggccgcgcgctgtgggggaaggggacggggcgcgggtgccgggtatgaccgtggaggaggccgctgccctcagaccgggcccaaagcgcagcccccggcggtgacgcgggagggcccggggtctccgttcccgcgaactccgcgaggtcccggaccggcccagcgcccccacctgcccttgcctgggcccgcccaggtcccggggcgccttcctcgcgggctgcggccgcggaagcagggagcacgggcgggcgccgggcttgccaccatcgccatcttgcagcgcccgcgtcctgggccggcccgagccgctgcgcggagcctctctttccctcgacccggctgcaaaggcagagtccgtgcgcctgagccccgggccgagactggagcgttctctggcggcctccaagggcgccggtgtctggaagcccggcctgggccagatcccttttgctgtcgtctccgtgattgccgggacagaattcccttccagtggggaaaagggaaggcggtcgcgcccttcccggtgccctgagtggggaggtgaaaccctgagagttggggcaagagggcctggagctagggccgaggcggcgggtgcgcagggtgttccgttgagcccgagccccccccccctccccggcctctccaccgtttctgtaggagcgcggcagggagcacacgtccctcgggaagaaaacggcgctggcggctgggcccgcaccgcggccgtcctcgctgagctcctagcgcgtggcctttgcgcgtctgtgtacccgtctgcagcttggggcagggttgggggagaaccgtggggtaactatttgccgttgcagctgaggatgacagctgcggtttgggggtccccctttctgtgtcctggaactttgtagggcgtggctctgccctgggcctcagcacccggcctcccaggtctcccctgcctgcccgggcctggccacct

SEQ ID NO: 1881443 - DNA, 4001 bp, Homo sapiens; identical to SEQ ID NO: 316806

SEQ ID NO: 1881444 - DNA, 4001 bp, Homo sapiens
ctgtgccaaattttgtgaaccttcttaggctcaatgcaatgaaataatatgaagagtttatattcttaacagctcgactgtggtcctttcctagtttggttgaaataattcttaactgttacaccaggacaccaaatctcaagagacaagtgactttccagaagtcacattgcctaaaagttatacatgtgaagcctctcattcagagatactcacaggtgatgaaacttgagttatcactaatccatttctttacctgtgaaatgggagaatagaatctgtaaggttagccgagagaaaagacaagagacccaaggtcaggccaagtaagtttattaacctgccaggcttctccaccagtcggaggtggcagccctgagcttacaaaatgaggggtttatatgggggagagagaccctggggttgttagtcaattaactttaccacatataatctcatgaccggcttacaatatattatcttgtgaaaataggaatttacaagggggtgtaatccacgtttctcatgacctcccccgtgccacccagagggcttcggtgtagcaagtctggtgaccttgctatagcgcctagataacggttcaggaatgcagctgcagagtattcagggtaagggtcagctgcattgagttagcgggggcggagtggtcctggggcagcctgtccctaacagaatccacctccgagttgtgacaattaaatgaaaaggttgaaaaggtgaacatgaagcacctgctacactgccctgttgccaccagcattgtcactgctctagctcctgtggcactgcacggacacgtggttgctacaagttagtacgcatatttggccttattagaggcactttcctattgtaactgaagggatagttggcttaagtcaattgaaataccagcaacaggacattccagcttcaatggcttgtgcctgtagttgtcaacctatagaaagaaaagttttaaaatgacgttttaaccaaagaaaactgaaatgtattgcttgttctataaactgtaaagaaaatcacaaaggcgctcaagttgtaacgaaactttttctggttcagttgtgactccagacaggatccaaagaggagctttccagtctcttctctgggttttatggagacttactttacccttctgtgttagcctcttaaagcactgggtcaaccttaaaagggcacaggaaagggtgctttgtgattttttttctttgatttttacagggttcactactattttccgcgttgctctcaatacctcgtggatctctgcttctctaagtctgaaaccacactagaaacacagctgttttgtttggtgagcccctacatggatgtttccttccagttaaggggagccggattcggaccttggcgacaaacagacgccggggaaccctccggtcccactggccacgtgctccaggctgactcattccttcccccaccccgctcaaggctaggaacatacctgcgctaagaactgaggcagctgcacttccgcagacgtaagagacgaactcctggagctcaaggtcggctggggttgggttcctgtcccgcacgcgtggcccgcccgaaacccgctacatagtggcgcgtcagccctggggaagcaaagcgcaaaattgttacggtgcccagacctgcgccgggaacctccggctgttccgctgggcgcggcgcctgtgcctcgcgcagccccgggacgggcaccgccgcccgccccccgggccgccgagggctgctctacccctccgttctggccgccgggagcagaggagctcgaggcgggcaaagctcgtggggacaccgggcgagcccagcccctgatcggacccacgggccggccgggcgccctccccgcgggagaccgaaagccgaagactggagatgcactcaccgcgcaactccagctgacaaagaggcctgcgacctgcgacgggcgcacaaaccagagaggcggcgcggggcggggagggaagcaggagggtcgcgaggcccgcagccaatcccgggaagactctgggcaagggcggggcgcgcagccgatcccctggagaggtcgggtagctcagccaatcccgggaagatcctgagcggggcggggtggagggccgcggcacgcacagccaatcccggatggggcgggacgggcccggccattggctgtcggtgtccggggccggcctaggtgtggctcatgcagtagcacggggataagccatgtctgcgcgcggagcatccttctctgaattagatttttcaggctacctaccaatccccggcgttggtgattttggtgctcttgggccctagacccttcctcgggtgcccttctggagagggcatcgaggttactccagggttggcctaaggccctgggattccctttcttaaagccacactaatccggtgtgtgttcatcatctgtgtccgcctaaaccgtaagcttaaagagaagccacgaccatgtcttgttcaacaagctcactcccgtggcctctcctaaagctagaaggactacctcctttcctcatgctccctctttattcatttacagagtccaataagtagaccataatcagctggagggtaggagttggggaggttgagaaggcaaccatagcaatctcaaggtaacaggctcaaacttggcaaacaaataagtagaagaaaattggagtatatgctaaaaggagaacttctattgctgtttcacgtacttaccatctgctaacaaatctaatcctcaaaatatatttaatcatctccaaattatagatggggaaataattatgttatgtaacttgcccaaagtcacagagcagctagccagtggtagatccaggatttgaactcaagcagcctgaaggcagagcccctcaaacaacatgctacctagcctttccccaggtgttgggggtggagcaggaagggaaaccaaaaaatagcctacacttggttaacagatcaagacaggcagctctggtggggtgtggctttgtaaacagaaagaacaactcgtccagagccccaagataaaacaggaaagggctttacctgtttaaggactcccagaaatggaacttaaggagcagagtggcctgagatgagaatggcttggggccagaccatgcaggaaaccctggaagagtttttttgttttgttttgtttttgagatggagtctcgctctgttgcccagactggagtatagtggcacgatcttggctcactgcagcctccacctcccaagttcaaactattctcgtctcggcctcccgggtagttgggattacaggcatgcaccaccatgcctggttaatttttgtatttgtgaaagagtttatactttgtgctaagaatgatggaaagctgttcaagtgttttgtttgtttgttgtgtgtgtgtgtgtgtgttttaacaggggaatgataggatctgatgtagggtgtggtttcgggtgtgattaaggtggttttggtgggaagaagaagttgagtaaaatttaccaataaaccctagcacctagtcatcatcttgcagatattcataggatcttgttgaaattggagagtgaataccagtttgttgtcccttcacctttctcaagagtcttccaaacatatctctagttggaatctgttctttttatagtccctttggatagctgagagatattacctttcctttaactatggcaatgcatgtggtcaggcaacatgggaaaatataggaaaagagaagtaaatctccttagtaaagagactaatgcaggaattcagcagcaacctagcaggggctgggggtagttgtgcagaatgtcttccctcctccccaaatcaggggataaaaatgggaaggaattatgaaagaattatatttgtgtttgatttaagagaaattcaccttaatctgaaggcttcacatttctggccaaatacctcaattcaatgaacttacaaacagttcatt

SEQ ID NO: 1881445 - DNA, 4001 bp, Homo sapiens
tgtgcgccgggcctggggtctgcgttccgccgccaggcgctccgtgctggcagctgggcggctgcaggggcccgggcggcgggcgacggtggcccgggggcgacagggaggaggcgagccgccggagcggtgtcaggcccggacgctgcgcggggcccggtgtttcgcgggacgggggtctccacccagcccaggggacgacgcgttttccgggggtggggggtggggggtggggatggggcggtcaggcggcggggtgggctggtggagaggcaggagagctctgcccgggctgctcccacagcccaggcggctgcccgcaaacccgcgcgtgcgcagtaggcggcccacctgctggtacctgggccggctctgggatccccgggatgcccaggaaagaatggcagttctccgcggtgtggagtctctcaccggcctggacctagaaggcaggaatcccaggccggtcagcccggtggagggggcggggcggagacacgcccctccgtagccagccaggtgttccccgcgaaagagaggccaccgccctgccccgaaccacccgaccccgtcccaaccccgcgtcctaaagctcctccagcagagcccggtattcttcctcgctgaggggtgcttccagcgaggcgcctcttccgaggcctccagctcccccggggcctccgtttctaggagaggttgcgcctgctgcagaaactccgggctcgccaggagctcatccagcagcaggccgcaggggagtgcagaccagggcgccggctcctggagcgcctgggagggcgccgggatgccttgcatctgcccctgccgcgcggaggcggaggcgtccggggggcgcgggctggggaggtggagctgccccggcttggggttcccacgccgccccggcgacctggggaccccggccccagccccaccacggactcccctgggacgtgggtggcgcaagcaccccttggccctgcggccccgcttgagcgggcccaggctgtgccaccgcgcaggggcccggcaggccgtcgcgctgcgggtcccggtcctcccggcttttgcccgggtgcggaggccaccgaggagcctgagggtgggagagcgccccggctccggaggagccggggcggcgtaggcgaaatccccgcgcgccggggcaggttgggagatcccctctgccggcgcggcctggctgggctgcagcgcgggggcggccctcgctgcctggctcacgaaagccccctgtgggagagccccaggcgcgcgcatcccaatgtctccccatctcccctcacacacttctgacttgaggcacaatagatttataaataatggcatgacaagggtctccagaagtgtgcacagattttcccagatccccaaaagcaatgccaaactagtcagatcatttatgttctcacaagattctgggaggattttgcctgtgagttcgaatgcactttaagattctgggagggagagaaaaagccttaggggattgcagagtagaataagcataagacaggaaatgttcctctgttacagcaaggaaaatagaagtaggctttctgaaaacagtttgcactggagcagagatgaccacagtatattcaaactctggccttgtccgtgacgtttaatagggttttttgtttttctcttgtaaatttttttttcattggtgcagaaatttgatgaagtctggcttacagcctgtccactgcagtttattttttcacccagaacagtaactgggctaatgagaaaatgcccaactcccagtatctccttcaggagagaattaaaacagtagaatatgtgttgaaatgtttggctttttgataaattgtctaatgactagattctttctctcctgatgtggagtgctgaaggacatgatggagtcatatagatgacagtttgtgtctgctgagaagaaagatgagtgtttgctacagcactagtgaaactgcaataccacagacagccaactggggaagaaaatagacaatagaatctaaaatacattgagaaaaaattctctttaacttggaaacacagcgaagtccagagaaaatatatttgggaatgtgtttgtgaagcacctagaatctatagcctggactattgctgtcggtatccccctttactgagccagtctttaaatgctagatttgatgagtgctgtatagatccccagatctctttaaaaaaaaaaaatcacaaggcacacagagaaggcagaaaatattccccattggaagaaaaacataaatattcagaaactgaattttaacaaataaagattttttgcatatctgatggagaacttaaaataatcatcttatgcattctcagtgagcaaaactataacagaaagagacaactgagtgaaatttaaaaataacgaatgagcaaaatatcaacaaagagataaaaactatttttaaaaacccaacagaaatcatagagttgaagaatataataactgagttttataaattcactacagagacacaacagcgaacaatggagcagaaaaaagaaaattgaacatatattattcacaaatattgagtcctggaaactaatattttaaagaatgggaaaattacgggtgaaatataagacttactggacaccatcaagtagaccaatacattcagagatagagtcttttaaaaagaatagagggagaaaatggcataaacattatttcagagaaaaagcggggatgctaagaactttccagatttcaaagcgatgaaagaaaaaatactagcaaccaataataattgatctgggaaatactgtatttcaaaattagaaaaaaataaagactttcaaagattaaaataaaaaagctgaggttgttaactactagaataaccctaggaaaaaaaatgctaaagagagttaattatgttgaaaaattaaatgatgctggacagcatcataaaaccacatgaaaatataaagctctctgttcaatgtaaatatatacacagatatacaattttctactataatggtgcattaaattcttaaatctctgtgaaaatacaaatcatatataaagatacaatttgtaatgttaagaaagtgacggaagtaaaaatgaatatattttgtatgttgttaaggtgaagttgaaggcaaaagccatttgccctggggaccttagcaatgggcaagggaggaggcaaggctgccattttctctccctcatttcttccatctccccttactctgcatagggatttttcttggtctgcaggaatagtcaatgggccaggctctgtcctgcgtgcacaaacacacacacacacacaggtgcaggtgggcatggcatgtatacgcggaacctgggattttaattttaaaatttttaaaaagtgggaaaccaaggatttttggcatgattctcaggactttgggctggggaaagggtaagtctttgctttctgccatgtggcatgccatcagttgttggggctttctccctcaaggtgtcccccaaggagattgtgcaggagatttacccggtgctcatggtccgtgaagacatgtgtcaccgcacctgcttctcactgcccctggacagcaacatgctggaccacttctcagagatgtgcaacattgaggagcggcaggagggctcagggctgtgtgtgagggaaggctgttttggaagttcggtggactgccttggggacggcccccagaagcagggccaggaagcacttccccacttctctgagggctctgcgtcagatgagagcatgaaggtgggattggagctgcgctctgcttgtcaggctgtcacaccagcaccttctaacttcacaacccgtgagttaaagaacagcgttctgattccaaaaaaaatgaggcagtaccaagccaggcttgatatcagcccaacaaaattctataaagaaaaataatgtttaaaaaaaaagaaagaaaagcttcacagcctttgagtaggg

SEQ ID NO: 1881446 - DNA, 4001 bp, Homo sapiens; identical to SEQ ID NO: 316826

SEQ ID NO: 1881447 - DNA, 4001 bp, Homo sapiens
ctacattttaatcaagtcagcatagttatccatcactccaaatgagcatgtccttgtattagtgtccatgcattgtctatgatgtagatggagaggtatagcatattatcaaaacccacctcaaatcctgtgagggatgtgaatcaataaattaatgagtttgttctattgataccaaatggagagagatgagtggagattgatcactatcagttatgtcaaagaggtaagttttaaaccagtgtttgaagttatgtgagagaaaccaaaccaaacaaggtaattaaacttcaaattaactgcttttaattggtcacgtgtgtacatatacatgtttatgagtattttacatttctttgtataataaatcccctgaccaaaaaagatacaatgtaagactcaaggtgaatgttctggatacatgtatttgtagaagcaaaaggaagggacacaactggttggaacctgtatatctttaacattaggtggtaaaatggaatatactatggaaataaataccattgaaatgttttatggtattgccaatttaatacatattttatgataagaaagaagagaagaagttcattgtagattccacatgggtaaatactttaaaaagtattccaaatacagctcctcatatccttaatatatctgttgtcaattattatatatttcatgtcttggatcaagttttcttgtttggacaagaaatggaatggcaaaatccagatctttttagctgaaaacctcacctattctctattcacccacttctaaagtggacacaataattcttaaaatggtacttaaatcagtatagatttgcagaaacaaaggcctgcttaagaatgttctttcatttaagtattatgaggttaattaaatgtgtgaaattgtaacattttgaattattcacatggcattttagtttttccttttaagaaccatggcttttctgtgcaggtgttcttcactgggataatgttttaagataatcccctgatgtcatttaaaggaactcttatttctgaagcatgattgtgtgtttttgtgtttttatagtgtatctctttcttatcctcttttggcctttgtttatattctcattttaccactatcagctactattttctattgttgattgtttttattgtttattctattttctattgtgtatttgttttcacataacaaatcaaagcctgtttaatttgtggaagacagttgtcaaatgtgtaatatatccagttactaatttttctctgattgatgctgctcgtctcctttcagatgagtgccttattaaaaccatctaattttatggtgcttactagaaagaatgtagagaaattgtcaaaattttctattatttactcagtaacccaaaatgatgtttctggaataaaattttggcttctcagttagtgacttggtggtagatgaacatataactattataataatgtaatgaaaaaatatttttctgtcaaacatgtttttttttaaccttttacgaaataaaagttgttggtaagtgatgaaattaaatgccttcttcaatgccttgtggaaaaaatgtcactataaggagccactttttatacagttctaccctgatcaactatggttgtgtgtagatgtgagttttcctttataagcctgtaatttgggacatctgttaaaacaataaaaatttctaattctctttgatagagctggagtggaccagagaaattgcttgctttagatgaactcattgatagttgtgaaccaacacaagtaaaacatatgatgcaagtgatagaaccccagtttcaacgagacttcatttcattgctccctaaagaggtaaagattatcaattacattcttcattgggtgttatttgaatatataactcaacagctaccacctttaaacattgtcatgctaattatggtattcggtattgtcagtttgacactcttaattagtggtaaagagggctgtaaattgataaattgccatgacttaataatgtaattgtcagattaaagaatgcatgtgaactaagtaactcctttccactatttgaataagtcatatatgtgagagtaactattgagtttcactaatttgattatttatttaccaagatttttttgtcaagttatttgaagcccaacctttagttatcttggtatattcatgatagtagattttttaaaattctgaccatattaaaatagcaatattttttctcttattttattatatatcttaagtcccttcaagaccaataggtttatgattctattgaattctagttctctggtacttaacattgtgtaattattttaaatacaaatattataatttcacatgtgtatatttttctaatcattctcctccccatctccattacacaaatacagatttcccatactaattacatgctaacagcacttctttgggaattatttgtgcctatttctttttatatttttatgtaagctgaaactatcatagactgattatatgggcattcataactataaggcatagtttagatatagttcctttattgatattatagacctagtaattttgtcagtgaacagaaataatataacattaaataatcagcatcaccatgatttatattttcataagtaatatgtatatgcccctagttatatgtcagctaagaagacaatataaaatactaacataccatttcaaatgatcctgaaacttcaaatttgaacagaaaaaagtcatttttttaagattatcattctaaatatcctaatggtgttaaagatagtcccaattagaattgcacgttggatacgaataaaatagttgtatcatatttaatgcatggaactaagcataactccagagaaaagcaaagtggagaaaatcttttcttcctaaaatgtgttttctactgagtgctttttaaaaatgactttggcccagaagaaaatttttatttttgctggctcattctaaaactgaatcctttgaatagatttggcttatgaaagtgacgtcagctctctttgcttccagaagggcattaataatgggaaacacttacataagtatttgactgaaagtgattttattcacctttgatatattctctgtagtttacttagtgatatcctccgtattttagaggttatcatttttgttaaaatgcaggctttctcatagtctcattttttctcttatttctaataatggtgaggtttttggtttgttttgctttatttgaatttccataacttcttaacagacaaaatgttgtgtaagatcagaatatgaaagtattttgaaaaatctaagaattaaaaacaaataatcaataaccagggtaaatccagtaaagattctctcagtttaagtgttcttttaaagactgcctggggaaaaataagtgaaattagttatataggagactaagggagagccttggtttagcatatcatctgtgtttccctcttgttttcaactaccagaaaaaaaaattcctattttgaaaaatgctttattgtctaagtggataaataatgatatagaaaacattatcttctcagaaacaaagtattattatttaaaacattattaccttcttgtcaggaaatggacttatttttcttataattcctttggccatatctcaaaactatttacaaacatttactttattaatctcaaaaagcttgacagaagtctcactaatttcacactagaggcttgtgatgaatagcattgtctttataagtgaataccaagaaaatcataatcatacaatagatgatctagagcaaaacctgaaattcttaatagaggattagccaacatttaaaaataattttttttccttgactagtttaatccactgaaatacagcaagtctgggaaaatattggctaccttttaagtacaatgtggttgtcttttatataggttatagagaaaaataaaagcaattcttacagagt

SEQ ID NO: 1881448 - DNA, 4001 bp, Homo sapiens
tgaacttccttctctccagtctccagttccagctgtttcctcctgttatcaagctgggtgctgaggtgggtatctagcccagtaagcttagtgtgctgttattaaatactttctaagtaagtggctcaggctctcctgagtgcccttctgttcctcagcactgaggttgtaaggtggagccactgacaatgaaaacagaagatcacgctgctgaaaaaccctatgtggtacacacttaactggaggtgttctctgctgggctgcagaactctgatgtttgcactcttttccttcaaagcctacaaaggttaaactctctgaggtgtttagcttcacaaaatcccctaaatctgtgtgttttactcctttaatttccaccattcccctgttgtaagataggaagagggggaaaaacaaaaaatatttattttgtagccatgtgagaccatcacttgttggtctgattacctgtgagtcttatttggaaggctgtagcaggggattggtcacgtaaagacagaaaaatccagggtaatttaagcaggatatttaacctggctcttggaacttcaggtcaagggcagtagggtcaggtgctagtctgtgagtctctccttggttttgccacatcctcctttgcccctctcaccacctttcccgcagcattttaatgaacacgagcccttggatttacccagttaaaagtttccttagtttactgtttgcagatggtagtggcagtagtgggagaaacccagagcttcccacatttgtctataatacacttgctcctaccttaccccctcctccaggtggaaagacttgtaaaatccattactactgcttcccaaggaggtagagtgtactagggtccagggacagaattgtggaatctgctttcatcattgctgctgctttaatctttttctcatactattcactgaagacagatttctgaggattctggtccttttatcttaaatttgttttcctagagaactacactttaaacttcatgagtttctacttaactttcctttccaggataacatctgtaggaaaagctgcataatagtaataacacttattttagaaagaaaataacctttgagtcagacctgaaacaggccaacatttcttgatgacaacgtacactgatgaaccaagaccagaagctctcgaaagctccaaaccgtaagaaagaaccattcgtaaaagtgagggactattaaattcttcccctgacagtcaaaaatccttcagcaatctcccagaggatggctcccttccaatcctcccttcccgccgccctaacaatctgcgcgaggatgggtcccttcccttgctcggcatttcgtctccttttccactaaagactcaggttgtgactctgtactcaagccgcacccctgtttcctttcatggctagggggaggggaggaatgtattacaactcatttttacaatgcactgcagtttacaaagcgcttgcacttccaccatatcctctgagcttcacgagtgccacgtgagagaggcattcattcattcattcattcatcaaacatttgctcggcccgaccacacgttatccaacgctgggtctcaccccacgccacgggaagggtggggcgctctctccctggagcaggtgcagatcaggctgtagggtaactcctcgatcagtccggcttttcgagggtctgtttggggccaaatgcctcaccttcgggtggtgcgcgcagctgcctgaagacgcggcctgggcctcctccttcctcccaaaggagcagtccccacctgccccgaaggaaaccgctacagaccaagctctccaggccgccctcgggtcaggggtaagatcgggcggcagcttaggctcgactcggctcctccccttcctctcttcagttctgacgcggccgtagaggcggcagcggcggtggcggctgcgagtcccgcggcccgaggcgcacccacccgctcgccgatccccacttcctcttcccttggagcgtcatcagagcgcgccagaggcgcccagggcggggtggctggaagggggaaaaaggccagcggaggaagcctcagagcggaaagaagagggagggggaagagagcggttgctaggtgacttgcgtcatcggcaggcgccgctctcctcccgcccctctctctggagtgaggcgagagccccgcacagagcgagggagacagcgagctgagctccgggcgctgccgctgccgctgccgccgccgccgccgctgagactgagagcgaaggagcatccgagagatccagtccccctgcactggccgccgccgagaccttcgctctcacctgggccagcgggagccgcggccgcactcctttccccccctcaccttcccggccggcagcggcggctgcacacgccggagccggagccagagccggagcccgagcctgagccggagccggcggcttggggggcagggaggcggctaccacgggccgggagtgggtagctgctccgcggtgagagaacgctgaggaggcgccagagcttctgcctcgtcccgtggggcgtggggcgagacccccaaggtgtagggaggggggtcccagccgcagcgacacatgcgggagccgggagcgggggcggcgccgagcggagccggccgggtccctcgccttgccgccgactcggccacccgcccggggccgtagcatcttgccccggagtgtatgaaccggggccccaaccaagctcggcaaccaccccccggccgggggggcggggaccccgatgtgaagcggcggctggggcggcggagagaacaggaccgacgccgccgtcctttcctcaccttccccctcccctcagccccctccgggggtcttctcccttggccagtcgccggccccccggctccttggctggactccgggaggagttcctagagcccccctcccccgccccagtcccgagggcggcggggccgggggggacccggggggccggccgcagcctccacccagaggaaactttacaaaaacaaaatccggagtctcccaaacctgactgtcccgggagaagtggccctggacgggcagaagccgcagcctgaaaagacccaggaagaggaaaagaggaggtaagcggggccgccgcctcccctcccctggcagcgcggaagagacccgggttgccgcctggtttagcgacacgagcaccgcttcttcctcagtaccgcgccggagccttccgcagctgccgcttcagtccgaaggaggaagggaaccaacccactttctcggcgccgcggctcttttctaaaagtgtgagtggccccgggagagggaattgagggggagaaagtgggaggatgccggcgcttcctcctggagttttgctgatgttctccagtagtgttgggagtctatcaatgagggagtctagctttattcacggaggggggaaggtgttagggaggcctgtattttgtaactttttagctctttgtacgagtaatgcaagtatgcaggtttctgtcggaggagtcttttctccaaagtgaatactcgcacctttctggccagcagttggcaaagggaaattgaggaagccagagcatatgtgcgcacagaggccatctgtatctgtaaccttttcctggtactgtgggtgtgtgcggtgtactttttgtttcgggggtactctcatataggttcccgaatgagaactacttaacctgtggacccctgaaagtaaaattccttttttaaaaaacaacaacaaacctgttttgagagaggttcatttcagtacctattggtacaggagttaaccttctcagttactgggtccaatttcatgtgtgtcaggaggacactgtaacagatgtcagttactcaggaacttgagttgttaggaatcacaacttacttggggaagagcatttatcacattaatcattttataaaagttgtgattttttccctttcacccccccctttt

SEQ ID NO: 1881449 - DNA, 4001 bp, Homo sapiens; identical to SEQ ID NO: 316846

SEQ ID NO: 1881450 - DNA, 4001 bp, Homo sapiens; identical to SEQ ID NO: 316857

SEQ ID NO: 1881451 - DNA, 4001 bp, Homo sapiens; identical to SEQ ID NO: 316860

SEQ ID NO: 1881452 - DNA, 4001 bp, Homo sapiens
attataattgtaggggagaggggagcttacattttgaatggtcctcaaatagaaacataaattttaactttccatctcacccgtgaggctttttgccaaactgagaaactgattcactgctcttcctctaaatttgcttcatccattcggagcacattataataaaaagaacctgctttcagacttctggtgccaaaacatttcaggaaaaaaagaaatcaaagatgagctttcacctctttacaaaattgcatcactgctgctttattctttcatctttattgcaaatatttaaacaaaaaacaaatgtcaccagctaaagatagtgaggaatttattgtggagacaaacaaggctctagatatgtcaaaactggtgagctgactcacctttattaggtgtgaacggaagcccaagctttacagtggttactatacatgaaattaaatgagatatctttcttctataatcagacctttctgtaagtgctttctctgcagccttttgtttttaaatgcctgtgtactaaaattgtccttcaaatgtatctctttgaaagaatgaataaatcgagggaatatactaaagcaagaaaagacataatagaggtgaagcatagaaagttgattgttttaactgttttttttttcactgtttgtaaatctcccaatgctatagggcacaatcaattaaaataattaatttttcaaaaccctgaatttatttgaccgaggctaatttcactggaatgtatgtcgtgtatctgcatatcgtccaatttctaaaatactaaaacattttatcaatgaaataaatgaattaaatcgccacctatgaaagtacctggcacactacaaatctcaatagtcaaattctttgactccttgaaatctcaaacagagctaccgcctctttatttactctacaatttacttctgaagaaaacattgagtaattatcctattccagccatcaaagtatgggaagaacagaaagagtcagcagcggtaagcggtatgggtgtttaagaaactagccacggaccagcagagcctgcgaatgcgcggcgatgtgacgacaaggttgttgatgccacagcctgtgagggacagcaggcaagatgccaaacggagggacccgcgtctctaagggccgccggctgagctggggctgatctcccttccgcctcccgggaaccccagtcctcgccagcgtcgtcaggattccttgccctaattatcccgggaggaagacgcgcctttcccggagaccgctaggcaacactcaccaaggcagcctccagattacttccctccgtgggtgtgtgacttcgtcgaagcaactcacacttacagtagattctcactggcgaggctgcgagcagcagagggcgggggagctgggaagaggaggagggaaggagggtgggaggcgctgagctgggaggcagaggagacgccggagctccagacacagcaggagcgcgccttggcggtgcagtttcaacctcgacttcgcagccgcgcacacaccgcctgctccccgagcagcgggaaccgcagcagctcctgggccgccgcagcgcagctccgcgctcctaccggccggcagccgtcagtccctcccctcttcagcactcagcccgcagctatttccttctgccagtctctttgaactctggatctttgcttttgctcgctgctctcctgtttttcattctccacattttctcaagtcctctttctttatccttagccaccctgcttttttcctccttttttaaaaaatcggagatttcgtcttaaaatgatttgccttccttaccttcgtccatttcaacactgaaggctgcaaagaaccttcacctttcccctagtggtatttaaaaattctcaatccgtaaaaagtctttttgaaaggcaaaggaacaggacccaggaccctctcgacacccttgatccgagtccagatctgcactagcaaccagaactaatatttcatttaaccccaccaaagggggaggcgagaggagccagaagcaaacttcagctgtctcagccggatccgtggttcctacatttggaggagccgcgtgccagaaggcgtaggaccccaaggggggacaaggaggactcccgagtctcccttcgccgctctgcgaggccgaagcggtggactgagccgctcgggacagcggcaccggaggaggctcggagaagatgcggggctcggggccccggggtgcgggacgccggcggcccccaagcggcggcggcgacacccccatcaccccagcgtccctggccggctgctactctgcacctcgacgggctcccctctggacgtgccttctcctgtgcgccgcactccggaccctcctggccagccccagcaacgaaggtagggagatgggggtggggaccgtggcgacctggggcggaggggctaggcggggcctgggagttcaggtctcagcgcgctggacgctgctgctgcagactaaatcgcagtctcatctcaaattggtatttgtcgtccccttccactggccttttcgctcccctctgcggtttttggttgcattgtttgacgttagctgcggagtgctgggcaaggaacatgcgtgtggacagaggctggttggggggctgggaaggtggaaaaccttgggggaaaggaggtcgaggcctcctttggggaatggaggcccgttccagggggatgggtgcggctgggcctcacttaaggcgcgtggggaagtgacatttcgggcttgaaggagtgggaactgttggaagctcagtgacaaggatctctggagcagtggggcttttagaaaccgttatttgaggccagtgatgggaaacgttgtgggggtggctggatgcttttatttttggggaaagtgcctgctgggagctgttatttagggcatcaccagctgctattctggggtgggtggcaggagcttttatttctcgtgggaggggtatagcgaaggacagaaggcgccccacacagttgggtgcccttcttcttgggggagttcattgtcacactcaagccaaggtggaagaaggcgagaaggtgggatgccgcggcaggaggggtgagggggagtgtcgctgctaggaagttgccgctaaaacccacctgggcatgtcttaaagacggaaaagacctgctctggccagcacctgatccaggagtacccagtccccctccctacccccaatcctgtgctccagacccagaatactgtccctgcctttttctgggagagtagagctggcgcgggagcaacacctgtgtcgctcttcgtgctcccggaacagtgctcagcccctctgtccgcctgcctcttggacctgagacctctgcctttgggtcccctccagcagcgcttgctcctctcccacacccggactgagctcgggtctcagcccaagggcgcattactcgcggaggggcgggaacagtatctcagatccagatctgtcagctccaccatgaaaacatagaaaaacctacccactttggctagaatggtgaggtttcggtttggggctgtggatgcgacgcgtgaggctcaaaaccttgcagaaattccttccactcctgggcacgggacactagaccggaaagatgaagcagcagtggtggagtcgtgtgtgtcctcgtgacttgcatgggttcagtctccgctgtaggagaaggcgctgagctgatatcccagcaatgccagctctaaaggaagggtgtgaaagcagggcagatagaggctcccctgccctcatcccatgaactttctctttaacctctaagtttattttttaaacgctaattaaaggcttatgtgtatttatctgcatttatctatatacatatatatagctatctctcatgcttaagccaaacaattgggtattttccctttctgataaagttgaaaaaatgtttttgagagtcgtagaccttttattaacaccttatgttaaatt

SEQ ID NO: 1881453 - DNA, 4001 bp, Homo sapiens; identical to SEQ ID NO: 316866

SEQ ID NO: 1881454 - DNA, 4001 bp, Homo sapiens
gattgcaattcagatgtcaagttaacctgatgagtgatttgaacacacacacacacacacacacacacacacacacacacacttgctttgtaaattaaaaatctggagcaagccacagaacatggtccctttcagaagggagtgtctttgttctgcatagctcctgtcctgatggtgtgggcacctctgagtggtctctccattgtgctggacctggttgctgtaactaacaatgggtggctctcctggtctgaaatctaaagagcatgttagtcacctgcaagcctgctcttatttaaaagagctggttcacctccttttttacatcgtcaaattagatcccctcagagaaatgccagaatgttcagttgacacattaacgctgaattaaaactagctacaatttccaacttgcagatggtggtgagaccaaaggtaataacaatgaatttgtcattcagccacaagggattgatgcagccaattaaggctactctctgcccatgagattctgctcaggttttctactccatcgtgactaggggagatcaccggaagggatgatttcttccacttacatcacacagaactcctgcaaaggggttttcactccacaaacacttgtgatggctcttattatgttccagacactgcttgaagccctctacaactattaactcatctaatcctcccaacaacgcttaatggtgagttctattactccgatcacttaagaggaaacctggatgctaagtaacttgtccaaggtcacacagctagtgaatggcacagctgggatgtgaacacaagcgctgtgacttcagaatccaggctcgccctgactttgctacaccactcctgtgcccgagataaagctgggtttccaatctccgcatcgttcacatttagggccaagtaattatttgttgttggaggctattctatacattgtagtgtccctggcctctacccactgggtccctggagtaaccctccctcccctgagctgtgaaaaccaaaaatgtcttcagatactgccaaatatctctttggggacaaaatcatctcgttgagatatcattctctatgtctatcatagaaatagaatgactaaaaagaagaaataatagaaaaatgtggcattactaaaaacaatcgtagtatgtccgtctctgtacattttgagatagaattattaggaaatatctcaaaacagtcctctctttttttgagacggagtctctctctgctgcccagactggagtgcaatggcaccatctcgcctcaccgcaacctccccctcctgggttcaagcgattctcgtgcctcagcctcccgagtcgctggtattacaggcacccaccaccacgcccggctaattttttgtattttttagtagagatggggtttcgccaagttggccaggctggtcttgaactcctgacctcaggtgatccacctgccttggcctcccaaagtgctgggattacaggcgtgagccactgcgcccaggctcaaaatagtccttcttttagcttttatgttatctctccttcctagcttttttttttttttttttttttttttttggcttaggcagctaggaagcccagagctctatcttcacctgaagccacgagcatttgaggaattatgtgctcaatattgttagatgccgcatatgcacagaaatagaggaagttacacgggtttcagcctcgttgaagaaaagcatcgacagggaaattagaatcagtcaagcagccagaacatatgtaaatgttaccttatgcggcctgtgggaatgaagcacaacaggacacgtgggcgcggtagtgagcagggccggctctactgaggaggtcggtgagcagagtccgcagcggaaaaggcgaaggcgacgtgacgtccagcaagctcgccatgttgagaaggtaacacggcgaagccccgcccagctgggatggaaggcgccgttggaaggaacgtgaggcacagttggaagcaggcaacggtgggcgttgcaggctcgtgaacaagaacaggaagcgtgctcgcttcggcagcgcatggactaacattggaacggtacagggaagatcagcagggcccctgtgccaggacggcacgcgaattcctgaagtgttccaaataaataaatgagtaagaacaggaagtggtactgggcgtttcaggaataataacgagcagcggggaaccagggctctgcggggctcatggcgagttatggaagctgttacgaatctgccttatggtgaggaagacagagatcgaggtgttggcagtgaaatggaaagtaaggggtgattaagggaaaatatttgaaattgaagaattgacagggatccatggtttgttagacattgaaaataataacaaatgtggtaggctgcttctcagtgagctcccactatcccctttctcctgggagccacactgcagtggaagctcttcccccagtgtgggctagacctagtgactcatttctaatgaacagaatatggcagagtaaggggtcactcttacaaaagaatgtggcttccatcttgggtgtgagtggcctccggggagacccgcataacaatgaaatgatgtccctggaccagccagagaggaccagaggactgtcagcagtcccatgagcgagcctggatgtgaatgcgtcccctgatccccgacgttcagctgtgagatggccgcagcactggccacagccttgactgcagccttgtagagaacctgggccagaggatgctgctaagccacgcctggactcctgagccacagggactgtgaatggatcaaagtgtgctgtttgaagccactaaatccagggggcattagttacacagcaatggagaaaaagtacaacaagcttacaagacaaaaaataacttttatctcaaacataggacaccagtttattcagtttacatatttggagatatggtttttctgaaaattaaccaaagggggaatgaataaagaaaaagaaacatcaaggcaaggaaaggaagagagcccacatctaatagaggaaatgtcgttgcccttttagtacagaagacagagatctctcttccatgggtaatggctctcctgtgttagccatctacttgctgtccccagcattatgcagcgacatataactggactatgttcagaaaattaaaatgacatattcaaggtaaatatctaggaacatttcagcccttaggaagtagaagaaatacctcctgttacaatctccatattttctaatagataatgcaactcattctgctacacatcagctagttaactagcaacactttttccagtgctgaccagtgcaggagttctttgaaagaattacttgtttcaaagaggtcgaagtgcagagtacaatggtgattgccaggagttggaggcatggggcatggggagaggttggtcaaagggaggatagtctcagtcagataagatgagtgtgttctgaagatctatgtatgagacggtgctgtcaataataatgtattattgtatacttgaaattgttaagagacaaatgttctcaccacaagaaaaaccaataactatgtaggtgatggatgttaattactttgactgtggtaaccgtttcacagtgcgtgcatatatcaaaacttcccattgtgcgctgtaaatatacacaatctttatatctcgataaagctaggatgggagaaggaaacacttataaatcacagcacacttgaaggaaagaggaacagacacctatttcaacatgtaagatcacaacagaaagaagaatgtgagttccatgaaggcaggcatttgccttgttctcgtcatagtcccaggccctggcgcgtgttagatggtccctagtgatgaggtgagtataattaataatggagactaatacccagggtccttaactatatgcacaaagcaaacacactttatcctctatgtaattctatattaattagcactct

SEQ ID NO: 1881455 - DNA, 4001 bp, Homo sapiens; identical to SEQ ID NO: 316874

SEQ ID NO: 1881456 - DNA, 4001 bp, Homo sapiens
ctctattgtttgatagcacaatagggtggctatagttaataatttattgtatgtttaaaaatagctagaagatttggaatgtaaccaacaaaaagaaatgatagatgttttgatatcttaattacccagatttaatcattatgcattcattgtatgcttgtatcaaaataccacaagtaccccataatacgtacaactatgtaccaataaaaaagtattcaaaaataaaaagcttattaataaaagaaaaaaaaaaatcttctgaaaaaaagaattctacagagaaggatcccctaaagggtatgaagtccatccctctctcagtgttttacaaaggggcctgtcttagtccagtcaagccactataacaaaatgccaaacactaggtaatttacaacagaaaatcatttttcacagttctggaggctgggaaatccaagatcaaagcactggtggtgtctggcgagggcctactttctcacagattgtgccttcttgctgtgtcctcacatggtagggaaggcaaggcacctctctgggttctcttttataagggaactaataccactcatgagggttctgcccttatgatataatcacctcccaaagacctcacctcctaataccatcatcttgggggctaggtttcaacacataaattttaagagggaaacaaacattcagaccatagcagtgcccactggcatcttgggcaggataaagaggaattgttctatgcaatgcaaggcattaagcatacctggttcctggctactaactaccaacagagacctccagcttcacttgagacccactgcaaatgacatgagaactgcactgatcactactgaattgcacactggcagcaaaacaaaattcagtgtgatgtctttgcagatacgtggaactcagtgcgatgtctttgcagatacgtggaactcggtgcgatgtctttgcagatatgtggtcaaagaagttacctgccacattacaacattcctttttatttggctactgagcagccttaatccaatttgttgcccatctctagcagctgggcataacacagattaatggtcaagtccaggtcccactattttgtgataatgagcaactattttctctaattaattccttcatgtgaaaaactgggataatggtaattctaagtactgagagcttattatgtgctaagcgctattctatatgctttccattaattcatttaatcctcacaacaactccatgaggtaggcactatttctgttctcattttgaagaggaagaaaatgagacataggttaagaaacctgcccaaggtcaaacagctagtaaatagcagagccaggaggaccctggtaatggcaattaaactagttagtgcatagcaaatgttggtgcaggatctcatatgggtctggtacactgcacacaattaatacaggttagttattattaggtcgaaaccttagtattaatatctacttctgtgggttaatcttagttaaaacttgattttcttacctctgaggcaaataagcccaaacagttgttctctctgattcaacatcaaattatgactcaagttcctcctaacacttcaagaaggtttttcactctgttactgtaatttttgcaagtctggtctcataaggattggtcagttgttttctgtaaagggctagataatatgttaggcattgtaggccatccagtctctgtcatgtatccttccagttttaaagttttcaacccttttaaaatgtaaaaaccattttagcccatgggccatagtttgccaacccctgctctctgggattattaataagagtaccatataaaacatcaagagactttcacatggagtagatggaactatcagaatttgctaattgcctcattacaccgtcattgatccccacccaccacaataaagttgccagataatttcattaaagtggtaaatgactaaaacaatgaagaagcatctgaaagttttcaggggagggaaggttggtaggtgggtaggcaaatccagaaatgcctatgcagaagatttaagtcttctaaagcattggtaatgaaggggaaaaggaaactatcttagaaaaatcatagtgttttagaagcagcataagatatcattcatgcaacaaatctttagaaatatgtattgggtatctctatgttcaggcactctctcagtaatggaattataaaattttagagctcaaagtaaccttagaaatcatctgatccaatctcatttcatggatgagaattctgaggcctcaaagttagttaaaataatttggcaatttctgtgcaaaattaaatgtagtggggtttgtttttaactcctcaaatgtagcacttatgtagattattaaatgtttgttgaatggagcttattaatggaaagctcctattctctttaccacctttaaaccacctttttaatctggcaaaacaatacattttacttgctttaccaatttacttaaaatcctttcttttttttttttttttgctgtgtctcacaaacttttggtgtgcttaaatggcctaacaatcaccaatcactaaatgaaccagtctctgatccacctttagtgcctccttctccctgcaggctcctaccacctccactcactccccctacctctcctcagatactcttctctagttctgctgctgccactgtcactgctgtctcagctcctgtctttctgcttcagtccttcccacctcaatacctccagatttagaccatccacattttccttcttaagacccggctcaggtcttatcaccctcaagttctgaacattgaaacaaatcctacttggctactactaaagttccagtgttaggctagttcctcagccccaaatctaccttctttctcccaagtcttacttaccattatttactattatttgcctatttcctctgatgttcccttcaaactgttcttggctcttgcctaaatatgccccaatgtttgagcctttgctaaagcatccctctccatgagaaacaccttttcgtccatcccaaccttcaaaaacttcattcttccttaatgccatctgctccttgcccctgctttcttctccatttctgcagcacttggctctactttcttatgcaggaatcaaatctgaccttctattagattatctgagtatacgacctaatgcttctactaaaagcaagctatccattctgcaagtacaataagaaatagttttaagttaaaacaccaaatttattgcataatattgaactatatgcacacacatagaaaataaacatttcatataactgtatatatatttttaatcctgtatttataaagactgaaaaactaccaatttagcaattggaataagttttaaaaacaaaaagaaaaagcaaaaatctacaatccttcatcaagatttgatgctttatcacagttcataaatacttcattttatataaataagtcttttctctagttactaggaatttaaaattagacttacatggattctttaatcatgtagaattttcttactccatgatgaggaaggttgagcatgtcattatttttaaaatacatatatttgatttaaacacaatcccccctaaaatcccactgtaaacaaacatttcgaatgtgataaagtttcataataaagaacgtccttaaatcttagcaattagggaagaggaaaaaaaatctgagtaaaaattttgcaatttaaataaaaattgaaaaaaaggctgcatgcatccactagaaggagaggagaggaagggagcactgagtcaagtaacagagaatgggataaaataaagaagaaacgaaaggaaaatcagggaggacacagggtacgaaaaggagaaaataagggaagggaggaaggagaaaatggtagaggacataaggtgatagaaaaagggaaagtaaatttattatttctacttttcttggacaatatagagactcaaaa

SEQ ID NO: 1881457 - DNA, 4001 bp, Homo sapiens; identical to SEQ ID NO: 316882

SEQ ID NO: 1881458 - DNA, 4001 bp, Homo sapiens
tcatgggccagctccctggttgcactggtcagccaggaattaccagggcagccatggcaccaaggtttgatgggcttgccatctgagtttaagtggaaatgcagaatgtgcccataccagcctgggttacattgtcctcttacaggggcctcaagcccagcagcgaacttgggctcccgacttaggcagactgtctcggctggtatgtgacacagggcaaggcacttcattgcttcagagctccttccatgctgtgaaaggccctacaagacctggtcctaatccctctctctggcctgttctccctcacccctggcccaccctgctcactccactccagccacactggctgccttgctgttgttcctcaaccacagctggcttgtttccaccacagggcctttgcatatcctgttccccaagcccttcccatggctggctgcttcaccagtcaggccccagtttaaatgccacctctttggggaaggcttccctgattccccgactttggtgactcttctccccagttgctccattcaccatttccctgttttattggctttagagccactctcatctggtcttttcttgtttattcatttctttgtttattctctggctctcccatgcaagcagagcctcatctgtcatgggtactgctgatccatggtgccaggctcacggaaggcatttattaaacatttcgagactgaataaaaacactagctaacaccgacatgcatttaccatgagccaggcactgatccacaggcttttgtactcaaccctgacaacaaccctaagaggtagctatcattatatcccccattttattaagaaaaaaacaacagcacagagagatgcagtcacttgcccaaggtcacacagggccaggggctgggccaggattggaagcagacaggctgtctcctgggtctgaactctcaactactgcaccctaatcaaacaatccctctggtcaaatgtgagtgataataatagtacccacctcgtgggtgttgagggtgagcccaagttagcattcagcgtgggcatgtgaacaattatagtcaatattgaatggagacctatgatgcttttaggaaggtttctatttagggttaaaaacgcacaaatttctcctgaccagaaatgatctctgagtgcaaatatttcatgtcaatggaataacgcaaacgattaagcaacaccccataaaatggggcagacccagggaggaatatatatccaaactgactcatcccagtgagctcaccgcacatgaattacaaatgtgtccgggtgcattaagctcctctgctggcagaagggaggctgctgcctgccatgcgcctgtgctgagaatgggaggtccccagggagacaagaggccacccccttctctgtctcttccatcacaggcgtgagagcctcagcgcatgagccgattctgtgcagtgctcgacatacagatgagaacactgaggcacgagggacagcctgtgacctggtcaccgcactcaggaggacgtggttacctgcggtcctgagggcgctgactttttagaatgggcgagggcagctgtgtcgcagtgaccagaacgattactgcctttaaaaagtcgtgaaaatgatcgtgaactgtaccccacaacgagcgcgcgtctgccccccaagacggtggagacgcccccagcttacgccgccagcccgcggggcaggaggggtgcgagcgactctggccaggccccagggacggggaccgggtcgcgccgacctgaccggcgggagcccaggcactcacgtggcgggagcgccgggggcttcagcacggagacacatcccgtctgcccctggactcccgcgagccccgcgggcctctccgctcgccccgccgcccacctgccaggggaaggagcgcagtgagcgcgccgccaggaagcggcgctcgaaactctgcagcaagagttctgtccccgcgttctcctagggcgccatggcgtgggcggggccgcagcgttgccgggagaccgggcggaagccgggcctggactgaagagggggcgggcccagggtagtgcgcaggggcagagagggggcggggcccgggggcagggtcaggaggagagtggtggtggcgtttctaaggtggggccaggatgagcgtcatgagggcgaggcctggggagggccaggataagcgttgttggggcaggtcctggggagagttcaggttggcgggtcctggggcggggtcgggacagggtgatcctggaagcggggcttcggaagcgtccaggttggcgggtcctggaggcggggccttgcgtgggggcaggataagagtcctggaggcgggcgttagggtgggggtaaacgatgattgggttcaggaggtgagactcggagcagagcccaggagacaggtcttagggcggggctaaggtcagaccctgagaagggctcaggaggcggggccagggtggggcgttgatatgtcgtagcacgtggccaggcggtgctcggactctgggaggcggagcttaggacgggccgacgtggggaggggcccagggtccgggaggcagggccgagtctgggctgcgggctgcactcaggaggcgggccctgggaggcggagcttagggaggggccggtgtcgggagggaccaagggactgggaggagggtcggggctgggctcaggggccgagagggagctgggcttggggaggggccgagacagatcgaggggtccggggtgtgagaaacggggaggggtttgaggaggggattggagtgtggctcaagttcgggaggctttacctgcggagggtttgaggcaggtccaggagcgagcccacggtctgctgacacggggccaggggcgggccccaggattcggagcttcgggcggggccgagtccgggtttggggcccgggaggcggggccggttagggcaagggtccccgagatcatcgggtcaggccttgggccaacgtaggcactctcgcagttcctccgccttcaggaaggtctttttggcaggggccttacgggtgcgcgcttcggtcctggaggcgttatcctagcctcctctccatcagcgccacccgtctggggcccgataggagggagatttccctctgtcccccagcctttggactgtcaccaaacaagccattcgttcaccaaatacttattaagcgcctaccatgtgtctggcaagggagatgtaacagtgagaaaaactaggtgtggtccaggccctccaggggctcaggggctcgtggaagaagtagacattgaagtacttatcacacaaatgagtataaaagtacaatagcgatatctgccacgaaggcgagcagacagagctagcggggcttgcaggaggagttttgatcttgcagggataggaaggaggacttagttcctgcggggtgggcttgggggtggtggtgatagagacgtggggacagagtggaaaacaacaaaaatataattattttagttcaaagttattgtgtcttgagttgaaaggcagggcagttagcaacacagttcagatttcagtactgcccctgaaatctgaactgtgttcaaagtctaaaacgtttaccttagcaaatccctcataaaactccatttggaagagtcccgagagcgaatttgttaagtatacttgcaaaaggtagatgaggagacagataaaatcttattacctctttcagatgagaggcacttgagccctgctcagctatgagaataagagaggggaattaattctaattgaatacacttgttctcttatagctgttgttccacaccagaaccaaatgaacgcaagatctgacaaagaaaaaaagaggttcatcttttattcccccaaaccctttcatttaaatcaagagggtgggatgtggttattgctgtgtttttaggcagaatcaacggtttctgggtctgagatgttgcatacaccctctcagtccctgtat

SEQ ID NO: 1881459 - DNA, 4001 bp, Homo sapiens
tggttagacaataaatatatgaagggttcaaagaaacggacaatagcaaagaagagatgaaaatttacaagaaatagagaaagaaatgagaacaaaagaaggcaatctaaatgaaaagtagaatgaaacaaaaaggcaatttgaagctaatagaatagatttttggaaacaaggggtgttaatttaaaaacgaagaggaggaggagaaaagagacaaccctcttcccagttctgataatatattaagcaaaacacttcttttcagggtcaagggtttctttccctcacctgtagtagagaacaaattgctacgctcaagtcatttttttttttttggatgttgaaatgactggtgtgtaatattttttaaagccttcatttttggtcagcgtaagtttcctttaattatttttccatttctagttgaatttcattttgaggcttaccatatcaaagtgagtataaagttctacaatttagtcattgtggatttcatgtcatttatgatgaaaatggaaatgtgtagtttacttgagaaaattgtcttcttctgtaacatctgactcttcatcctcattatcatctgcttgctgatcctttcttagttggtagtggatacctgtcctgttccagatacacacttagctgacatgatctctggtgaggtgactttgaatttgctcttaccatatctaaacgagatgaataatctggtgcatacagggaatttaggaaaacatgtaaatctaaatcttcatgcttatcaatcttttgtatattctggtaggcagctgtgtagacctctaaagctttgctgtgaaataacattttgattgtgataaatttggaaaatatagtctttatagcctttattttctgcctttcaaagttgtcaatagtttcctccagatgatgacttgttcgggttgcatccattgcagctctttgtaattctgtgtctgcctttggtccaaaggaagaaggaccaagcaattggcgcagccccaaacccctgctccagggactcccttcaggaatgagcccctcaggctctcaaagagccactcctcatgtggtttctggctgagctgggcagtaacaaccttaaaaaaacatttttttttttttgagacagagtcttgcactgtcagccaggctggagtgtaatggcgtgatcttggctcactgcaacctccaccactggattcacaccattctcctgcctcagcctcctgattagctgggattacaggcgcccaccaccacgcctggctaatttttttttttttttttttttgtatttttagtagagatgggatttcactatgttggccagactggtctcgaacttctgacctcgtgatctgcccgcctcagcctcccaaagtgctgggattacaggcgtgagccaccatgcctggcctaaaaaacgttttttttaaaggtcgaaattcaaaggatacaataacatgtcgatcagatgaggtgggtttcgctgacctgttccttctacctgagttaattgcttagcttctcgattccttgctgtgaatgttgctttggggtcatcccgtttcatttttacaatggttacataagctttccagggttcaactactttggcttcaagtctttcaacctctgcttgtcaataatcctgaagtttggcaaactcatcagcaaagttcatcaggcccagccttagatgtggggcctctgtagcggcatatgagttgatttcattcatcctcggtccactttgtctcgcagtctggcagttttccgcacataggcagcaaagacttggcacagttctcccaaatgcttctccatatttgagacagctgcttgcagttgcttggtttgagcgttccggttttccagtgtgcatctcaacatcttgcctggcgcacaaccaggggacccaggggagccaaagccggggactctaaggtgcctgggtgcgcgctggggtgcgagccgccctcacatcatgattctgtggttctgtgatgactgatgacctctttgtgaagtcagagagctgtcggccaggcaacatctctaagtggggatggaggcagccatctgctggttgtaattttggggcaaaagaacagatagctacactgtccccaaaatatcacacgcatggaaggatgttggaaattaatgttggtaaaaagaaagtatatgaaaatgtctttataaattataacatgctatataagtggcattacagtgatcaaaggtaaagcaacacatattataaggataagataaaatttgattacataagcaccttagcaggccttaggacataagaggcttcatccatttcttcctccttcctgagtgcctgcaggagatgaatgagacacagtttccgctcccacagagcttgcaatcttttaggggcaaccgggtacttacgcatgacgccaggcagacagtgatgagtgccatgagagcaacggctgcctcctatagggacagaaaacactttctctctactctctgagttttcataattgactccaggacagtaggcagatgaacaggagaaaaaaacatgcacatttattacacggatgggagcagcacgagaaacaaaagtgagtacccaaaacccagtgaaattgacaagcttatctacttcttcataaagaagaggggatcgggcatgtaggctgcttaggggagaataagtgctttttggggaagacgaacaggcgatagcctatggcgatgtctgtgagtggcccggacccccagtctcttctcctatgatacagtgaatcttgtctctggaggagaaactgagttcctttttagatctatctttaaggagacaaggaaagttcagggacagcccctccctgtgcttaggggagaaagaggagcgagacacaagggcaagagaaggtcagagagatcttagtgctgaggccattgctgaagccttccaatctcctccagttcaaagtactctgcaggccagagcgccatatgttcaggtagctttttctgagccccagcaatggtcggctgtgacatccaggaaggctctgaagaggacgtggcattcacctggctcttgaaggacagggaatacttgaaaagaaaaagatagacaaaggactcagacaaaagaaatagttctctttctctcacgtaacacttggataactttgccagtcatccatccctgccttgagggaattgaacagagagcaggccaattcggaagaagagatgaaagtctgttgtggagagccccttaagggtccttgaacatgtaggaccagccagaggataacggggtgtgcaggtgtccatctaagcaccacagcttagttgggagcaatcttggaattccaagcctcagatccccacagccctttcttctcatcccgcctctggcaatgcctaaacaggaaacaatccaggggaggcaccggcccagcccctcccacccagggacaggcgagagctggtgtgtcagcctgtatctccacactggtgcccctgctcagaggaattgatttattcatgtaaaactatctccatagcccaaagcaagctcatttatttatcaataatttgaaaaggaaagtagaaatctttcatgggactacttcagaatatttcataatgttacctcccaaaaactggggcttatttgcctggtgagtaacaaacgactctccaggagaactcagattttgatcaataggcattgtgttacttggcacaagtaagacacacacgggaagtgttctccaaagccgtatcttcccaagggaaagtgacaggagggtttgatggagtgatagagaagggagaggtgcatcatggcatgtgtatgggggggggggtcccagtggcccagaccccccctctacatgccatgatgggtcacaggttatgataataaagctatagctcctctaggggaggagggctttagcatggcatgaagaaacttcactggggttcat

SEQ ID NO: 1881460 - DNA, 4001 bp, Homo sapiens; identical to SEQ ID NO: 316895

SEQ ID NO: 1881461 - DNA, 4001 bp, Homo sapiens
tgctgacattttaagccttctgatcttggttcaaagatgtttatcctatacctagtaaaaagttattccaaataaaggtgggaacttcatttttttctaatatgtaggagagaatgtcttggccttggaaatgagcatccctggacatggtttcctggtctttctgaagcaggccctcttcacccacaggtcttggcatcgctccctgtgtgccatctggccagggaccaacttcccaaatctgccttagcaactagctctgcccgtgctcaggaggctgtttccaacaaccccttcctgagattacagtgacctctcagagctcataattttatgttctctgaaaattttaggctttattgagggcaaggacaattttcaaatacactccctccccacctaattacccaccacaaagtctggcatataaataaaaggagtacagaaaatatctttattgaatgaattgtctaattgccacccagtatcctggggttggaaattgggcagcagaatctcagtgccagtggcagcctccctatcttggtgggacacaccctgcgtctgctccttttgctaggcctccacagaggtatctagtgtgtgtttctattccgtgcagtccacatcaaagtcacgctgcagcacaatcagtctcttactcaaaattgattttcaagtttgagctttaatctaatccttgtctccaaaacatttcttttggcttcatctcccagctccctaaacttttttttttgtttttgttttctttgtgtgtgtgtgtgtgtgtgtgtgtgtgtgtgtgtattttaaaccttttattggacccgtggtccaattgaggaaataggaaaaacctgatactgaaggactttggaaataaaacaggaaacatgaagggtgagaaatttattcagatttcttcataattccccccaaaagctccaaccacgttgccagtccttgggtgctgcagttggtcggggagaggggctgtgtggaggtcaccttctggtagacggagacccgcttttcagactctgtggcgcagcaggcgggccaggaacatttgggccactattgctcttagccctgccgcgcctgactttctctcctctactttccttccgaccgtagggacaagtgtggggatccgctttgggctccaaggccctgcccgcactggcagcaccaagcgggtgtagaatgactggaaggagcagggaaggaagatgggtgtcaactgtcccggccagtggctgcgtgcatgtgtgtgtgaacagggaaaaggccaccctctcccatgtttctcccgtctcctcggttctcctcggagacccgcagggctgcccgaggtagctccgagttgccctgggtcgctggggcttggtccgcatcctcctccgctagtccgctcccgcgttccacagcgccccgccgctcggtgtgcacgcctgggtgggacacagtaacagcccctaagccgccaacgcaaaagcaaaaacaaccgtacaccgcatcgcagtcgtagctcttctccgcaaggtaagttgtttattcgtcgccgttttggcgatcctccctggacagctgcggcagcgacggcagctgcgccgcgggcgccgagctcccagcctcttccttcctccgccctctcagggctgcctctcacccccaccctcttccctcctatccccgccttctctcttcttgccctcttgtgggccacgcacacacccggagacaccctctgcacttggctactcacactgcggcttaacccagccgacaaggcacgcttgccaaagaggcgcgggtgtgtgtgtgcggggtccgcgttcggaggccaaaggagggtggcgtggtagagcccttctcctcctggccgcgacgccttgcccactctcctgccctaatctcggcctgccagcaaaagtgacacctgagcagggactggtccgtagaggcggcaggcccgctggtccggcagctggaagaaaacagagcaaggggcggggacaatgaggaggagcgggaggcgggacaagcggggaggccgccacctggcactgagtgatgcgccctctagccaatgaacgcgaggaactccggcgtcggggcgggaggtcgggggcgggctcagtggggaggaggaggctgcaggcgcgcaagaggcgggggccgggaggaggaaggggaggaggcggaggcgggcgcggtgttggcggcggcggcggcggcggaggggggtaggttgtgcccgggactgtgtctgccgagctcggcggctgtgccttggtgagtggaggagcggcgcggggaggcagaggcgagcgcgggcgatcgcggcggcgggacgtctccggcggccgcggcaccagcggcggcgctctgtgtggagaagcaggggcagcggcagcagcaacagcggcagcggcagcagcagcggcagcagcggcggccgcctctccgccgccggggacgccaaggtgcggctggtggcactgacatcggcggccctgcctctcctccctcgcccccggccttccccatgtgatcggtcttaatcctggccgtgtgtgcgcgcgtggggctccattccgcggtgctgggtctccgtgccggggtgggtgctcgtgtgtgcgcttctcctccccatcccccttcccccaagaataaaagaagaaccgggaggcgtgctcagaaaataaataaataaccaccacacacgcgcagcccggagcgagtcggcggggctggcggcagcggcggaggaggagtgaaggcggcggcggcggaggagggacgcgcggaaaaggcagcaactttaaagccagctcagagcctagacctccagccgagcggtttgcagcgcggcggcggcggcggcggcggcggcgttgagtgtctggcccgccggtccggtcggggtgtgcagtcggacggacgagcagcgcgtcgctgtcctccggcagctggagatgtccgagcccaaggcaattgatcccaagttgtcgacgaccgacagggtggtgaaaggtaagcggagcgccgcggtggcctgggtgcaccgtgtgccgcaggcgccagggcagcttgcctcgcctcgcctttcctcccctcccccgccccaggttctcctctgtccgctccagccgcggaccttctaggatattgtgcaacccgcgaaccccgcgaaccccccgcccccgcggcgcccttcccccacgcgtcccacccagcctcacttggggcatttttattgacgggggcgtcagttggcaaatggctgagccgcggggaggtggcggcgggggtggcggtggtgggagggggcgcccggggggtggttgctggtagggtgtagctgctgtgacagaaataggaagtgggtggctctgctcacaggcttgcatgggatcgggtttatggttttcttctgcagagggaggggtgattgatggctttttaaaaattaatacggcatttttatgtggccgtggctttccaccgactgcctcacttgggcagggttgtcttggagctccattgcagcaattccctccgcgcccccctccccctccccctccccctggaagggcctgcacaggactcgcgagagagcgggagagcgtggggggagcccggcgcttccttccgcgcggggcgggggcgggggcggtcgctggctggagggtggccgcggggggcgcgggaggcggggaacgacctgagagcaccagccgttgccgccccgggatttcccccgcacgccccggggagagacacgaaaaccacttctccagcctctcttgccatccccggctgtcccccgccgacctgtcattgctcttaaagggttctccactcgtgcacacctcccaagtgataacctcattccgcctgcttcctccgtgccctggcatcctttttgtaacgggctgttggattcctattattgcctcctcttcgccgcctacgggatgataaactcctggcaa

SEQ ID NO: 1881462 - DNA, 4001 bp, Homo sapiens
ctttagagcacaactgttttgaatttgctgaaatccaatttatttattcttccttttgttgctcatgctttggtgtcaaggctaagaagctgttgcctccatgaggtcctggagacacggccctctgcttcttctaagagcttgatcattctagtgcttgcctttagttctttgtttttgagggaacagaggccatttagcttggagaaggagggaggggtatggtagctactggcagactcagaggggctgtcctggcatagtgtccagagggcactgggaccctgaggacagctggagccagtgtgtgtgtgggtgggtgggtgggtggggggggggggcggtggtcagctctaagaatctggggatgaaacacgctgggcagggaggggtcctttggagctctcgcctctcagaagcaggacccaaaccaactccccagctcccccagcattccccctccagcttgaggcagggctggtgtggggtgggagtggggaaggagccctggtgagtcagatggagaacaaagggcccaccttggtgggaggagggagagaggaggccgaggagggtgaactatgcagacaggtggcctgcgaggggtgctgtgctgccctcgggctctgggcgaggcctctatcccaccgcaggaaaaccctccttgcagggagctcatcttccgcctttcaaaacttcagggcgctcctcaggcatcgcacagggtaacggcttggaccagcagcagcactggctgttcacaagcatcttgtggtttttcagagccctgtcctgccgcttggggcagcacttcctcccgccgggccctctcccttcctctctccagacgcctagtcctcacatgggcaccttccctttcctcaccctccagggtcgcccaaatcccatagcccttatcacgtgctgtggatgccaacacgcagccaagccactgtttctggggagcaaccaggggatcgggcagcccaggtaaaggctgcggtcccagagctgtgggaagggaggggacaggacaagaaggaaaggaaggaaaagcgtgcggaacctgcagtgcaattgttgggggaagccggtgagaagtcaggcttggtgagggcagatacctgtttctgcctccacaggacgctgctctcagaaggcaaagagctcttgggctgggcatagtggcttacgccggtaaccccaccactttgggaagccaaggcaggtggattacttgaggtcaagagctcgagaccagcctggccaacatggtgaaacctcttctctactaaaaatacaaaaattagccgggtgtggtggcacatgcctgtaatcccagccacttgggaagctgaggcacgagaatcgctgaaacccgggaggtggaggttgcagtgagctgagattgcaccaccgcactccagcctgggcgacagtgagactccgtctcaaaaacaaaaacaaaaattaaaaataaaaaggcgaagagctcttggtggatggaaggacagcttccagtattacccaggtctcaggtaagcactctcttgactctctgggactcagtttccctgtctcctgctgtgaggtgacagttgctgtggttgatccatccaacctcaccctgagcaattttaggggctgggccctgagccctgtccagggccgcagaggcaggggcgctgtgatccaggggcgtctctgcagcggcggcgagacggtcgtgacagtccaacctgtcaatctcccagatgggggcagtgaggcccagagagaggagaggactaaaccgtcagcgggactgtgagttcccggaggcagggctgagtcttttatttttcttttcatgtctgtatccccagcacccagcaaatggcggggcacttacgaggtcttcggaagctgcctggctgcctcgggtgcagtgttttgtgatagaatcaagagttggaacctggacctctgcttcttggcccgctttccactgcgccgggctccgagttaatggcggagagggcagggaggtcctgggccccgcccaccaggcttccaatcaccagtgccccggccccgccctgccccgcccttgccccgaaccccgcccttccttggctccgccccttccccgccctcgtcgcggagccaggttctaccccgggacatctcgctggactcagcctcccacaggattcaggagtgcggggatgctctttgtgctgagaactcgctggtcaggctggtcaggctggtcaggctgcttggcctcttactccatctgtagagtgggctcaggcctgatggtgatcgtgtcttgttttgtcacgctgggattcgtgtctctggtgacattttcctgctgtgtgtagcacttggccacgcagatgactggacagctgccaggagcactggccgtgtgcaccaaactcagcttgaggaagtcctcgggagcaaagtgcaagtggaaaacgctgtgagggaaaagctgtgggcggggagtcaggggcccagggcacgggtccagtcctgtccctgactggctagtccacaaaagcctgtcccccggcgtcagttttctgtgcctggattacatggcagttgagtcctaaacactgagggacagacgctgcctctagttcccgcatctggctcagtccttacagaggagctgtctggaggactggcggggctctcggcttctgttctcccaagctcctccaccctgcctgtgggctctgccaggagcaagcgcctgacgaccctctcctgatgttcgcttccactggggaggtccccctcctcctactcagaggcagagtttgtagatgaggtgggtcgacaggggcctaccatcttccctctgccccacgatgacagacacctgcccaggctgtggaggcccatggtcagtttgtccagcgctggagctcatgttaggcatctcactggcctgcagacagaagccatgttctccaaaatccctttccttagcaataagggggtatcttggtttcccatttgccaagtcctgtgtgtggtttctcccctgagttggaacacagcagaggtgctgttggctggccactccatgcgtccggtcaggtggttcctctcaccatcctgggtggctccctgctgccaataggatgaagctcacatctctaggatagctggccccatgcacccctgcctgcaccccagcctcaaccttctgcctgcaccccagccctcagccacattgagctcctgcagaccctctgctttgctgcactggcctttgaagattctgctgacttacctggaatgttctttcctcccctcctgaacaccccaaccgaagctcattgcctagctaatagctatcgtttgactcaggtcccaacctggttgtcacctcccccaggaaggattcctggattgcccaagctaatttaggcatcgcctctgcctttctccatcggggtcctggccacagtgggaggtctttgcttcttgggctgaggacaagggcctgtcagggctgttgggcagaactgtgacccagagctagcaggtgccccgggaggtctgagggaactgtttttctcctttcctcccctgtcactgcccctgcctgcccctcccttccttgttgtcttcattcacctcctatactctttttttttgagacaaggtcttactctgtctcccaggctggagcacagtggcgcagtcttggctcactgcaacctctgcctcccgggttcaagtgattctcctgcctcagcctcccgagtagctgggattacaggcacataccgccaggccccgctaatttttgtatttttagtagagatggggtttcaccatattggccaggctagtatccaactcctgacctcaaatgatctgcctgcctcggcctcccaaagtgttgggattacaggcatgagccaccgcgcccggccaccctcctatactcttgattcccgacacactggggttagtgaccgagctgcaga

SEQ ID NO: 1881463 - DNA, 4001 bp, Homo sapiens
aatcatctgctacactgagcaccattacatttcatggtggacattctaaggtgtgacactgtgtactctgctgtcaggaggctttccggggagaagggtcttgccaaggatttcttgcactcccagccacctgactggtttagtctgaaatttcagtattccagggtagtatgagaaaggccctatctggtaacaaagaaagcataagaaagatggctaagggaacaaagggacaaggcttttattttgttctttacccacagattgccttcaaaataaagataaagcgtctaagcctggcagtgcaggtctctttaagctggctccatacccacccacctcatcctgcacctgtcactgcgtgggaccctgtgctccaggcaggggcacctcactgccccctgagctcattttacccctcctggctctgcagcatttctgaccatttctgcccaggccgagactcactgctgcccagagcaatctcccttctctccttctggaggggaggggttgtatgttacccgcctggttttatccacagaggttagcagagactgatacagacaaaccctttttctttctaattttagattcaagagcacatgtgcaggtttgttaaatttgcctgacgctgaggtttgagtttctattgatcccctcacctgaatagggaacacagtacccaatacacagtttttcaaccattactccccttccttcctccccctattttagaatccccagtatgtagacaaattgtttacttttatagctgtaattaaccttattatagctcagcctcaaccctttagagaggaggaaactaaagcccatgagacttgcttaaagatactaagtgaacatatttattttttaaagtgttaaagtgattaaacaatgtagacgtgaatgaaataaaaagcgtaagttccccatcttcattcccactccatagagctgatcagtatttttacttgcagacattagtggagccgtagagaaagaaaccttttctccaaaagaaggcattactttacacactccgttctgcaacttgttttgttcacttgctatttcacgtcagcccatgcagatgacttaaaacaaattcaaatggagaaaagccttaggcatgtttttctctgcactaaagaggccctgcaggtggctgtggccaacttatgcagtggcttcgagtgaacgaacgtaattagtaattaagcaaagcgggcatccaggacattcagtttcatcttcctggcactttagtgtttaggaagggcctggcctctcggggagcgacactcctcgcccggccactttgtaagaagcatcgagcgtggaaaaggggctggggtcagcactggggccctctgccgggaagagagactggcggccagcacacgcgtctccccaggctgaaatggggcaccctctcgcggcccttccctcccttcccgggctgggtggcaggtcttggctcttctgcgagtaccccgcggctgcggtctcccggcacccgctgagcagcctcgcccgccttcctctcccacccgcccctgcgtgctctccggggctccggcttcctcggtctggtgcctggtgcgtattttggaaaatacctggctcataaccacctcattgagctcccagtgtcccagtgggccagcggacacacacgggtagctgacttccctaacgtgtccccaaagcctccctggattacagcgcccgctgctccatgtgaccccgcgggagccaggacgcgccccgcctcccggggctgcaagttgcgcagggagcgagcgatgcgcagcagagctgggctccgagccggatgcgccttcctttcctctccagagcaggctgcccgcccgcggaatcccgcacgtagagcaacctcgcagcaccctcagaacagccccgctggggcgcgccgggctgccgcggtgacctttccgacgcccctgaccccgcatccggaggcggccggaagtgtcgccggcctcctcccggcgcagcctccgggcctccagtgcaatcactacgccctggggcccggaaaccgttttccggtctttcgctttcggctggggcgtggaggccgcggtgctgcgtaggccgggccgggcgcaggaacagccccgtggcgccctctctggccgccgcccgggcgggaaacgtcgttccggggaccgggcgaccccgcagcggggagcgcgccaggtccgcgcggggaagtgggcggtgtgcggccggcaccgcctcgcaccacgcccccgcgggcccgcactttcccggagtgcaccccgcggccgccagccggggcgatggcggggctctggctggggctcgtgtggcagaagctgctgctgtggggcgcggcgagtgccctttccctggccggcgccagtctggtcctgagcctgctgcagagggtggcgagctacgcgcggaaatggcagcagatgcggcccatccccacggtggcccgcgcctacccactggtgggccacgcgctgctgatgaagccggacgggcgaggtaagggccggcgctcctcctggagcgcaacggggtccgcagccccgttcccaccctccgatcagccaggaacccgctgcttgtggcgctggccgcaggagagaggagcctgtcaccctgtggagaatgcactcccagttctagtcgttgccccttggcacccgccgacactgctagtgccccatcccaaagtgagcattttctttgtgtgtagcacaggatgcggtatttccaaacccctgccctcggtcttttcccacctcaccgctgctcagctctcaaagccctgccgtttcctcctgccttggcttgggaagccttaggaacagaagctccctgggagcacagagcggttttaaactggccaacaccttaacgcccagagccgccctcctctcgctgccactttggaaaataagagactagagattcactggacgcttcctcccggcatcacaagacttgactgctgcttcagttcccgcttgaccttcatactttagccctttaaaggatgttacataataacaattaagagacggcagggccttcaggcagacttctttggagggtgtcaaacgccttgtttattaaagagtgaattttttaattaaaatcatgttttaaaacagagatggacattttattgatggaaaaaaatcacgttaagttagaaagctctcaaaagtacctggtatttacaactccctgtcagggagggcgaactcgatctcagagttttattttcatcagggattacgttgaggtacccagaaatgagaagatttgcccaaaatggcatattttaaaattggcccagaccagaacccagtttcctctgggattatttgttagtaatcgttttacaggctgagcattaactaactccaaagcttgaaggactttttctcattttcacttgttttctctaataaaaataatgctgtaatttcaacttcacaagatgaggcctcatggaagagtgtttaccaaaatattaaaaatactttgacagaaaaaaatcaagcgaactctttgccaaccaaatatcatcatgactgatgtaacaagtaatccaacacagatatgaaaatcacactggtaaaaatcatctcagttaattctaaaagcagagctaaccaccccttttgtcctaaggctttatggtattaaaaaataaactgtacaaaaatatagattttcccctatcccctacccctggaaagtaatatactgaagtctcatcatactgttttggggattccagtaattaaaatctctagtgaataaagacctgtttcaaaacaacctgtgagctgactggactatttaaagtaattctccttgtagtcactttcagagtgaagacaatgacgaatactgtcttttacaaagggactttttattccaccaacaaattctggattttggcatcaggaaaaccactgttcaat

SEQ ID NO: 1881464 - DNA, 4001 bp, Homo sapiens
aaattctcacaatgataaatattcttttttttattcagggagactctggaggaccactagttcatcctaattctctaaatatttggtatatttggtaccttgttggagtagtgagctggggaaggaatgaatgtggtgcaatcaatagtccaggggtctacacgtgagtgaccacctactgcaactggattacctctgagacgggtgtttaacagaaaatcatctcctagcaactattgtagttactcctaagccttatttaacatgcattttaaattagtgtgtacaatggctgttttgaaagaactgccgtcctgagggaatatttgtggacttctaagccaaatcaacaagacaaaataagacacctcaagtttggtccagaaaagcctaagcaaagacagtgttcacatcaaaaacagactattataatatgaattatttttctatttaattaactcacatcatggctatctcatcacagcataaactcttggtttttgtcattcagactttctagaattgtgaaagtgtgtccttgtccatggcaaattagtcactgtgagtgactggaatcaatactttatgctgattgggttggaatatgctatatctgccttcatgtcatagcttttgtggaaggggtgtggttgtgacctaaatctagtctgaatgtaggcactgagttacactcttttatttgtatggggtcttggtcaattcttgcaatcattgtgaaagaattacaccatcagcaaaaccaggcaaaacagcacattttagacttactgtgaccaggcagagtagtagttctttactgttgttacaagtttctgtggaaattccttatttgtaacatattttgaaaaagtctctatgcaccctgaaaatgtgtaatgtattttaattaaaacaaatttaaaagcaaactgttcaatgacagttttctttttggtttttgtttgcttttttgagaattcgtgggtgggttttcctctctttctctttttaacctctttttctgtaaaaagaagggttgcttctacttggaccatagcttgggggaaggcacggggtggttaaaaagtatcttgagggccgggcccgctggctcacgtctgtaatcccagcactttgggaggccgaggcgggcggatcacttgaggtcaggagttcgggaccaggctggctgacatggtgaaaccccgtctctactaaaaatacaaaaattagccaggggtggcggctcgcgccagtaatctcagctactcggtaggctgaggcaggagaatcacttgaaccggggaggcggaggttgcagtgagctgagatcaccactgcacccaccccaggcagggagactctttcaaaaagaaagaaagaaaaaaaatgtatcttgaggttgaagggagcggctcgggtggacgctttcccaggtctgacagagggatgtggccggtgggcctcttgaaggcccctgggggccgcaggctccttgctgcgctggaggaagaggcctgcccagcgcgggttgggcccctccagcctgctgagtctggtcagcatgagtttccgttcgcggcctaggaagtggttctccaggaagccgcaggggtgagagtctgcatgctttgcgcccagggcgtgcagatccagcagggcctggttcaggttcgtctccagggccaacgcggctcgcagggcgcccaaactgctgtcctattcatcccaggacggcttctggatggcatcgcagagggctccgcgctggttttgcgtcttccacagactctgggcgccctgtcgcttctcctgggccagctctcagaagtggcccatgccctccagggtcacgtcgtcgcggtagaaatggaggatgagagagaggtaggtaagggaagcccgcagctgccggtggaccaggctgctgacggcggcttccacttcggtgcagtaattctggctgatgtgggaactcatggttctttggaaaggagctaaccagacacgcacacaaaagaaaggctgaattggtcttgggctgggggatgatgggaaggcccagaagatggttctggaagctgcggtgggggtaggggtgtggggagaaagttaagtaggggccagagactggaggcgggaaagaagggagttcaagaaggaggtaagcatggtatgtctgcaggtgggttttttgtgtgacacaaatgttaatttctggccatagtcccagtcccacagtccccagaagcgagcctagggccctgttttatgaaccacacagtctccaggcgttaagtgactacagtctgtaatattcacttttaaaaagttaaaatttttatcggtatttactgaacatttgatttagtgtcttgacaagtccttatacagtatttaaattttatttgagcttcaatgacctagattagatatatgagaaaatcttttacttactgaattttcttcttccagaaagtgtggatttcacactatctactgatagccattttgcatttaccaaagatctaaaataagtatatgtgtaataatagttgtcctaaaattttattaaatcacttttaaatggcatttttagttcctttatatcataaataaactcagtttcttaaaacattgaaataccaaaggccttttaaagtagtcttagcatattaaatttcagttattaatgatcttgatatttaatgcctttggtggtaattaacattacatattgtattcattatcatcatcataaatgaaacagcagtgcttaacattactgagttgttactatgtgtcaggcacaattccaatgactttgtctgtattatcccaattgatccttctgtctattccatgaagaatactattattatttcaactttatagatgaataaacagataccaagaggttaacaaccttgtccaagaatgcagaacaacacccactttacacaatcctgcctcttagtcatagaagtccaggataaggaagtgattttaaccagagatgttgacaattcccatttttgtgggagtttttgtttgttggtgttatgtgtttgtgtgtttgcttgcttgctttttctgaaaagagtgaaaactccttatagttttgggtaatacctaacactagtaagaagtccacgctggggaatgacatcagcattactttcacaaaggcatttatatttgtagggtattttatatttctcacttgagcctatgtaaaaatgccctctgaatcatggtctggcaaatttggctgtcattcaggtggatcctggatgcctattcatctagaaggggcagaggagattaaaggatctagtcttggggtgggggtaggagtagagattatggaaagtgatactagtgactgctaagattctaattttgtaattttatgtttttaagccttcagatgaagtttgaatactagtgtaattgttctatgtgaatccatgccagaactctatctgggagttggaatcttttttgctcccatctgtctctgagagccagagtttattaatgtggaatagaaaactccattttctttgttaaaaaatcatttttttttcaaataaatatttgtataccttaaagtgaaaatagcttgatggtatctgacaaatttttaagctacaacttaaactgaattctgtatgttactgaattaaagtttgttaatgacaaaactttgcaatgagaagtagcaatgcagatgcagctgttttatgtattaaaaattttatgaattatttattaaaatcaaatactgccaattagtattatgtctaccatacggtattcaaaacaaattgataattccatggatattttaaaatatttttaaacataccataaacaaaatgttacaaattaaagtatgctctacttaattatataaacttgtaaataattttttgttgttgttgttaaaaaagaactactaccacgttggttgttttcttcacaaaataaattaagaa

SEQ ID NO: 1881465 - DNA, 4001 bp, Homo sapiens; identical to SEQ ID NO: 316938

SEQ ID NO: 1881466 - DNA, 4001 bp, Homo sapiens; identical to SEQ ID NO: 316939

SEQ ID NO: 1881467 - DNA, 4001 bp, Homo sapiens
gccatgctactcactataaaaaagcccaagggcagactacagaagacactagggtcaccaccttctggagattgagttgtaacccaacccattgacttcatcacagctttcttccatgtagaataacgaatttcactttcctcagcattaatctgaggttcaaaccgctccatcgtgacggcggacaaatcctcaggttcaagactccatacgtcgactccttctgcagcccctgccgccatggcagcacccagtgcagtggtttcgggcatcaagggcttcactactggaatatacagaatgtctgcttgtagctgcataagaattttgttgctggtcattcctccatcaacctgcaaatgactgagtggaattccacagtctcgattcatggcatccaaaatctctcgagtttggaaacaaacagcttctaatgcagcaaaagcaatatggcatttattcgtgaattgagtgagtccacagattatccctcttgcgctgggctcccaataaggtgcatataaccccgaaaatgctgggacgaagtagcagccataagaagtacctacttctttagcaagtttttcaatttcttctgaggtctttataattccaagattgtctcttagccagcgaataacagcaccagctatagctacagaaccttccaaagcgtaatataccggtttgtctctgccaagtttgtaagccactgtggtgagaaggccatgatcagaaaatacacacttatggcctgtattacatagtaagaaacatcctgttccatacgtatttttggcttgtccaatctggaagcacatttgtcccaccagtgcagcagactggtcccctaaacacccagatattggcacaccttccaaggcccccgctttcattaggccatagatctcagaagaactccgaacatgtggaagaatttccattggaattccaaaaaattcacagagttgtttatcccattccaaagaatgaatgttgaaaagcatagtcctacttgcatttgttacatctgtacagtggacacctccattgacgcctcctgtcaaactccaaataagccatgaatcaatagtcccaaaaagagctcgtttttcttcaacggccttttgaacttttctcacattgtcgaggagccagcgaagtttcactgcactgaagtaagtgctaagtggaaggcctgtcttggacttgacaaagttattatttcctggaattcttttactaagactctcaacggtagactgtgttcttagatcaagccacaccacagcattgtagagaggctctccagttatcttgtcccagactacggtggtttccctctggttgctgacaccaatagcttttatgttggaaataccaatattgagctgtccaagtttctcacatgttttctctatacactcatagacagaatgtagaatttccttagggtcctgttccacccatccttctcttgggaactcttgttttatttccacttgatgatgactaagtagttcagctgttcttgaattgaaaaccaaaaagcgcgtggaactggtgccttggtccactgcccccaccaatggccccaaaactgccttctttgaggctgccatgaaaccagcttcaggtccgcccgcgtttgcggccggtttcctgggtgacggcggcgggagggggaggggagggtgacgagtccaaagagcgaggccgcgcgagtccgctgaactagcctcacttctttactggctggctagcaggctactgcgttctctctgcagctcattttctgtcttggcctccaggcatacatctgtctttaacactgagattatctttccctgcgtattttgtttctcctgccataaacgccttcagaatctatactgttggctcacgtgagactccttcatagctccctgtgactatcatcttccccccacaaacccattcatcaccttagactgcagttccagggtctgttggacctttctggtatttagaactctggggtccctaccttggttcggactagatgtgtgccttctcattctcttgtatttcttcataaatctgtgctctttggcccttgttcttccagccaactcttggccgttcagcctagacccagtagtcagtcatttcaaagctatcctctttatgtgcctggcattgcccacactgttgtgggtgatagataataggctcagtacaatttaacccttgcttataatctaactttatagtccagtaacaataaactcacaccctaattaagtatatttggaatatgcattattctctgtaagaccagtttttataacagtttcttctacagaaaatttcttcaatcatttgcccacctttctgtaatttaggctaggaatcactgcttggaataaacatcggttagaataagctcatgatttgaatgccaccctcttgaaagaaattgtgttgagtgagtggttttaataatcgtattgctagccttagccatgggatatgcatgccaaagaatagatgctgattattcaagggtctattgcagtgttaatttactgatacagaagattcttcctttggagaactgtgaaagcacttgatacacagcactttttagctgaagtcatgccaactcaaatgatgcttcttaaaagagttaattatttgtatattcatgcattcattatggtcctctttattccttagtaaactacatgcagtctctgctatgccttgttgacaggaattttttctagcttacatgagttaactgttttcaggtttcattaaaactgccttatgttaatagaacttctggagacatacatggtttttttctcctaaagattaatagtgttgaaagtcaaagaatcacagagtattaatgttataggaaatcttagcagttatctagtctaacactttcattttattaattaggaaaatgaagaccagagatatttctgttttcccaaaaacactttgtctgttagggatgagctgcttgtggatctcagagactattgttattcatacttttgccctcactattcaaatgggactttgcattgagtatagaggaattgtggagacccatcatggcattttaattttgttcaaaaaggtgcttggtgtttagaaatcaaatacaaagggtactttgtaccttattacaggatacaaaacagaacaaataacacttgagacttatattgttgattttattacacttatttgggatgagggtcctaacctgatgctctctctctctctctttttttttttttcattttttattgagatggagtctcgctctgtcacccaggctggagtgcagtggtgcgatctcggctcactgtgagcactgcctcccgggttcacgccattctcctgcctcagcctccctagtagctgggactacaggtgcctgccacctcgcctggctaattttttgtatttttagtagagataggggttcactgtgttagccaggatggtctcgatctcctgacctcgtgatccacccgcctcagcctcccaaagtgctaggattacaggcgtgagccaccgtgcccagccctgatgctctctcttgacctggtatggcaaattctagggactgtctttcatttcatgattagcttattttatttcctagagggaaacagaaaagttcaattgctttagagagtaatgagcatatatgttcattatagaaggaatggaatgtatattccacatacatatatggaaggattcatatgtatattatatattatgtgtgtgtagtttatgtgtttaacgtatatagcatattgatggcatagtctttactacttggaattgtgccctattgcagttatggtatttgtttagagataagcaactgatgattaaatgtcagtataactatgttgggctttattcagtggccagtggtgaactactgaaggtaaattactaatgtcacaagctatgatccataaaca

SEQ ID NO: 1881468 - DNA, 4001 bp, Homo sapiens; identical to SEQ ID NO: 316948

SEQ ID NO: 1881469 - DNA, 4001 bp, Homo sapiens; identical to SEQ ID NO: 316950

SEQ ID NO: 1881470 - DNA, 4001 bp, Homo sapiens
tggggccctcaaggagggagaagtcacgtggcctgcccaccccaggagcaggagagcctcttgggtgttctgtggggggccaagggggaaaggggaacacctacaggaggtaatttggaacaatggcgacaccagctagagattcaggagacaaatcctgccaagtagtgagcagaaagcatgggggatggaccctgctcaagacttgaagcccaagtccatgcaagggcactgggtcagcagtgggcagaaacaagcagatgcctcagacccacagccatgcacaggaggggtgtgtctggccgcccacagcagagcccgcggaacccctcccggagaagcacaccccacagctctgcgcaaagctccctgtgcactgagcacatatcccaggaggcagaggcccccgcagtgtctgcaccaatgaaccaacaggaaacccctgtgagcagcgtgcaggggcagtgctgtggctggtgaactctgggcggagtaacggtggtgatgcccacaggctcctcaagccaactgcccagggagcgcccaagtccctggcctgggcctgtcggcatgcactgggccaatacctggggtgcaggtcggcgagcagcgcgagcgccttcatggtgacggtgtccatgcgctggcagtgtctgcgtgccacccggtgcacctggagcgaggtgaggcagagcaccgccagcggcagcacgaagcccacggcatggagcgtggcggtgaaggctgcgaagcgcggacgctcaggctcgggcggcaggcgcagcgaacaggacgcgaaggcgctgctgtagccaagccacgagcagccaagtgcagcgcctgagaaggccagcgactgtccccaggcacagcccagcagcaggccggcatagcgcggtcgcaggcgtccggcgtagcgcagtgggaagcccactgccagccactggtctgcgctcagcgccgccacgctcagcgccgcgttggacgccaggaaggtgtccaggaagccaatgacttggcatgcgccgggcgccgacggtgtccgcccgcgcatcacaccgagcagcgtgaagggcatgtccagcgccgccagcagcaggtggcccagagacagattcaccaggaggacgcctgaggctcgagtgcggagctcagcgctgtaggcgcaacaaagcagcaccagtgcgttggatagcagcgccacggccagtaccatcaccaggagacccgccagcagcgcctcgccggggcccatggcgctagcggctcgccaggcaccctggggttctcatggctctgcttcgggcgcgagcctgggaaagtgaggcgatggagcagctgagcggcgcgcccacggcttctgggaggtgcagagccggctagcaaggtccagagcagcgcgaggaaagcggcggcaagtgcagggtccggggcacccggggggagggcgtagctctgcggagcaggagcagcccggggccgccctggaggcagcgcaaccgcggtgctgtccagggtgctgaatgcgctcaccgtcccggcaggactgtcctgaggctgaagcgaggcgcaggggcgcggggcgtaggggcgagggaggtctctttcctaacactgtatctttccttcttctctcctcgtggcgtggcaggatgggactctgcgcgcttctgttccgggccaggtcagtccctgccctggtcacacctccagccgagcctcccagccctggttcgcgcgcagctgacacgccagcaagagccactcagtggatcctaggcagcacagccctcgccacgcctctccctccaggcgctggcaccaaactggagcgacctggtggcttataggggcggtaggggcgggaatgaattggcaagaagctgtgcaggcggggcagagggagtgacggggcggggaagggggcgggggctgccctcaggacttcctcccatcccccagcctcagcccaggaactgtgactgcatcgacgtttgttgaagcaagaagagcgacaagaagtggaaacaaggttgagaaaggcatgggggaaggaaagagaagaagaagaaaaagtgaagaaaaagtgaagaggaagtggggggaagaagagggaagaggagagaaaagcaacagagggagagacaaagaagggggcaccttgggaggacccacccagaactgggtgccatacagaaatgcctgtccttcacctggctcctggagccccgcggtgcgaggcctctcccacctccgccatcctctgtggtggcttctgagccttctcacccagtgggaatcttctaatccattcgtggccacttggcaggacaaggatatggtgaagcctcctggaagctgcttcttccaggaagctttttggcattttctccccagtgacagccacaacatgacagaaatgaagggcagacgattgcccacccctccccacacccaccctcacctgcaggctctgccagccctttctgagggacaaagggtggctggtggtgtggaggctcaccctgtgggcctctctcgtgccggtgctgcaaagtggccaagggaaaagccacaggtgcacaactggcatgctggggcacccctggttctgtgccttgggcctcacattctcatctgtcacatggggatattcatagccccacttaaaccccttgggcctcacattctcatctgtcacatggggatattaatagccagcaatagcatctgcctctggtggttgctgttagggttaaattggccaacatgcacaaaatgctgaggacatcccagcaggcagtgaaggatcagaacacagtcaacctttattagggggtccgtcttatacctgggcaaaggaagtttcattcaagtgtctctgccaagtccccataactacaaaccaggaatgccgagattcatacctcagtccttctggctctaagtccaatgtccttgtcatccagagaggccatcacaccagctccaagccattgccatccatcaaatacagaggctttctctctccccatttctccctggcactcccacaaacctgctttcaaattttcaccaaattagaccttccctgaagctagagcagccacgtcaaagttttcctgacatgtccaggaagagtgggccactctgcagcttctgcagatcaagcaagtttgcaggtgaatagctgggacaaagtgattgtgatagtgggggcttgagagcaggggcctcccccaacccctccaaggcttctgagcgaccatgtgcagctctggggagcggtggagtcatcacgtggcttcacagggagactttggtctagccactcacagcagcctctgtcacctctcaactactccaaagggagacaattccacttgcaggggagcagagagcatctcttctgagacatgagcatggggaagctccaccagcctgtattatgaaaggcaggccatttgctcatctgcaaggatgtactggacaactgcatgaatgagaaaatgtgtgtggtgagatctctggactctggtgagggcaccttgataggtctagatctgttctgtttgctgctctccccaaagccccagtgcttctggcctcagatcttgccagcctggctgccccccttccctgggttgtagggggtggttttgaaccctgtggtcttatcagtataatatcgtttcatcttcttacactcaaatctcattcctgatgaaaaatttaaatcctctgtagggtgaaatgctggacctaatccttttatcttccaaaaagaaaaagtatatgaaaatattaaatattttcaccacttctttaaaaagtaaggcagtactcctaactatgcaatcctgcccattcttgctgagatacgcattgcaatgataaagttcaggattagttcccgaaggctcctcccctgcctagtgatagttcatggttccccattgcctatgaaattccttagcagcccctccaagtctacctacatc

SEQ ID NO: 1881471 - DNA, 4001 bp, Homo sapiens
gctgaggttttgtcagttctctttattgttttatctgtggtacctagaatggtgcctgatacagaaaggttctatataaatgtatgttaaatgaaggatttgaccaaggagtatcatcaaatttcctgttgcctgagccagtagctgacttctctgttgccccttgctttcaagcagctggttgagtaattgtattatacacattgggtggccaactgccattctgagacctaattttctagttctaaagaaactataaaattgatctgaagaaactactagagccaacaataattcaggaattcatcccaccatctgagcactaatttcttgactttcctctgaagataggtgctagacctttggcaaacaatggcagcaaatgacaggaaaagtcaagttaagacctattttgccttagcactgctatattcctatggtcacaagtgtttcatagtataatcacatcctcttgtttaagtggcataggcttaggattgttatttttctttagcatacacataaacaggggccaaaattgaactcaactgctgtatattggctacatcaaatattgcagtaagaatctggactttggggtttgaatggacaaatctatattataattttcctctgatattttacaaataaacttttccatcaaggagtctacacacactggttctacattttctttaccatcagatcctgttttgaacactaccatgccactgaagaaaactgttctctccaaggtcaatctgcactgacctgtatcagtcattaaatccaatgcctccttccaaattttccacagcagctttcaaaacctgtgacattctgggtctcctcccataactgactcccactttacaggcagtaaaatgtagaagacaatgcatggacaataaagttataccattctggatcaagcaaatctgttccagttttgaattctcactcaaccacctattggctacacaactttaaactagtgggttcacaaacccctaagctttactttcctaacctatataatggaagcaatcatatccaccaaatgttgtggttatgaaaactaaataataatattgtcttttggcacacggttagacattaaatgaatgtaagttttcatctttcttttgtatcctctatcacttccttgactattttgtcttctttcaacaaagtctctcctgttattttcatttattccattaactatcagtttttgaagggctcatgtaaatattcagctccacacttattgaaaatttcttaattacttacaaaatttgtaagtcactgatatgtgacttacctaatgtaattaccctaatgtaatgccccacggggtgggacaggaaggtgggtgtctgcggtggaagcaggatggtacccacgtggaggtgtcggccatgtcgaggatgctccctggtggcagggtggaggagatgagcatgttgccgatggtgatagtgatgcggaggcgggagggcaggggccccacctggaacaggctactgatgtcggtgtcaaaggggaggtagatccctcatgctctagcgcgtcgaccccattcacccacacgatggcataggagtgggcactgacaatcctcagtaccactcttgtgtgcaggtcctgggtccattgctccaggaaggtcacctcccgttcgtaccacatctggtctacaaaatgccgcagccgccagtcctggccaacgtcgttgaagctggagggaaccggtatgtccatggtggagcccgactctcgcagcagacgccgataccactactcctagaagccaaggcacagtttgtcgaagaagtcggcgcggaagctccagaggcggtccagcttcttccgctcccgcgacggcctctctcttgggtacagcatcccgccctgcagcgccagcgcgcagccccacaacaacggcccgagcgcctaccaggcgtccgccgccccccggaccatgctttccgctcctctgctgggccgccgtctgcgggcctatcagcagcgcgggaggagccctgcggactggtcgcgcgcgacgtgacgcgccagtcgcgcagagggaaagtatttttttaaaaccaagagatttgaactgacgaacaattacaaatacccaaagtgatgatttgtccccctgtgtttaaaagtcttggtgctagacaatcaaggatgtttccaacatgtacgtagaagactctgaccttctagcaccactgttcgggtgttaaacccggcctagtcctacgtgactgcctgcgcctttctgtattctagtctttcactcccagctgcagctggtagccggcagcgtttgacctgcagtgggcagctcacctttgttcctaacactgccatctcgcggatggggtctgcagccgccaatcagagcgtcaaggtgagcctggggagacctctacaggtgcctgtggtttcattgtaactacctaaactattcattctcttatcaagcacccacccagttccagtactgtccagttacaataaggagcccaatgataattttttttaaagattagttcctgctgtgaagaaactaaactcagcgtactcttgaaggagctccctctaacttatcttacgactattaagggtgagaaaaaagcactgtggcgtctgcagcatttagattggtaggagtattctgcaagacttgtgccattacttttatcaagttggctcccagggaaagaggtggctggggaggagggggagcgcaaaaaataggaggctgggggaaagccaatacccagagaaaagacctttctacaactggaaagcatactaagaaagcaaacctatccatctactgggattaaagggcatataaaatgaaaaaaaaaaaagttactccttgcaaagctaggatgaccagatggccccttgccacctcccagaagggaatctgaaagtcagctaatcaccagcctgtttgtgaggaagagccagtaagaactccgcctttgcacagcaaatctgtatcatctattcttctttttccctccactcaggatccctacacccagccagcatgggcatcaaggaaagcaggctggtaaacttcagggcagagatccgcttctgaaggcagctagtaatgtctcacccagctaagccttgctactaggcaacagcactgcctcactcaagaaattatcaatctgcatcaggccagatgcagtggctcacacctgtaatctcaacatttgggaggcggaggcaggcagatcatttgaggccaggagttcgagaccagcctggccaatatggtgaaaccctgtctctactaaaaatacagtaattagccaggtgtggtgcatgcctgtagtcccagctatccggaaggctgagccaggagaattgcttgaacctgggtggcagaggttgcagtgagcctagatcgcaccactgcactccaacctgggtgacagagcaagactctgtctcaaaagtcactagtgtgcatgagacacagaagctttgacaaaaattcaaacagccatggagaaataccgatggtctacagaagcagtgcttagtccttgctagaattctctagttttgaaacatgggaataagtagaactgccaatgtgtctgatgagtaactgtggtatttattgcaactgagctctagaaagaggctactgttgtctatgatctgtcctttccccaaccacccaggcatctctttgtccactccagtgatgtctgcagaccaccctaatgtcacctcaagaggggtgaaccaaccttccactggccagcataatagccttggagtttcatctcagatttcatagtgaattcggctttcagggcaggatttagtttgggatgaaaaagtgtttccattaagtattgtatttgaatcctgggttcttcaatgattgaggaagactaataaagaaaagtttacaaataatcacatgaactaaattaggacttcaaaag

SEQ ID NO: 1881472 - DNA, 4001 bp, Homo sapiens
tcttcttcctcccttcaattcccaaaactccctttgggtcttaaagcagccaaccaactaatttccctgaatttttatatgttcccagccccagtgcaatcttactttgtctacctgctcccaaggcctaaatgtgtttttataaacagacttttcaaaaacgtatcaaatgtcagagaattgaactaccagtatttacacattcggggtttgcctccgggtgaaaatgtaaacagaacccccaaccacactacctgcattctttccttgaagaaccaggtctttaaaaggctctccttgtgctaaaaaattgcagacccacgcaagttgggggtttagagcagtaggtcactattttgttccgagctcaactgcaagcccctggcgcttaccaacgagcctagtttcagttaatccctattctaggttcaatgctttaagacgcttgtctggggacgttcaaggatgttaacccctttcctagaaaaagaatgggccctgcaccgactctaatcctgggcttttaagtccctgtctcctaccgcccagccgcggcaaacctgaaatatatatatttctcaatcctgctgcccaagactctagggctagtggagggcagagcccgagcacagagtcaactgcaacaccgaagttgggcgccctccattcgcactgacctcgccttcctgccccaaccactttgtcggcggtgagcaaggaaaggactgtccttgtggagtccttcgggtggggatcgctttgtggcctgcggccggactctgcccgcctccaaagggcgatgctcaaggtggagtctttggtctcccttgggctaacctggcctgaccagcggcgagccccaggccgccctgtcccgcgctggcgccgcaggccctcgcctccctctaatttacagcccgcgggctcctgttgacaccgttttccacaccgaactccttcgggtggaatctgcatatacacatcagcctcccctctcggcttggggccaagcctggggtgatttcagctcctgccatttaccacccgccctcgccgcacgtgagccttctcaagaagctcatgccacacgggcgctgcggcccgggtgccccgcggcccggtgacttacaagtggagatccattttccgttataatgcgttcaagatcaccaaggccagcagtctcaacatccacgagccgtcctcccggcctgcctcttaaactggcgtttaatggttcccctccgataactaaacctgctttccacagatgcccgcttttatgagggaggcaggaatgcagagatatatttatatgtttgttcataaaaactggaaaataagctctgaacacgccgtaaaaaatattcagttacttaccaaacaggctagttaaaccaggggaacaccgataccagccacactacagattcggggaatcgaggtgcccgcacttcaaaatcgcccaaggtcttcgtagggactggtgtccctgaaggatgtggaaataacagcatttacaatcggcttgacatgttcgcccggaggactcagccgtcatctccaaagtttgccgcaataacgtgagccaccccaaacagctctaaccggggtaacttggtgggtaactcaatagccactgagaccggcgtttcgagcctgtaaacgggtcaaagaaacacccttctccagccgctcctcgtccctgctggggcaaagagcgccagctcccagccgcgcctttgtgggggcccccaccgcccgtcacgaggctcccggcgcccctgcataaaattgtaagaggctgcctgcgtatattttcttacctcgattacctacaaagcacttcgaaaagcaatacctgcgttttctttctttctttcttttcaaccagaaaagagagcagagtgatactgtacctggttagagattcttcaatatttgagacttggggggaaaatattttaatagtgaagcatctgttaaacacttgcattatcctctgactgataaaaaaagtttttttaaccctgccccccccccccgccaagttttaattatcttatggttatgaggaggtagccaatcctggaagaggacctcggcaattagcaacgtgaacatcaaaaagttttattgccgagagctcgaggcgccgcccctgccgccccgggattggcgtgaggagcctctgacgacatatattaacccgagcggccctaaagatgtagctgtacatggagatcttgctgggaaaatccgcttgctcccctcacgtcgtccagcccaggagaaccaccgccgtcaccccggagcttcctcggccaccgcgcagagccctccgagagcccgagccgcggtcttcgagctccaaggctcattcagggccccagatccttgccccgaaaggagaggatctgagaaaatggatgcactgagacctctctgaaaaccctccgagagagcgcgagaggagcgaggacacgttactcgcagctaaaatcacatttaaggaccaaaacaacaacaaccaaaaatttcattaaaacaataagcgcccaagaacccagatcgggctggtggggggaggggaagaggcgggaaggggagggtcgcacggaggtagctttgcagtgagcagtcgaccccgccgccccccggcacagctggaccggctcctccagccgcggctcagactcgcccctggattccgggttagcttcggtgccaggaccgcggcccgggcttggattcccgagactccgcgtaccagcctcgcgggagccccggcacctttgtatgagcacgagaggattctgcctccgcgcagcagcccgggaagcaggagccgaagcgcgggccgtggagcaaggcgggaaccggaggcggcggcggcggcggccaggggcgcacggtgccaggaccagctcgccgcgccccatggggagccggcggccgcagcgctgctgaggcgggcccggctggccaggcggggggacggggcccgggctgcagcagccccctctgcggctgccgggcgggcccgggcgcccgggggctggggggtggggggtgggggaggacgccgagcgctgaggcaggggcccgggccgagggcgcggcggggctgcgcgcacgctggggcgcgtggaggggcgcggagggcgaaatgagtctggtaggtggttttccccaccacccggtggtgcaccacgagggctacccgtttgccgccgccgccgccgcagctgccgccgccgccgccagccgctgcagccatgaggagaacccctacttccatggctggctcatcggccaccccgagatgtcgccccccgactacagcatggccctgtcctacagccccgagtatgccagcggcgccgccggcctggaccactcccattacgggggggtgccgccgggcgccgggcccccgggcctgggggggccgcgcccggtgaagcgccgaggcaccgccaaccgcaaggagcggcgcaggactcagagcatcaacagcgccttcgccgaactgcgcgagtgcatccccaacgtacccgccgacaccaaactctccaaaatcaagaccctgcgcctggccaccagctacatcgcctacctcatggacctgctggccaaggacgaccagaatggcgaggcggaggccttcaaggcagagatcaagaagaccgacgtgaaagaggagaagaggaagaaggagctggtcagtaccagggggcggcaggcggtggggctgagggggtcagggaactggtgctcccggcctctttccaattgggctgagaaatggcatctcgtgttctttggctgcgtcccgcttcaaggttgtttgcaccaggttgtgtaaggatggcttccggcataagcagagagttgaggggagggtgtcagcaggaggaggagaaggttagggatgctttgcgctggtgatcttacctccgggttatcgctgctcccctagtacttaggacggaccttga

SEQ ID NO: 1881473 - DNA, 4001 bp, Homo sapiens; identical to SEQ ID NO: 316980

SEQ ID NO: 1881474 - DNA, 4001 bp, Homo sapiens
gccttagtataagccataagaaaggcctgtttcaaaactactaacaggaatttatcagagtaggagctcaaactactgaaatacgattttagaaggacttttattttggaaaaagaatataaaactggaatttgggaagaaagggttagatagtggaaagcaccccagattggatccgagtccttattctcaaactacctaatgagatgaaattgtgcaagtgatttaaatttgatgagattcatctggagatctattaatgagtttaaagtcttaaagtgcttactgctttctgattaattttatattaaaagtcctcaaagcagaaagaatgtcagataaaaaaaagtatgtgagatccaaagtggacttacaatcacatgcatgaagaagtcatgtgtatacaacagcccctggggaaaatgttaaatatgtcatgggggctctacatttagctgaggactgggccaaacatcctagcagattcttttcagttattctgatgtgtcatctctttggggaaaaacctaacttcactaatatccaggctcaggaagtgaaaaagacagaagccttacctagccactgtgaccagaagtgattaatttaatcaactgcccacctcaaccatcaccaacttttgcaatcacttggcgaaatcaatgtccaacaagtgaagcaaacccaaatgtggtgaacattcctccattgccaaaatgggacaactgccttatctcctcatcaaagcccatcttctgggaaatcagcttctctgttaaatacccaagtgggctagaagcgcattttgtgggcaaccctatagaagctcgtcctgatgccaacttgcagggatccagtaaacctcaagtcaccgctcctgataacgtagacatctttttagacacactatttacacagactttgtctagctggggaaaaggttaatttacttgtatacacggggataagtagagcacagcgcttctggatgccctcagacttgcatctaattctttctccagatctaacgcctctgtttctacacccaggggaacctctccccagggactgcgcgcgcgtgcgtgcaggtgtgtgtgtgtgtgtgtgtgtgtgtgtgtttgtgtgtgttaaaacgaacactaattccgcgcccagcttctctctccgtccacctgcggcccaagaacttgtgttcccagatggtaccagcggggcccggcttattcccgaacacatgtggggacctgaaaggggcgtcggggactaacccgcccaaaccgtggcaaacactctgggaggccgacttgggcttggcctgtggcccgacacaccgccccactccgcgcacacgcgtctgtgccacttcagtggcttgcaggacctccggcgaggatgagtctccaaaccatctcagcctactcaacggcatctgggatgtccccctgcctctaagtcagaccccaagaaagatctttgaggacttgagcttcacgttgaaaatcagtgtggaaaatgggggtgtcagtgcggctgggggagacaaaggggcccaaaagctccctcccgtccgctccagcccacttagttcaccctcccacggggcgaggggcgggccggggggctgaggtggggatggccctggaaggggtccctcccttcccacctcctacggcccactcttacttactttctttcggagcctcagcttggccgcctttagcccaggcagtgcggaggggaagcggggaggagagaggagcctgcgggctgcagcagccgggcagtcccggaatctccggactgcgtccctgccccaagcccgccgggaacccgggccgtggacgcccccacccgggggccgcggcgaggcgggcgcgcggggttcagcaccctcgaggctggttccgaaggctcgcggccctccccctccgtccgccgccgtcgcggctagccgcccctccccgccgcagcagggaggccgccggggcccgggggacgcgctcgcgcgggggccgccccctccccttccctccaccctgggcgggggcgcgcgagaagcggtgacgtcaaggggcgcgctgtggcagcacctccccgcgcgctagttaaaaagaagaagaaaagagggaacgaaacatgagaggctgtgtgagaagctgcagccgccggcagaggagacctcagcatcatctagagcccagcgctggccctgcctccgcctgccccgccgccgccgtcgccgtttctgttcctgctactgtcccacctaaacaactcccgttacacggacaagtgaacatctgtggctgtcctctccttttcttcctcctcttccaactccttctcctcctcccacttcccagccgcagcagaaagcccccaacccaactgacactggcacaactgcaaacggtgtcatccgcacaactttatctcgctcctcgggctcccctaaggcattggacccatcgccgcgtcttttattttttgcaaagttgcatcgctgtacatatttttgtccccgccacctccctctgtctctggagtgccctacagccccgcaaactcctcctggagctgcgccctagtgcccctgctgggcagtggcgttcccccccatcctcccgcgcccagcccctgctgctctgggcagacgatgctgaagatgctctcctttaagctgctgctgctggccgtggctctgggcttctttgaaggagatgctaagtttggggaaagaaacgaagggagcggagcaaggaggagaaggtgcctgaatgggaaccccccgaagcgcctgaaaaggagagacaggaggatgatgtcccagctggagctgctgagtgggggagagatgctgtgcggtggcttctaccctcggctgtcctgctgcctgcggagtgacagcccggggctagggcgcctggagaataaggtaggcactcaccggcttcacggatgcgtacttggcatattggctgggtggggttccctgtggctctggcaaagccggtggttgtaagaaggtcaaaacttctttgggggagttctttccataacttttctatagcgctaacgtgattccgttgtgtgttcctctggggtaagcaagtagcatttcctcccccagagtccgcggtcgggatgctgtgcaaacttgcctatctctgaaaacagacgtttctgcggtacccgcaccctgggctgggtaaatattttaaaagaatcgcgatgaacagtgtgttttggatcgaatggggcattggctgcggtgaaactgtaaattaaggtggctgtggtttccggcttatttttctagggtaaaaagatttgtgctgttttctccacgtgctcggttagggagaggattgaatcgtaaaggatgttgaagcatggttggtttatgatccccagccccgtcagaggggggtgtcttgcattacattagttaaaccaacagaaaggaactcctggtcctccggttagggacctgaaaaaaactggcgaaagattttgctggggcgttatttatcacataaaactgagacgattctccgtcattttgtaacattataaattcagactttcagggtcagttggtgtcttggaagatctactctaagaatttgttttaagagtaatggcatttacgttatccttgtgttaataagtttaaatactaacatggtgtttgttgactgtaaaggcacgcttgtttttgagtttgcaatatcgttcttgccaggagatgcagtcatgggtggtatctactgtactccaaggaatcattgctggctcacatcattaacaatcactgcacgtgaaataaacaatcaggtgtctttgctccccctccctttccccattttaggtttaattaagaattcctctgttagaacactgccagttgtcaaggtctgagagactcttggaaaacttgtgcttcagtcttgctggcccaggcataataaaaaaaaaaaatacccaggctgaatctaatt

SEQ ID NO: 1881475 - DNA, 4001 bp, Homo sapiens; identical to SEQ ID NO: 316992

SEQ ID NO: 1881476 - DNA, 4001 bp, Homo sapiens
ggaggtgaggggtgctggggccatcttatgagtctgcccactgaggtaactaacaaccttgaggcctgacacagtggacaaaggcccttattaacagcagagaactgggaactttatttatttatttatttttgagacagagtctcactcttgtcacccaggctggagtgcaatggcatgatcttggctcactgcaacctccacctcccaggttcaagcaattctgcctcagcctccggaatagctgggactacaggcatgcaccactacacccggctaatttttgtatttttagtagagacagggtttcgccatgttggccaggctggtctcgaactcctgacctctggtgatctgcctgccttggcctcccaaagtgctgggattacaggcgtgagccaccgcacctcgctggaacttaatttttttagagacagtgtcgctctatcacccaagctggagtgcagtggtgcaatcctagctcacttgcagcctcaaattcctgggttcaggtgatcctcccacatcagcctcccaagaactgggaactaacagctgtttctctgctgtccttctcaagaaaagggaggctactgctaccccactggggacaatgctgggtttccctttaggacaggctctgagacaaggcggaggtgctgtttgtggccacagagcaggggactctgggttgcaggtgtggcctggctaaagtaggctttactgggctcctctctgcctgcatcaccccccggctgggcggttgtctctgaggccaaccttactccctgctgggcaggctggacagctgccctctccgtttgcccctctaccacccaaaaggcaggaggctctggagaccaggaccctgcccgccacggcctgtgtcccaggcgtgagggggtgccccacagacctctgctgagctgctgctgaatgacgccccttgggggtcctgccggaaggtcagagcaggggtgcactcccataaagaaacgcccccaggtcgggactcattcctgtgggcggcatcttgtggccatagctgcttctcgctgcactaatcacagtgcctctgtgggcagcaggcgctgaccacccaggcctgccccagaccctctcctcccttccggggcgctgcgctgggaccgatggggggcgccaggcctgtggacaccgccctgcaggggcctctccagctcactgggggtggggtgggggtcacacttggggtcctcaggtcgtgccgaccacgcgcattctctgcgctctgcgcaggagctcgcccaccctctccccgtgcagagagccccgcagctggctccccgcagggctgtccgggtgagtatggctctggccacgggccagtgtggcgggagggcaaaccccaaggccacctcggctcagagtccacggccggctgtcgccccgctccaggcgtcggcgggggatcctttccgcatgggcctgcgcccgcgctcggcgccccctccacggccccgccccgtccatggccccgtccttcatgggcgagcccctccatggccctgcccctccgcgccccacccctccctcgccccacctctcaccttcctgccccgcccccagcctccccacccctcaccggccagtcccctcccctatcccgctccgcccctcagccgccccgcccctcagccggcctgcctaatgtccccgtccccagcatcgccccgccccgcccccgtctcgccccgcccctcaggcggcctccctgctgtgccccgccccggcctcgccacgcccctacctcaccacgccccccgcatcgccacgccccccgcatcgccacgcctcccttaccatgcagtcccgccccgtcccttcctcgtcccgcctcgccgcgacacttcacacacagcttcgcctcaccccattacagtctcaccacgccccgtcccctctccgttgagccccgcgccttcgcccgggtggggcgctgcgctgtcagcggccttgctgtgtgaggcagaacctgcgggggcaggggcgggctggttccctggccagccattggcagagtccgcaggctagggctgtcaatcatgctggccggcgtggccccgcctccgccggcgcggccccgcctccgccggcgcagcgtctgggacgcaaggcgccgtgggggctgccgggacgggtccaagatggacggccgctcaggttctgcttttacctgcggcccagagccccattcattgccccggtgctgagcggcgccgcgagtcggcccgaggcctccggggactgccgtgccgggcgggagaccgccatggcgaccctggaaaagctgatgaaggccttcgagtccctcaagtccttccagcagcagcagcagcagcagcagcagcagcagcagcagcagcagcagcagcagcagcaacagccgccaccgccgccgccgccgccgccgcctcctcagcttcctcagccgccgccgcaggcacagccgctgctgcctcagccgcagccgcccccgccgccgcccccgccgccacccggcccggctgtggctgaggagccgctgcaccgaccgtgagtttgggcccgctgcagctccctgtcccggcgggtcccaggctacggcggggatggcggtaaccctgcagcctgcgggccggcgacacgaacccccggccccgcagagacagagtgacccagcaacccagagcccatgagggacacccgccccctcctggggcgaggccttcccccacttcagccccgctccctcacttgggtcttcccttgtcctctcgcgaggggaggcagagccttgttggggcctgtcctgaattcaccgaggggagtcacggcctcagccctctcgcccttcgcaggatgcgaagagttggggcgagaacttgtttctttttatttgcgagaaaccagggcgggggttcttttaactgcgttgtgaagagaacttggaggagccgagatttgctcagtgccacttccctcttctagtctgagagggaagagggctgggggcgcgggacacttcgagaggaggcggggtttggagctggagagatgtgggggcagtggatgacataatgcttttaggacgcctcggcgggagtggcggggcagggggggggcggggagtgagggcgcgtccaatgggagatttcttttcctagtggcacttaaaacagcctgagatttgaggctcttcctacattgtcaggacatttcatttagttcatgatcacggtggtagtaacacgattttaagcaccacctaagagatctgctcatctaagcctaagttggtctgcaggcgtttgaatgagttgtggttgccaagtaaagtggtgaacttacgtggtgattaatgaaattatcttaaatattaggaagagttgattgaagttttttgcctatgtgtgttgggaataaaaccaacacgttgctgatggggaggttaattgccgagggatgaatgaggtgtacattttaccagtattccagtcaggcttgccagaatacggggggtccgcagactccgtgggcatctcagatgtgccagtgaaagggtttctgtttgcttcattgctgacagcttgttactttttggaagctaggggtttctgttgcttgttcttggggagaatttttgaaacaggaaaagagagaccattaaaacatctagcggaaccccaggactttccctggaagtctgtgtgtcgagtgtacagtaggagttaggaagtactctggtgcagttcaggcctttctcttacctctcagtattctatttccgatctggatgtgtcccagatggcatttggtaagaatatctctgttaagactgattaatttttagtaatatttcttgttctttgtttctgttatgatccttgtctcgtcttcaaagtttaattagaaaatgattcggagagcagtgttagcttatttgttggaataaaatttaggaataaattattctaaaggat

SEQ ID NO: 1881477 - DNA, 4001 bp, Homo sapiens; identical to SEQ ID NO: 317010

SEQ ID NO: 1881478 - DNA, 4001 bp, Homo sapiens
caaaaatatttagggaaactctgctgtaaagatttttcattgttttttaaacaactgtcaggtcaacatatgacctttgaggggaaaaaaaatgctccacttgtctataatacactaaggagaggccaaaaagcagtgctaggtttttctggattggaggatgtttccccactctccaccccccgattttgtggtcatttaattttcaaaaaatttgcaataattatccttgtaagagtctgttgagaatgagttctttacactgctaatgggattatgaactgaactgctggctttcagtcagcaaccctgtaaatccctggatttatgctaagaaaaaagaacacaaaagaaccacaatgtgacatgcagaataatgcacgctgcaatgttacacattcagttaaaaagtgaaagcaacttccatgtctgcattggagaggccagtgttcctgggaagagaggctttcaagttgagtttgcagagcacttcgcagaaagactgaggaagagtccaccgtttatatcaaaaacctcctggaatgctggtgaagactgggggcgctttaggtgcctccgtggcagctccaacgaggaaggagctgggacccctgctcctctcagctgcgctctgttctcccgagaggcttgctggagggcgagcagttcagcaagaactcaaaacaagggcacagctctcacacggattccagtactcactgaaaacggctcagcacaaaaaaagcacagagtcttgttgaatgccactgggagacaaagcggggagggaggtgcaggcagttaagaggttccagaaagggaagtggttggcaacggtttgtccttttagtgcttgacacccaagaccacagcaggcctgtggccagcggggacacagtccacaagtgggggtttttaacagcttgttcttaagagagcttcccaaaccacagagtaatgagcactcaggtgtctcaggcccacggaggatttaatagatgaaaccctggatcgtctcgaagccgtggttgttaagaagtttaaatatattgaccggaaacggggagaaaccagagggtggaagagccgctcgcactgcggtgcgatccctgagggctcggggcaggggactggggaccgagcaggagctggcggggtgagctctgcgaagcgggcgtgagaccgagcgcccatgggccggtcacgccgggtgcccgctcaccccccgacgccagcaggagcgcgcgcgcaggccccgcggggccgggagggcggcacgggcggggcccccgtgctctcaccgccccggggtgtggttcccgcggacaggccgggcggggcggcgggtttaaggcgccggccggcccgacacggctcactcgcgcccttgccgctgccaccgcaccccgccatggagcggccgtcgctgcgcgccctgctcctcggcgccgctgggctgctgctcctgctcctgcccctctcctcttcctcctcttcggacacctgcggcccctgcgagccggcctcctgcccgcccctgcccccgctgggctgcctgctgggcgagacccgcgacgcgtgcggctgctgccctatgtgcgcccgcggcgagggcgagccgtgcgggggtggcggcgccggcagggggtactgcgcgccgggcatggagtgcgtgaagagccgcaagaggcggaagggtaaagccggggcagcagccggcggtccgggtgtaagcggcgtgtgcgtgtgcaagagccgctacccggtgtgcggcagcgacggcaccacctacccgagcggctgccagctgcgcgccgccagccagagggccgagagccgcggggagaaggccatcacccaggtcagcaagggcacctgcgagcaaggtgggcacgagcgcttccctctccaaccctgcgccgctcggcccagcgaagggcacatccgacggggcgtccgcggcggcctcgccccgcgctgctcactgcgattcccccgcgggcatcccaggagccagatgggagggaaagagttggcagccgcggaatgccaggagcggtgggcgacgcccccccttctcctttttggtggttttattttgagagtttgctgcgtgcgtccagaaagtgagggccgggtgtatatgtagaaaagattttccgagacctcagacttccccatgcccaaagcgcacccaactcgtgctaacatctgtccatttctcatcattcttggcttggggatgtagagagaggtgaagtcaagagatgggggaaaggagtttgacaattaaatataaagtaaggacttccagacagacttttttttttaaaagataggatcttgctctgtcgcccagggtggagggcagtggcacgatcttggcccactgcaacctctgcctcaagcgatcctcctgcctcagcctcccaagtagctgggactataagcctgtgccaccacgcctggccaatttttggttttttgttttgttttgttttgttttatagcgacggagtttcactatgttgcctaggctggtctcgaactcctgagctcaagtaatcccggcctgctgggattacaggcataaaccaccgtgcacagccctgatttcttagtattgaagaaaatagtccactttctaaaaattataggttctcaaacagtaatctaactagctaattatttgtgggcaaaaataaaatacaaactctttgaagactgtttttgtgatgcactttgttgtcaaccttctgaccattttgtttttccttcctatttctttgatttgtattgttttgcataatttgtccccaggatacactgttcagcagaaatgtctttgagattatgtttgattgtttattttattccaaacaagtccaagcttgctgtaaatgaaataaggaaataggccgggtgggttggctcacgtctgtaatcccagcactttgggaggccaagatgggcagatcacgaggtcaggagttcgagatcagcctgaccaacacggtgaaaccccatctctaataaaaaatatatatatatacattagctgggcatggtggtgcatgcctgtaatcacagctactcaggaggctgaggcaggagaatcgcttgaatctgggaggcggaggttgcagtgagccgagatcacatgacagcactccagcctgggtgacagacagagaccccatctcaaaaaaaaaagaaagaaagaagaaaataaagtctggacttgcaaatacacgcacatacacacacacatagaaattttaactctaatgcctgaaataacattttccattggcagtattttcaagggaaagtcagacattcaatgttggcagctcctgatcttagccaaggtagaaaagggagaggaggcagttctgaggttacagaagctgttgcttctttaacacagttcagactttctccagaatttccaaattctttctttagagcttttcccagaagtccacaaactaataggttgtatgtcatcaatttcagagttcactattgaaagccttaaattgtgtaactcactagtaactatttatagtatcatcaccttaaacttagaaaattgcaacccaaaataatctgcatatgtttacaatagaaacagttatttgttactttggatctcatttgtcggtcacatcatgaaaagataaatgtgcgttatttaagaatttattccaaatattgagattttcttataaacattacaatggggaactttatagttttttcaaaatggcagatacttgccttatcagagcagaaggttagcttggtgattgttcaagtgttgtcaatttctagtttatacttaatattcctttttctcacctgctacttacatcaccaaacactcacacagtctgattataaaatattgagactgacagtcatatagaaccagtttcataacctcattaccatgtacacccagctcagtacctctccagactgcaaaccctttgagg

SEQ ID NO: 1881479 - DNA, 4001 bp, Homo sapiens; identical to SEQ ID NO: 317013

SEQ ID NO: 1881480 - DNA, 4001 bp, Homo sapiens
ggattgtcatctgtctgatggtcatcttcttggggacactggtccacaaatcaagctcccaaggtcaagatcgccacatgattagaatgcgtcaacttatagatattgttgatcagctgaaaaattatgtgaatgacttggtaagactatatttgtcacaacaaaatctaaatcatacttttcaattaatataaaaggagggtttggcttataaaaataactcagaacaaattttcttttgctctaggtccctgaatttctgccagctccagaagatgtagaggtaagaccagttgaatttatttctgaaaatacattggacataagtttttaaatccaataagaaagacattagcatgattatataggagtatactgaattttaatgaacttagcggtctaataattgatgaaatatttatttatattttggttaaattcattgatttaccaaaaaccaactaaaaaatgctatattatattcctcataaactatgtttatcttcaagaatctctaagagtactcctaagtagtattgctgagacagaataacaaaactagaaacgaaatctatactctgatcagtttctgaacaatgcacagctagttactctttaagagcccttgggcatgaaagcttttgagccttctttgttatcctaccgaagaaacatagatacatacagtaggaagcagaattaaccttttaataacaaacttaaaaaagaaagaaagaaagaattagattacagggacagcatggagaaatggtggtgtggaaatcaaagctgtccttcagaatataattcacatataccttggcctcagtgagtcttgtctttggccttccgtgaggtcttttgaaagaaccattttcaacaattcatcccgtctcttaagccatttaaatccattagagttccaggaagaagaggcctggcatgtagttcaagagtgctgtccgctgatctttttctccagtaacttctacgatctgatcttctggtctggtaccctgagagtataaatgcaattggggaaatgttttcattgtcacagacctttaattgcataaattagaataactaaaagtgctaccagtaattaggacactacaaagggggagacttaagaagatacattgcaaagaaaacaattatcgtaaatgactatgtgtaaaagtttagaaagtgaatgagtcacaactattgcttttctctaaaattcactctctagctctgaacccaaacactctcatttactaggtccttttctaataagcagcatctaaaatgaaagtagcacattcagcttattggaaagacttttccaataactgaaaatacttcttaatcaatgtgcctaattatcaaaacatacatttctagcatctcatgcaccttgtttaactgttatggttagagttctttccagagtttcctggctgtagtctataacttgcaaaataagaaataagaaagagattccaccttctaacctgagttggtccagtgggtacttcctttacgtgtgttgttaatgaaagatattttttatcttacatcataatgaaaggattttgtctccgtgatactgtatctatctgataatctgatcaagcaatgctggctatgatataagtgagtaatagtgtaacttggatctttaagctatactagtaggcaaactcaggaagaaagaaatcgttcaaggtcacattagcattatatcaagctagcttcaaagtagggtctgtaagagattttaaaagatttaaaagtttaatgaaaataaaactatctaatgttgcatgcatatagtaattatctaagatctctaattggcctagccaggcatctttctttttctctttttctttccgtctaatcatataaccagtggttctcaaccggtggtgatttttgtgccccagaaaacatttggcattggctggaaaaatttctggttgtcacacttggaggtagaatgggggtgctactggcatctagtaggtagaagccaggtactaaacattctagaatgcacaagacagccctgacaacaaagaattatctagccccaaatgtcagtggtatcaccgttgagaaaccctgatataaacctagtttgtgtgtaggacaaaggtaatcctttttttttttttttttttttttttttgagacggagtctcgatatgttgctaggctggagtgcagtggtgcgatctcagctcactgcaacctctgcctcccaggttcaagcgattctcctgcctcagcctcccgagtagctgggactacaggcgcacgccaccacacccagctaatttttgtattttttagtagagacggggtttcaccatgttggccaggatggtctcaatctcttgaccccgtgatccacctgccttggcctcccaaagtgctgggatgacaggcgtgagccactgcacccagccaggacaaaggtagtcttgcccaattagcaagacttcttagtgtgaatggccagggctttctttgcaaaaggaaaaaaatgtaaaaataggcctcagctgggtgaagtggctcctgcctgtaatcccaatgcctgtaatccttttgggaagccaagtttggaggattgcttgaggtcaagagtttgagaacaacctgggcaaaatagtgagacatcctgtttctacaaaagaaaaaaaaaaaagccctaaggaggtaaaaaatttcaaaaattcaattgcaaaacaacaaagccaagtgtgactcctggcaaaagcagcacttgacttgttcttcagctgaagaggaatggtttgttaattcttgcgtttgactttactaccgctccttctagtctgcaaaacaatgtagcagcagaaaactcctcatgttctcatatgttaaagcatgagggaaacaaagtcttgcctttggagtctgttgtcaccaaggcatagcaaaggaaagcaatgttcatgcttccagacagtgctaaatatggagttggcatcctgtagactcctgagtgatagggcacctgaggctgcctaaatcaaggttaatcttttcactctccttctcaatacatccttaaggcagtttagtggcgacagccctctacttcttttcctcttttgaggctgcctttgatgtgcatataaagccaattcccgcagttatttatcctggaccacatattgccagacacagctctgctgcttgcagaacagaagaaaacaaaaccccattgtctgttaacagaggtaaacaaggaagggtgggagaggaagcacagccccatcaatatgggcgtcagtgtccaggtaccattcaaaggctttcagaaaagattttcagttgtttttacaactgaaattgtagttttacaatttcagtgctttgagtaccggtactgaccattcctggcaatattatctcaagggagttcatttggctggcagggcccctctacttctttggaacctaattttctttcagcatacacatgtaaatgttaactcagcaaaatgagcctctgtgagaaatgctggtttttcagatcatcacggatgaagcagtcagtattttcagtttcagctggaaaatttacctctttaaatatgaatattattttttccagtaagttaagccggttgtggtcaaaaagaagagaaaagaaaaaacttcaacaaacatgaacgtgtggttttcaaggaaaaaaaagtgctatattgaacatttataaatagtttctattaaataagcattttggcaaacatatggaaaggacaccaccttgcccttatgagaggcaatctgccttgatataaggaaaccagataagctgcttctcggcttgtggctatatatgcaaagcaaacctgataggtttgtgtcttagagatgcatattattaatctacattcatattgggtaagcatatgggttggaaaatgcaaagcaggccagatgctgtgttcagctgattgtccataagaagattc

SEQ ID NO: 1881481 - DNA, 4001 bp, Homo sapiens
aggagaggggttaagctagggttgagagtccctcaggaaggcattcaaatcccacttacacagatgagaaaaccaaggctcagaaaggctttctgaaaatccaacactgcatgttctcattcataagggggagctaaataatgtatacaggggagctaaataagggagagctaaataatgtggatgtagagtgtggaacaatcacactagagactaagaagggttggaggttggaaggggttgagggatgagaaattacttaatgggtacaatgtacattatgcaagtgatggtcactctaaaagcccagacttcccctaaagcaatagatccatgaagccaaactgcactttaccccttaattttatgcaagtgtttaaaaattaaaatgaaaaaaatacaaacacgggcttgtgtgattccatagcacatagctttatcccaaggtaagggggcacaccttaagacagcccccactttggtgaaggctgctagtttctgggaagctagcaaaacatttctccaaccaaattgcggaaaagctatatataccacgtacactaataataaaaaattgccaacatgaatctccaagctttagttttttaaattgtcagatgggtgcataggtgaaggagacaagaaacactggccaggggagactctcaagatactggaaccctcgtctcagttctgtcttaataaaatttttgcttttgagttaattgtttcatgcctatatgctgtctatggtaccctcttagtataagaagtctagacataaaaaacctctacaattcaattaatatgtgtgtgtgtgtgtgtgtgtgtgtgtgtgtgtgtgtgttcacagattatagagattcacagctgacaaaaaataacttctgggagataattttctagtgggaaagaaacatcaacaattcattacaaaccaataaggtcactgtcaagataagtgtgtggggacctccaaggaagctctctattttactaaagtccagagagtctgtcccgggaaggcttccagactgcagctcattggtttattcagccagtgtgtactgaatgctttttataagctttgtcctcattgaggttctggaaataaatattgtcaataaagcatggcccctgccttccatgaggcaactcacaatctctgctaaaccccagggaaagggtggttcagctactttttaggaagaattctggaagaactgagaatgtttacctcttctaacagtcttctctcattcacgtttaatttaattagaaatggtctaaattgaacttcggcagagcaaagcaacaaaacaacctgagaaactctatttgttaatagggtagatttaagtcgatgttctctaacacagtaaacataagcttaaatgttccctaattagagatagtgtgaacccagcagagaataccaagtcctatggggtgagcccacagagtcacatgtgctcagagtcacatcagtaactcagcatcatacatgacacattcaaactcactctgcatgcaactggtctgtagatttatttttatttactgattttctgcattttctattcatatttttaagtagaattctaacagttttactgtagacttttgccttacctcagttggtacacaattccaaaattcacctatctcactaaaacagtgaagaaccatgatttccttactgttacaattccccacaaaaaacaaaaatgaatcaggtcattgttacttaagtgataagtaccttagagaaagctttttaacatacaatcacagatcccttgttgaagaacacttttgctaacagttttgccttgctgaattaggaaaaaacattctttcaaggacagtagtaagattgaccaggtttctttgtactctctatatttgaagaaattgagccagttcagtccaagtcacttaaatcctgagtcttgattgcctaatttgtaaaactgttcagcttcctgccagactcatagggttgtagtggggagttcagtaacataaggcagcatttggaaagttgtaagaaaaaacaaaaatgattatgaagtcactttaaaatatagggctctaatattttactgtcaatcactttcaaagcagtgggacattgtaggcaaaacaccggtctgggaaatgaaagacccaggagaactaagttttcatctgggtttatcagtggctgattgacctttgaataagtcatataatattttctgagcttgtttcttcctacttattagagaaactgactatattatttttaagtcccttttcatttatagaaatcagtgtttccatgatcatttgttaattcaattaacattttctgagcaccctcatgacccaatcacttcctaaaacctcacttcctatcacattacttattagggttcaacacatgaattggaaggatacaacagaaacattcagatcatgcaaaagttacacatcagaatctgaccagaatcaagaaaacattattaatccaccaggccataaacataggggaatatctgagaaaagctatctgtctagggtatccataagaaaacaaggttaagcatgaagataacaaaccttcaaggtaagaactagctgggctgccacaggcaagtcacttaacctccctggacctcagtttattcatctgtcaaataaagagtttggggtcatgtgccatccatggtcctttgaatagcatctaatgttgtcattaagtgctgctctgtgcaaggccttgagacgatagaagaaccatatgacccgggaatggtaataagttcagtgatcacacagcctaggttgctcagggcagtgtctatttatgcctgttgtcctcagtaactgttcatagccccaatagcactctgtcttcccaagtttcactctccaaagtgttccagtttgagtgcccacatataaccatcaccctagtaatcaggcatatacgcacaagctgataaggcaagatgataaaacggtaagtatcaagaaagggacagacataactgctcctgcactcagcagtgcaaaaattaacaatctgtttactggattttctaaggcttcatgaaggagttgagacagaatttaaacctacaagatgagatagctaaatggaggggattcggtacaacatatacaattatgttgaatgtcaaactgcttctcatcccacatattaattgcagagcagagtttttacttttttttccatcaatgttatatttaacttaatcatccccaaatctacattggtcttctccccttttgagtgtttatgaccccaattgcttaaattccccccagtgtacaggtgaagaatgacaaaggcattgcctatcctgtgtgaatctagtaaacctctgtctaccagactttgataattgtctgggctctacccttggcacaccattctttgtactctacatttgctctttgagaaataccagtcatctctaatgtttgctagaattgactcctaaaccatattctaagcgattgtgttgagccttgacatctcttttggaaaccaggcccttctttccaacaactggacatggccacttggatctccctatttcttctttggactctgaagctcaccctctctaagagtgctaatacaacatttgttctatttcatttctattagatacttaaatgtgtatctgccttgagagtttggactgtgttttaatcaatattggatcattagggccttttcttgtatctgacagtttccaatgaatactattgaatggaaatggctgttgattttcattccctgctctatcatttgcccctgccaactcttcttattcttgtctttgactagagatgacagatactcccaggattttaaaggtcatttaaacatcgtctttaagcaacagacagaatcttccccctacagggagttcaatggagagccgtctattgttcaattttcggtatcaagctaactcagaaag

SEQ ID NO: 1881482 - DNA, 4001 bp, Homo sapiens
atcctccacgtggcctttcctggacttgcgttatttaaaatatgcgatttcactacttgaggttaccgagtactaattttacaatactgtgtagctacatgaagcggctcgaaatatactattatcactccgttttaagcagcacgatgtctggatgaagcatcaaagcgagatgggtcaacttaaagggcctttaaaacatcttgaagcaataataagccatacactgaagcaggggcggttttaaacattacacagaacttaaaacaatcgaacgaattcgtcctttgttctttttattacattaattattacattaatactgtttaaaaagaaactcaaaaggcattaaacttaggtaccaatctacacaaagtcctcgaaggggcctggcttggaccgaacgcgcttttgtgccgccccgctcgctcgcagcaccctgaaggccactgagcttagggcgctaggtccctagaagcgacttgaaatgagggggtcgccaggccaggccctcgctctgcaggggaggatccgaccaaagtttgccaagtttccaggcaagcccaactgcgcaaatgccgctttttagctccagcggcaggcctggcccgtgggagttttgccccaggggtctccgggccttcaaagaaaagtcccacgaggtggggggcgccgcctgggccgccggccagggggacccgtcgccccagggcacaaagaaagagcgcgcctacagggtgtcccctgaccccggcgactcggggccagggaggctcggcgcgccccagcggccgctcttcccctcccgaacccgcccggcccactcgctcctgcaccgcggccgcctcggctcggcttttctcttgcagtgagctgagtgcgctcagccgaggaggggccgcgccgcgccgcgccggccgcggggcccagcccttcccgccgcgcccggggccgcccttcccgctggagccggctgatcgatggccctggcagcccgcgccccccgcctcggctcgcccgcgagcccggctgtgtgttttggaagcagcgcagcgggccgcagccgtgtgacgcccggagcgggcagcgccgcccttccttccccccgggctcgggcggcggcgcggcggctgggccgggcgggagggctggcggggcgcggactccggggaggagggcgcggggaggggacgcgggcggggacgcgggcggggggcggaggccgcgccgcgcacgcccagccccacggccgcgccgcgcctcgtgggacaggttgggccggcggggcggcgcccggctccggggaataatgagtgtctgtcaggccgtccccgggtgactgggcggggcggggcggaggcggcgcgggaggcgggggtggcgggggaagggcgcagggcggggtgcgtgtttgcgcgagtgactcggccgacccctccggcggctgcctccacccaagtgggtggggacccgcccagcccgggcggccgcggcggctccctctcccctccctgaccctcccaccccgggtcccagcctctacttaccccgccagccccgggaggctcgcagagcgagcggcgccggcgtcatgtgactgcccggagttggtgccaggagccagaggggagccaggagcggagccgcgcggagccggggcccgagccggagcgcagcgagagcgcccgccgcacgcgcgcccgtccccgtcccctgcggccgccaacgccgcccggactggagccctgacattgctgcgctcggggggctccaggcagcccgtatcggggcctttatttctcgtcggcggcgccctgcaccgcgcctcgcaaagtaagtcccgtctccctcacctctgctccgcaccctggtccctgccgcccccctcctcggccagtctggtttcattttttctcctggagggggccgcggggaatgggtcgggggtgcagcgctggtgttggggggggcgcctgcgggcttgggaaagtgtggcggctacacttagccggggtgggggcggagagcaagcaaggaggagggggtcacgggttcgcggtgaaaagtgaggggttgaggcgaggcaccgtgcggaccccgggtgcgggggagcggggctggcagcgcccgccgccgtcccgggcagggcgcgggcgggggctcacctgtgtggtccccggcctcctcccgcccgctcacgattccctccaaagccccagaaatctccgtgctctccgcgtgtggcaacgttgtttggagaaaggtagcgccgcggccgcgcgctcctgctcctccccctcccggtgcccccccaccaccaccacaacccaggctcccgcgtccttcccctcccctccctccgcccgcgccccccgccgcccccctcccaggacacggcgcgcggccgctcgcccgccacagcaaacttggagcagtctcccggccctctggaaagaaacttagggcaattgggattggaggcagcatcccattctcggttctggagcccaggagctgccagggcgtctggatcctccggggcaggagaaatgagctggtcgggtttggagagtcttcctgggggcatggagagaacctgccgcagtgcctggagcaaggattgcagcgtggctgaaggcggaagacgccttaggcaactgcctgcagccgagcctgatggggacccagggacagatccctggatcaggacccatgggacctacctaacatttccaagtggctttcttagagatggcagatgagatctggaattgtcatattcatttttttgggcagatagctactgacaaggagaagcacttttctggtttaaattttatagcagtatacaataatactagaagaatgtgaatgagacttatttttaataagtcaagttaaacggaaattggaaattgctcaccttcttgtatttcactaaaataaacattttacacttaaccactgaatttcttactcagaatttatgtttccattaatatcacccaagacattttaaatatattgattatattctcacaagagtctggtatatgggaaaaagtatgaagtggtattctgacaagtacctgaaatgtgccagcaaaatcaagtggggaataggccagttgttcattataggtttttccacacagcagttttgtgctatccttttctgtacgaatttgaggagcatttttataagagaaattcatctggatgatctgcctcaccctagggaagaagacttgcttttaggggaaaaaacaatctgctagcattaatatctacaaattttttggagttagtaatagtgtttaaggaaagtgtccacgagtgatttcttctggtttgaaaagaggtatgttagttgaccttaggctgttaatagaaacctgaaattagatgttcgattaaattaaactccctagagaaactggtatcttcatttctgcagtcagtgggctttgctgcagaactatttattagaagaaaaaaacctaatgtactatcggtaagttcaatgatgatacattgtaaagaacatttagcttgcatgaaagggaatgcaagtacaaaaatctcaacatgggaataacaaagaaaagtaactgcttagaccacaaaaccttgtcaggtacaaaacgacaacagagttttgcagaaagctattgttttattcactgcaaagtttctaaattaaaacccaatcttcttgttgctatgggcacagtgatgctctttttttcctttttttttctttttttttttccttacctgtacttagtctgcacacaccacattcttaaatctctgataacgtaagcttgagttaaacagtcctggctaacaaagtaaagagaaataatgggaaaggaactgtgaatggattttactatcttaaaaataacccaaagggaaaatagacattttagaatgacttctagaaattagtactctggtgtacagattgcataataatttttagataaatgtcagga

SEQ ID NO: 1881483 - DNA, 4001 bp, Homo sapiens; identical to SEQ ID NO: 317047

SEQ ID NO: 1881484 - DNA, 4001 bp, Homo sapiens; identical to SEQ ID NO: 317049

SEQ ID NO: 1881485 - DNA, 4001 bp, Homo sapiens; identical to SEQ ID NO: 317052

SEQ ID NO: 1881486 - DNA, 4001 bp, Homo sapiens
tctgttatattttccccttttcctttttttctcagtcccagattcccgcctctccccactgtcagagcatctatcaatgtggtgtccatcacagcggcagcggctttctctttcatcttcctccctctgccagagccagggagggagagtgggaggcgtcaaggaggtaggggagagactggcagaggaaaaggagtgggtgggtgggggccaagtaaatagatacttagatgatgaagtcaagccactgcggcaatgtttcttgtcagtttcacgcgggcaaagcgtgcctttcggtgggttataagcagcgcccggtccttccttctctcgccaagttgcctgatccttccctccaggcgcgcgcgcacacaccacactcacacaccccaaaaccaagactcgtcctacaggatctgggaaaagaaaaagaaaaaaaagccctcaatcaccacctccttctcgccgactccccctcaccccccgcctcccctccagcgggcagccaaggagagctagaggcgggggaggggagagggaggagaagcgacgcaagtgggtagcttttcagcgccggcgaggcgcgggaggaggagaagcagtggggaggcgcagccgctcacctgcggggcagggcgcggaggagggacccgggctgcgcgctctcgggccgaggaaccaggacgcgcccggagcctcgcacgcggccaagctcggggcgtcccctcccctcggccgggcgaactcaaggggcgcagctctttgctttgacagagctggccggcggaggcgtgcagagcggcgagccggcgagccaggctgagaaactcgagccgggaacaaagaggggtcggactgagtgtgtgtgtcggctcgagctccgggcagaggcatttgggcccgaggcccccgctgtgactccccgagactccgcagtgccctccactgcggagtccccgcgcttgccggcaaaaactttattcttggcaaacttctctttctcttcccctcctcctcggcccccatcttctgctcctcctccttctctagcagattaaatgagcctcgagaagaaaaaccgaagcgaaagggaagaaaataagaagatctaaaacggacatctccagcgtgggtggctcctttttctttttctttttttcccacccttcaggaagtggacgtttcgttatcttctgatccttgcaccttcttttggggcaaacggggcccttctgcccagatcccctctcttttctcggaaaacaaactactaagtcggcatccggggtaactacagtggagagggtttccgcggagacgcgccgccggaccctcctctgcactttggggaggcgtgctccctccagaaccggcgttctccgcgcgcaaatcccggcgacgcggggtcgcggggtggccgccggggcagcctcgtctagcgcgcgccgcgcagacgcccccggagtcgccagctaccgcagccctcgccgcccagtgcccttcggcctcgggggcgggcgcctgcgtcggtctccgcgaagcgggaaagcgcggcggccgccgggattcgggcgccgcggcagctgctccggctgccggccggcggccccgcgctcgcccgccccgcttccgcccgctgtcctgctgcacgaacccttccaactctcctttcctcccccacccttgagttacccctctgtctttcctgctgttgcgcgggtgctcccacagcggagcggagattacagagccgccgggatgccccaactctccggaggaggtggcggcggcgggggggacccggaactctgcgccacggacgagatgatccccttcaaggacgagggcgatcctcagaaggaaaagatcttcgccgagatcagtcatcccgaagaggaaggcgatttagctgacatcaagtcttccttggtgaacgagtctgaaatcatcccggccagcaacggacacgaggtgagcgggccgctgccccagttccgagaggcgtggcgggtccctgggaaactcagagagggaggaagggaacgaaggcgcccggccgcccggctgagggtcccgagtagatccctcgtttgttttggggtgtgtgcgtagctgggcccccggtccgcagtgtgtgtgtgtgtgtgtgtgtgtgtgtgtgtgtgtgtgtgtgtaggatgggaggtagaggggcagggtaacttattccaaatggatcagtttagggggttcggtggctgaacggttggttcgcgggcaggaacccacaatgtttcgccttcggtctttttgttgggctgaggggtgccgtgctttaaagcgagtagggctgaataacgctactgataaattcttccgtgggacggaaaacaaagtgcacacgctatctcttggtagatgtctctgcaaaagtgcgttaaaccaccaaaggcttaggtggagacgagcagagccacaggcgggaggaaggggaggcgggcgtgggctggggcaggcggggccgtccctaccaccggtgagccgggccgcggggagcaggccggccgatggggcgcgcacccgggctgcgggggcggtgcggggttcagtccctgcggccccagcgcctgggctagcagctgggagctgtgggtgcgccgagccgacccaccgcaagggtacaccctggctgtaccgcccccaactctagttttctccaaccgccatcacttggaaacaaacccacaacttttatttggggtttgggaccggatcaggccttaaatctacgcagaagaaaggcggagaagcagcggaagccgggcactagtcctgcagggtggaaggcgctttatcgggtcttctggcccgctgcgggcgatagagctggtaacctgagtagagtaaatagagacacgtgggtgctggctagagaaagcgcggagcagggccgcgctggagggctgtttgaagcctagtccagagctggtctagggggcggatggaccctgatacccgacactccactggtcacccttgttccacaactgggaaaccctctggaggaaatccggtagaaaagtcctgacacccgaatgatttaaccaacgccttttccctccaaagaaacttggaggatatacctttttttccttaaatggcatctttctacccccaaaaagaaagtgtgtggttttgagggcggggacattttgggttttaaacagcgcgtttaagaacacctcagatctgccttctctatcccaatggcagaggtgagtacgaattttgaaaggctgggggcctgcgttcagagaacagaatggtgttctttacccgttgaatccagtttgagcgggctgggggcgggggtagggtgcacctaaccccgcgtaaaagatttgtgactactgtgtgctgggaaaaggaggtcaaagggaggacacacgtccagagaaccgaataacatccaaaacacaggctttttgccaaactctcctatttgtagagcagcctctctttctacccattttgctagtcctgccttagtccataaataattttgccacccacttcatattctccacaattttctggtccgggtgaaggacactgcgttcgaatccgagagcactcgggtgttaagtgggcatgaggaggcctgagggtgaaggagtaataccactgatttgcacgtgtttgaggctgtctgggtggatggtgattaccaaaactgatatcaactgggctaccttttagatgtctataacctgactctctaattttcctccctttaaccacagaatcgttctacttttgtaagcctgcactcagccagccatagtaggttataagctcgagtggagcttctgctgtaactgcgctcagggcagttgccttaagaccgcatctgagtggttggcttgtttatgtttaaatgccattttcagttgcaaaatgatatttcagccttcttttaatcagatctgattgaagtgaacagtggttgaagaggctatcga

SEQ ID NO: 1881487 - DNA, 4001 bp, Homo sapiens
ctgactggtgagtggcctctaggaaaagatctctgcagtctatcgacgagagggtttcaaatcacagagatcaactgtgacagtaagtactttgataaaaatactaacattggttttccagaatctaacttctgtgaaagaaaactatacggtgcaccatatcatgtgtagaaaaaaaggaccactatacacaacgaacatatccacacgtgttgtgtcaacgttctcttcccaaatgtggccgcagaagaaagtgcgaagcatgctgaaataagacagtatttacggctaaggaaattcggcttcacataccggtaattatgaacaagatattttccctaataaaattactccaaaacgaaatatagagaaactgtttccctatgttctctttattttataccatgtgctcaagaatggtcacagaaaagagtcaaagggagcagagagagaaagaaagagagctatatagagagccggcctctgctgagggttggttttgctttagaaactggaatgtgtccaggcttgatttttattttcaattcacatttcagatccagctccccaaactctttgatctttctccctgtctccttacccggaagagaacccttggccttctcagctgggagctgggagcacacgtggaaagactggctcagatccatattcttgccaaatttagtcacacaaaggggcctgcgagggaaaaaagaaaggatgaaagcggcagccgccgcgacttcaaaggccgcgccgccgcgcggggccgtgcgcaggcgcctccctcagccgatataaggcacggctcgagcgcgcgagcggcctttccgcgcgcgtccccgacccggggggcgggccgagggacgcggagggccggtgggaaggagggcgaagggttggataccgcggccgtgctacccgccggcttttcgaggccggtccccatgccaagttcaggcgcctgagaaaagtttttcagaaaggagggacaagaatgtcacgtcctgcccacgaaatgagcagtcctgtggcccgcaaaatgactccagctcccacctccattctagctccgttctaggcattccccgtgcgtgggagcctgggttcccgtcacggagcgcagccgagcgaggagggcgcgtggccgggccctgtctggctccttcggctcccctgtgcccgccttgcgttcctggttcccgtgcgctctcctaccggcgcgattcctctcccccttgggcagccttaggacgtgtgccctcgcctcccagctggcagaagggcggcctgcagagcggggtgggatgcgccccttccccgcgggccgcaggaggaggcggccctgtggacagccgcgccccggacccccacccagcgaggcagggacgcagggctcggcctgcactggcccagcgctgggaaagccgcaggagggcgcgaggggtggcggaccccgctcgctggagccccgcgtggctgcgccgagctacagacgccaacgggcgccggccccgcggaagtccgacgtccgcaggcggccggatttgggaacgactttttcacggtcccacgagttccctgataccccggagggtggggggttgagtttgtttgtctttaggaggcggcaagaagaaggggaagaacccctgggacacaaactgccatttccctcgccccccttctctccttttccgcgaagtccgttaaactgaagatgcccacagctttcgtctccgggtgaagccggggtgggaaatagagggggtcggggttccgcctctggagtcacattattcgttttctagcccttctccctggctcctgggtatcctcttccgtaggccccgccacctccttccttttggatcccaccaaagtcgtagctgggagagagtccaggccacacaaaggggaagacctggagcctgggcgggggttaggaccgagggggcggagaggactcgaggggcaccgtgcttttctctcgtccttgtaattaaggactcactggactgtctgtagccgactcgagttggcagcaaaatcgccggggggaggggttttctggtgtgagtgggggtcactaccctgtctctcctgcccgctcccgagcggggctgggctccgcttacccagtgagcagcgaggccgtctcttctcccccgctcctctgttcttgtgcggggtgggcgcctcgccccccacgcgcagttgaggcgacggcgcccgatgtagaaggaagtgttgatataaaacaagtttgttcccaaactaaacccaaaccaagcaaagccaccaggaggggaaaaaccaacagcaatccagccagcccctagcaattgttttcacggtcggaattaaatcacatcaaaacgccccctgaaacccacatcctgaaggagtgaacctacaacagccaacctccagtcgttcgctcgagttcacacgaacaacttgcctctaacatccgagtgaagggggcggcgggtgcctctcccgcaccgcacccaccacatcccggacctgggatcccactcgcacccgaagaggcggctgcttatgttaatatcagcccccacacgaattagaaaagaccgcccggtgacagaattgcttatgccaggaactacactgaatccgtaagggagggggaagaacgtcttcccggggttacttcgcccctcctgcgtcctcctgctgtttccaaaagacagacttcatgtgcaaatgtcaacctctctcccaaacgaagctttagaaatttggggcgcatggtttttactaaagccccttctaagtgctgctcatcagaagatttacaacaatcctaaagacaatcagctaacacaagttacaccactgtaaggaaaacagccacgcaaatagagcaaggtgctgggtgatttcgttagaaacaatgttttcaatggacggggtctcagtaaaataccaaacgcagccccctacccttggcccttcaagtaaacagtttcccctagttattgttctaaaaattcccatcttcttgagcttctaatcttcaggaaacctggagcataggctccaaattactcggggaatccagagttaacatgaaggagaaagtgggatctgaattagtttcagcacttaaacagcgggggggatgtaagagtcatcatttaatctctcttcggcttccagaaagtaccccctggccattctgtgttctcccctccccctcctgagggtttgatgaaaaggaacctctactctgctttggtgaaactgcattttccacttgttttcctattggtcaaattggtgcagttatgggaggacttttgactgttttcccatgtgtcttttaagaatggggctataaatgtctgacacagctacacgttcacctctctgggacactactcacactggtgcctaactttaagggaagtgacataccaccatcatccaaaaacaaaaattgggtttctcacacactgtagcagaatatactctttttcttctcttgaggcatagcattgtcagctattaaaaatggatttaatgttttaattttcctggattccttcaccaaccccttaatttcaccccaatcttccagatagaatttacatgtgactactggccatgttgtagggaccaattggatcctttgtaaagttttaaaaattgcttcctagtaaattcttattcccaagaagtagtcgttattagtaggtgaagtcattagtgctcacttagatacagcattgtaaaaatctttacccattcaatgttcagcagcctgaaatttcacctttaggaaaaaaagagggatctttgccagacaattcctatataatggagcaaaatctgattctgtagtgttttgcttgttttcgatttaagggagatgaagatacatttctttatgtcctttgtttactgttctgaagttttacagatggttactgtattggatataataattttgcctagatttttaactg

SEQ ID NO: 1881488 - DNA, 4001 bp, Homo sapiens; identical to SEQ ID NO: 317065

SEQ ID NO: 1881489 - DNA, 4001 bp, Homo sapiens
cacctgaaatcccaacactatgggaggccgaggcgggtggaccacctgaggtcaggagttcgagatcagcctggccaacatggcgaaaccctgtctctactaaaaatacaaaaattagctgggcctgggggcatgtgcctatagtcccagctacgcagaaggctgagacatgagaatcccttgaacccgggaggcggagattgcaatgagccgagatcccgccactgcactccagcctgggtgatacagtgagactctttcaaaaaaaaaaaaaggaaggaaggaaggaataagctaaagtttaaattgtcatgtgtaaagcatctaagcatctcacccagtctagttacaaagaagaatttagacttgtaaaatctaccacaacatttcattctttatctgtaggaaatttttatttttcagaagccaggtaaatgggagttgcagatggtgtgtttctgttgattattttttgaaattggaaaacagagattgtagttctttttttcagttgctttaaagcgaacccacatgtaactacagccattccatttaagtgaaagctgaaccattcgacacaccatagtaaagacagtgtataaagtacattcagcaaaaaggatgtggatggaatatgagacacatggctgaaactactattaataccttgaggtttaaaattgctgaaggggtaggctccatttctgcggttcactaaaggacagagacctgtatttgaactgagggctcatttctcttgacctaaatgtgtcacggtaacaaacaactctcagagaagtggtaaatcatagtcattaaacaaacaaatcattgtggactgtcagttcctactttgaagaacttaagccatcttcagtattatacagccaaaaagcatcccgtccctttgaaaagctgcacaggctcttcacttccaagtcatctatttcttggaggctttacttttgcatgtgatttctaaattttttataaaatgtatctgtttcttctgtgctgctctgcttctcttttctaccacctaattcttagattataatcagtttcaaaagcacactaaaaacaccatcacagatgttcactccatcttcaggaatttggtgttgccacccattttcccaggggcaatatcatgcgaaacgccttctgctgcagtttgtttctttatttctgttccgagtgacctgcggcaagaattgcgctgccctcgctatagaaagtggcaatcccccactgcttatgattattgaggttctttgaggcagggctcacaatctcagataaactgtgcccctcaattataagggctagctgaatatgatccttgccttacaagtaccttattttccaatacgcactgtctacattcaattatcagacattattggaaacacaaaggtcactgcttacatctcaaaagctcttaaagcaaacatgttattgcctcctgtacatttgggctttaaaacctcagaattcacttcaggacactattaccctcatctctgttctttttgaacatcatagcatgatggaaaatttcctagtccaaataccgaatcagccaacaaagcaattcaaaaggaaaaacgccgagctttaaaaattgcaatacaaaatgactgctttcgttctctgtcgcctttgtccccacccttcactccaatgtgaaagccaaagcatccctttgctagcatgacaatttgagctaagaataaaagccagtcattattttatcatttaatattaattataatagtattagtcatgatgaactcctgttgcattatgtggctttcaaatgtattcccaaaggactttgattataatttgccattttattcatgttcaattattttaaagtgttgctgaattaacgagatccacttagccttaatcactacttacctcatcagtttatagcactgaaatgtctggcttataaagacgatctgtgacagaatgagacggagccatcatggccacggctgacatccaggctcagttctgaggggtgatggttctatgggacaggcactatttcagcactggtggctagatgcaagcccgcagacaggaggacggcgtgggaggtggtggctactgagaactctcggtgcttcattaaataccttgccaacccctggaattataaatagagtgttctgtatgttttccttctgatgcacactaatagtcctggctttacatcccttatgtcttgaaaatatagctgcattgagattgtgttgttggtggtgatgttttaaatggaatacagctctgcctgactgctcatcggctctggttcattcttcatgacattattacgtgttatttccatgagttcctttgtctgttatgcccaaattttattttctttcacattctccttgggctgtcttctagattctaccaatatacttcatttttccacttgagatttataagatctcttataattcacactaagttttctcatcttctcattttgttgtgtcttaagtaattatagcaatcatctaccaggtaattaaaaattaccaagaaccctggagtggctatttaccttgccatggcatgggttaatactatgtaagtattatgcccctactcatgtgtccagcaccaatgtcagacactacagtagatccagaaaactaatataaacagcttctgacaattcaactggacagggctgattaaggtcactggaagagtagttatattcaaaatataatagatgctagccatcagaaacccctagattttatcaaacaccacctcagcaaattaaatgactttaatcagagtcctagtaaccagtttggggtagcattgataaagatttctacagtttcaggtgggaattctatatgtgagccttttaactcgttgacattataactgagaatttcccaaccattccatcttctgctttctgactcaaggatttaattcaaaggaaaaatgaattaagatggcctgcagcaacgttctcccttttatctagcctatccatattgtgctatttaaatttactattctcataccaagaacttgcttagcgactgggactgtggcctttaatattgctctgaaaactgataatgaacaacttgaacaggggtttttagatttttttgtaattaaaagtatgatgcgttcaatcatgacatgaaaatacatgtgcaagccccactcaaagcaatggcatttttaaaaaaactgtcagaataagagttttatatgttatcattatacattatattgctatgctgtatgcatatgtacacagcatatatatacacacatgctaactttcttcattgttggtgataataggaataaaaatcagagttgatgctgaatcgtggtttgaattacaaagttattaatgcctaatagatgatattaagtgttactacaagctgagtgcaattccaacggtgttgttggtattaacttctttaattctcacaatgactaaattatgcagaattctatcctcattttacatctgaacaactgaagcagtgagtaatttaagtgacttcatgccactcaactagaaattgatggggccaagatttacctccaactttagggtggcccatgctctgaactttgacactccactgcctggttctacctcacaaattataaactgaattggcctttatgtagccacagccatgtcctgtgttttgttttcttttctccttcaataaggagtttcttacaaaatattttgtgcaagttattttttgagaaacactaaaagaaaaagatatccctatgatctttttttcatagttctaaagctgatggaggtgtgcctttgaaatattctgttcatgaatttgtaatatattaaatctgtgggttaaacttcctgccaaggctcatgacaaaatttgcgtccatccagaaggaatttggaaatactccataaataaaaagaaatcacgaaatttccaggc

SEQ ID NO: 1881490 - DNA, 4001 bp, Homo sapiens
acaatacttgatattaaaaaaaaacctaaaataaacattttcgtgaaagcttttgtctacccaaacctagttctctaacataaattcttatttaattcctacgtttaatggaaaaatccttttaaaatatgtgattttttttatttttaacattttaatttacatggggctagatttctgttctttctcactcacactatctccccttacttttattcttaattttgtttcttgagatgaaaagagggaaaaggggtgaagtgagatctaggggcataccctgaaaagtcaaaggtaatttaaatttctctcagagccatttctttacaatgaaatgagcaaatggaaatgaaataagcaaaaacaaaataagaagaaataattaaaagcaaagacacaaaaattctaaattaacagcttaatttttttttaagcagaaaaattcaaagctagagtgactaaactttcaattatgtggaaggctttagagcagtggttctcagcctgggtgtgtgccacactgacatgtttggaatggtgtgggaaagaggatcacgcagagagtggggttaggaactaagcctaattttgaacctcttactcaaattgcagcttaaccatcaaaacctggggatcctcatcacaatgctgtgcataaaatcataagtcttactgattaaaaagaaattaagaacattgaaagggtgaaattaaaaatactggcagctctcaatttgctaattcatatgtatccatttcagttaccatgatttagttaaataacaccagtccctcaatagcatggttcacgtttcattaactatggtatattaactgcaatttcatgaagttctaacctcactgatagcacttcagttcagaaatcactacataaatatcagatgcacatcatgatgagtgacggatcacctcagtatggctactgcacatctgttactcagttaccacccagcaaagcatgtaattgtgttgcctccatgtcttcccatgataaactcacatgacattttacaaaacggatgattaaaagaaggaattgtgcaacagacgaaagtgcagccaagaaatgaaaagcaataatgctggatgtgaaattagatccgataagaagacagctgactatggaatattgacattgctgtcatttcagtttctaggtatgaggccacagaaatttactaaaagagaacttaacataaatgagaaaggtagttgtgatgaacagaatgaagatgtcctagaggaagtagtgctggcagaaaattttcacgttagaaaaaactcttggaggtgtttcaagacactgaaagaacgaagaatacaatgcgggaagccgatccgaacttagaaaagcgtatgataattcgccagtgcgtaaagaaagatggtgctccacattgttagttacatgacaaggaggcaagcatggtttaaactacttttgataagtttttatgaaaagtaacttcagttttaaacatttctcatgttttaagttatattgtactaggtattagttttactatttttatttgcttgtacctttgtcaatgacagcaagaaagattttgatgttttggcaaaactttttaaaggccaaggcccaatcattagttttctcattgattattaagattgctttgcgcaatcatctttgcagtcccacactatcgtgcttgtactgaggattatctgtaccttatttactgttacatagtaacttcaatactgtctcatttagtcctcacaataacttgctgaatgaagcatgcattattatttgtatttaacagaaaagagagactttagagaaatcaagaaatatgtttaaatttatgcttactcttggctgagctgtggtcctgcagttgtcccgtattctctcttcactacaacgctgcagagacttattcccctaagctgccctgtccatcagacaagcacaccatgcccgttacattcccagagttccagttatatcccctcccacccaggggctcctctgttttgcagggttcactgtggtctcaatctgggtcttgcctttgtagatcaatcgctcttttgtttctctactattcagggcatattgttgttgctgttttaaaaacatctgactctctcttttctaatgaaactgattgtgtgtttttccacaaggccagactctcctttcctatgatcaaataattaaaggcaatgaattaatggaagaagcttgccgaccccttccagtgaccattggaatcccaagacttcattccagtcctttttcttcctcaatcatcaagcccatcacttttttcttcttacgtcttgtggatttgtctctgctctcaatctctgtttctagatataaatttaaacattcatcatctttgctgtagtatattcgtttattttataaacgctgataacactatgttccagacattcttttaagtgctttacagctttacaaatattagtttatttaaaacctcttaacagctacatgaggcagatactatattatcattcccatttataattgagaaactgagacagaggcttaaagtaactttcctaaattcatacacctggtaagtgatagagaaaggatttgaaaccaggcagtctaactgcagaatccatgctttaggcactgttttagaatgtatctcattcattcatacattcatgcatttatccatttagcaaacatttattaagtgcttatcgtatcaaatactgtaatagagaagaaagaaatgtataaaaaataagtggagaaatgttttataggttacatcacaggtcagggttaaagtaaagacactaaggagtgagcggtcaagtctaaacaagaaaggcagagaagaaatttaaaatagatgagtcttgaaatatgtgtgggcagttacctgggaaacagaacactgcattttaagggcaagagcattttaaaatagagggagggctgataacaaaggcatggaggcatgaataaactggtatgtttgagccacttccacgtggttgaagcaaggattgaggtagggtttaaagtgagacgaaaggttgaaaacacaggaaagacccaacgtcaggggcaaggacttggtggttctggcaatgaaacttgagtgtacatctgactcatgcgcttctgcctggggcaacacaattagactgtaggaagctaaaacaagggaacttgtattctaaacaaatcaccaagtttattttggggtaaaatagtttgagagccactgctgcaggtacgccaggcctccgtgatctggcttccggtttgagtactctgcagagcacttcacagacagcttcattctgcaccatgggagattgagctttcctcttaacagaacgagtccattcttattcatttctccattggaaaaaccagtacttgtggagtgactccatgttaaattccttctgtatagagaagcatatcttggttcaattttacataatttcaccatgctaggcactttgagttattgcaaagatgagaaaaaaatagatttggcttttagcagctcaacatctagtcatccccaatctatttttcatatctcattataagagtgtgatcattttaaaaatttgcataagagatcttaaataatatatgaacactaaagctggctagcattcttagcgttatacagtgcatcctgcattcacggatgggaaatgggcatcactacttaatggctacagaaggtctcctgactctgggctcatgcagttttccaccacatcgtgttccttctcactccaggttaattccttctttgatgcatattctttcttgaacattcacatatagttttctattttccagagcactctttcctcctcctttttacctgtgaactactaaccatgtagtctaagcttagcaacacttcttgtgccaagcccttcctgaccatcaaagttgtggctaagtgcccattttagtaacctgctgt

SEQ ID NO: 1881491 - DNA, 4001 bp, Homo sapiens
acatttgggtccactgagggaaaatcttagcagcaatttttctccagagctcccactggggtaggcagaggccaccattggtactgcattaccatagtttatctcttccctccatccttcccctcacaggtgttgatctcacctgaacactaaactctgcacttgagtctgcttctcagagaaccagactgcaagcctgggttatgccatgagtgggtttatgcagaggaatcaactagaaaggtagttaagagaaggatggtgagggttctgcaatgctgggccaataggtatgagcttacgcagttggcagtgagagactgggggccttgtaatcggagggtgctgagtttagggtcttttattggaaagacttctctggcttctgtgcaatgactacattagaaggaggcagagaggcgtgctaaaaggccattgggttagtacagggaggagaaatgtgagttccaagatggagaaataaccgatcatggagaggaggggtggtgttgagcaatttaggaggaaaaatcaaaagcccctcatgacacattgactatagggacagagtaaggatgaatggataatgacacagaaagagtgtgctaattcattcctaggtgtggcagggagattactcctaatttaaaattgcaacttgcaagaggagttctttctcccaaggccttttccaaggcactccaggtagcagagaattcaaatggtagctagaattctcctttagcttgaaatacataataaaccagcaatgtcttctacaaaaagcatcattaacaaagtttgtgtttgttcatcagttaagatcttggggctttttgcctgatatcattaatcgtcacgcttgctaaagaacattcttctatcaaacagacggggattcaaataaaaggagcaaacatatgaatatgcaagaaggaaggccaaattattaatgcagaatgaagaagaatctggcaggaatatccttcattcgacaagtatttattgagcgtcctctacatgctaaccattatgccaggggctgggaatacaatgacgagcaaaatgctgcagatttcatgccaggaagcaagcacacatctgaaggaattttacataaatacataatgtgttgctggttccagcatgcccctcttcatcggtttagttcaaatgtactcctataactcttacttttgcactgaaatttccttctgtttttttttctcattcattgtggcataatagaaagagtagacaggcataccaattgccttactaatcatatgaccttgagtaaattacacatccttccaatggggccaattataccaatctccgagggtatgcttgaaaatacattaagatactgtgtaccacagccagttagctatacaacatatcatataagcctttatgtgaattcaactataccaaattgggatgggaatgagggtaagtgagaaataataatttaaatatatgacaagggctgactatataatttgtagggaccagaggaaagtaaaattgagagactccctattcaaaaattaagaatttcaagacagtgatagcagagcattgggccaagcacagggttcttctgagtgtgaggccctttacaatggcacagaatgcacaaccatgaggtcggccctggactttcttactcccctgcatatctaacatggtgaataagttctatgatcaatatgatcttaattctaaaatatatgtcttgtttacttggtttttgttcactttggccgctaaccagaagcgaccttattttcatgggcataaaaccatatatgcaatcatttggcttaagggattttcaagggtagttgtattagtccattttcatgctgctgataaacacatacctgaaactgggaacgaaaagaggtttaagtggacttgcagttcgacgtggctgtgtaggcctcagagtcatggtgggaggcgaaaggcacttctaacatggcagaggcaagagacaaatgaggaagaagcaaaagcagaaacccttgataaacccatcagaccttgtgagacttactcactatcacgagaacagcacaggaaagaccagcacaggaaagaccggcccccatgattcaattacctccccatgggttcctcccacaatatgtgggaattctgagagatacaattcaagttgagatttggatgagacacagccaaaccatatcagtcgtttttactctattttcccattacacactggtttcctaaagcctgcaggaggtgaaagctcaccatagctgtcatttctgctgagcctttgacagtaggagtcaaccttgtgcccaagtctggatcacatgctttgcagtgagaacttcattcaagccacacagcaagcctgcaggataaataataccatcctcattctctagaggagggagaaacagagcctcagagcagggaagcaatttgcttaaagttacccagaaaataagtggcagatttgggattcaaatacgggtctttggagcacactgtccacattcattcactgatatcttaataaatggttgttccttccaactctcttctgcaaatcttgccctaaccttttgaaatgaagaattgtttggcaaattaggaacctgattttctgcatcctggtagcagagaatggcttgccaattcagttcaggcacgtaatgctggaggcagagcaacagaagagcctgaaagtctgacctgtgcttctagagctctgattgccacatgatgaaaactcagggctgacatcaccagtctccagcctcccaaacatgagcccatgtggagagaatgttataaagaggaaaaaaataaaggtcatgttagagtgaatgataggtataattaatgttactgacaatgaaaagcttaggtgctgagagaaaaatgagtcagcagtgagcttgatgttgaaactacatgctgccttgttgctcaaatacttacctattaggaaaaaagagcaatttcctgatcaatgcacacaaaattctgggttgagaacactaagtgaaaagtgggaaaaaagccacttgtgtgttttatttccagcatgtgcacagccacatttatgcataattttgggtttgtcattcccctttatgagtttttgtgatctcagtgttttagcatgaaggcctttcataatctgatcgtatcttccctttctatgatcgtcctccctagtctcttctctaaatatccaaatattacttcgtcattccagaagcagctctacctagacatgaagccttccctggtctccaaatcagaaatgcaggccatgaatgggcatgagctgtttgttgaatgatgagaaattcagtttattccctgattttaactgggaatggcctcattcacctctccacctggcaggcatctcctctccatattgactcaatcacctctttctccaggtgtcctcagcacttacttcatacatctattattgagctcaacaagatgcactgtacgacatatctttccattcccctaataatatctgatgtatcactgaattaatacatgggggtgtcttccccattaaaccatgggatttgtgagagtaacatctttatattgctcatcgttgcagctccctctgtgcttggcataatattttgaacaaaatatgtgctcaataaatattaactagatgtatttacatccatcaggattgcttttaatgattacagatctggcttttggtgcctcttgtaaacagaggcagtctgattatttgataacacaaagatcttaccagactgcaggaggggtgtgagggaaaatatgttctggactgacacagatgctgctgaattaataattaaaaattgcgtgcgatgtataaatgatagaacatcaaattagaaaggacaacacaatggtctgtttcctgttgaaaaagaattatctggtccactaatgaagtagagccattagtcttggccataggaaat

SEQ ID NO: 1881492 - DNA, 4001 bp, Homo sapiens
tcatcagccctgagtacagactgtcaggtggggatgcagcctccctgaagggagggagtcggggagtaagcacctgcgcctcaccctcctccctccatcctgccaatgctccccattcttcatccggaacagcttgttggtataatgcatgcccatcagcctcccagggtgttcagcagggtggaggggctcagcaaacacaggcggcacaccagggcagccttggagaaggagcaaagtctcccagggagagagaatccagtggtggggaaggcctgagacaggcagagatgtttctttgtcttgtcaagcttctccccagctgtctgcaccccagagtcactgcccagctaacaaaggatctctctccacccgtcagtagctccactgccaaatcaggggccttaggaatgagtgcagagacagacagacagagagagaaagagagagagagagagagagagagagagagagagagagagagagagagagagaagaggagaggaggggagaggagggaagggggaaaggtaggagacacttcagaaacggagtgcccactcgcatacaccacacacatgcacacacaccacattctactttcctgggccttatacatgagggtgagaggtgacacagggaccagagtctgaatccagcagcattcctgaggctccttatgcacctgcctatgcagcccaaacttcccagaactgcccctctttcagggtcttgattattgatttgcagagtggcctgtggctatccttgcatgtgacccttaggtctcaccacttctgtcagaggactcctctctgatggcagctcactttctccagctgcctgtaggcatttatcttgtgatgctgtttcacagccattcacagccacaggaaacattagttctgcttccgaggaatggacaatgctgggcaaattactttttgcagcgagcagttaagataattttttagtgatacgaacaggactcagccgatggtgttcaaaacagtcctgctggagctgaactgggagccggcagatggcttctctcctaactcagtttgactgagtgagacatttgatttgagcttctattaaagaggtagaatgtattaaattgttttgatgatggttggccttttttcagtgaaagaatgtaactttttttgtctataaaagagtacacatggaccatttccctcttctaccccctattcagtaaggcccaggccaatttcttaagtgaaggctcaggacttactaagtcacttatttttctacaacgtttgcaaaagtaattgctgaaaaatgtccaaatgacgtgagtgtatttggacaatgagaagggagatgggtttccttcctaagggtcagaaactatacccatctccctgctaggttcggtcccctgacttcaccacagtgggagctaagtgaattcttgttgattgttaaaaggaaaggcaaataattttccagtgttgttttctgttgggacactgacgtgatgctgatctgtaaggcagctctctctgtggaatcaccaccacctcgcatccagggagaattaattcagggcacaatggagacagagacccagccgagatgacaattacagggtggcggagtgggtggggcggaggggaaagagcaggaggcagcgtttgcttttgccttctgatagtctcgcctggaacttggacacttctatattatccttctagtctgtaaaacagtagaagggagtctaaaggaagacatttccacttacctgtctaaatcggtttgctaaggactgctgtaatagagatcaccaactgagtggctgaaacaacacagatgtatttcctcccagttctgaggatgagagatcatgctgtcggcaagactggtttcttctgaggcctttcccttggcttgtaaatggctgccttatcccagggacttcatgcattcttccctgtgtgtgtatctgtaccctaatctccttttcttgtgaggtcacctgtcagattggattagcgcccatcctaatgaactctttttaacttaattacctctttgaagaccttatctctagtcacattctgaggtactagagggttaggacttcagcataagaatttgaggggacaaaatccagcccataacattgccattgcctgtttcactccttagccgagtcttttgcttgtggcctagtggttgacctagtggcagggaggcgcagccttctaactctgaccgtctggaaatggctctgtgattgcacagtcctggcagtcagctgtatcttgcatcctatggcacatgttcttcataaaagttacatgaagactttaaagttaaggcatgttttcaaggcctgcttatgaaaggaaacccgtaataaatactttgtaaaattcagaattgtcttctaatttatttacttttgtaagttcagatttctgggtcaacaattttcttttcttttcttttctttttttttttttgagatggagtttcactcttgttgcccaggctggagtgcaatggcacaatctcgactcaccgcaacctctgcctcccaggttcaagcgattctcctgcctcagcatcctgagtagctgggattacagatacgagccgccacgcctggctaattttgtatttttagtagagatggggtttctccaggttggtgaggctggtctcgaactcccaacttcaggtgatctgccctccttggcctcccaaagtgctgggattacaggcgtgagccaccgtgccaggcttgggtcaacaattttccaagagaagggcctatccatattcataaacgccaacagttcagcaaaaattttggaggtcttgctacatggtaagctcttgctgctgggcgcttaggatacaactgtgcacaggacaaatgagggccttgcctgcctgcagtttcatatttaacagggcaaacagaagatgagacacagaaatactaaattgaattttctttcttttcttttttgttttttagagatggggtcttgctatgttgcccaggctggtctcgaactcttgacttcaggagaccctcccaacttggcctcccgaagtgctgggattacaggtgtgagccaccagaactggcagagttttctttctgcattgtagtacagtgcatctacccattcattcactcattcattcattcagtaaatttttagtgagcacatcccacctctcaggccttgtcatgtgggcagggaaaacactggtgaagaagacagtcatggtctgcatggctcttacatatgagttgtgaattattagcatattgttttgtagatgcagctgtaatagatttataaaattgagccaaatattgtcacaactaggtgtagtttgggaaaatacttcttgatgaatctccctcctttcttccttccttccttccctccccccctccctccctcccttccttccttccctccctccctccttccgtccctcccttcctccctcccttccttccttcctgttgaacaaaatttcagagatttgaagtgtttttgcagattggcttgtggaagttctacagtaccaccagtggtctttcaagcctgatatgctttcatttgatttcctttttgatgcaaaagaaatttttaaaatgtactaaaatcagtggcatagaaattgcagtaagggatgttctcaattagaagtaacccataagtgctgtatatccatgagccaggaacattcgtctatttagccaagtggaaagacaagtgagacgggggttagcaaaaaatagataaatatgcatactttcaaaagagtaattatatttttacacctcttcaagctgtcctattttctctgtctcttttttatgtggcaatgctaaatttaaagcaaatggaaaaacaaccagactgaatgttacaacaaaggatattgtatcaaacaaactaaccaagacaagtttgttgagaaggttttaattagttgag

SEQ ID NO: 1881493 - DNA, 4001 bp, Homo sapiens
gtccaggtgtctattcacagtatataatcactaagcttggtaaatacagaatgaaatagcagacgctgtgaagagattgcatcccttcttgctctaagcctaagatcacaactaaacaaaagatcttgtatacctcataaatattgtaccaaaactttcttgacatggcattttcagaggttagttagatacaggatcttgagaaagaaagcaaaattatgaatttagaaaacctcaaagtacaacaaagcaaaacttgggaaaaataaataatcaaacagcgatttagctagcagaacagtgttaaacatattgcagatttgcacatacatgtatagatgtctgaaatatctttgtgtccaagaaaagaaataaccaagagtaggaatactattagtaataaagaatactaactatttcttttctcactgtctgtctgtgtgatcatgggcaaataacttatttggacctcatttatttttacatgtgttttaaaacttacaaaaatgaaagaatagtaatacttgaagtgaaatatttctaagaacagactgcaaaacagcatttttaaaatatataatactaccacacacaattacaaatgtcaaaaattagatggattttggtcaaatataaaatattcagctagttattggttcatactaataaaagacagctcatgacagaattatcttttttctcatttagaattaaatatccacagctgtagttacacaaatgcactaaacttctctttgcagagtttgcatattattcaacaaatattttaatggttaacaccccaacttggtcaaaatcagagagaaaaaatgtttaagacaaatgatagtgccagaagcacatgcaacagctgacaaaagaaaaatgataactgccgttcctaattgcctgttaaaaaccagaaatgtttaagttcataagtcaatttttctttgtgaaacatggagtcaacagtttgcaacattaaatttggaatattcttgtttgcattagtaataggggaacatccctttatttggaaaaaggtttaatgtattttatttggggcctgatttatcaacaagtcacagagtcattttacagaattgtgctgaaattaaatgaaatgcattgaatgagtacagcagagcactacattttgtgaggtacaaatataaaacatattatactagacatataaacataacgattctgagaaaataataatatgtgaacacatgtaacatagtgtaggaaaaggagctgttgatattaaatttagtagacaaagaagataatatggcataatggattggttgagaaaagaacagaattggtaagaattgaaacgtgatattaaaaagtagaaagtagtgtaattatggtagatttttttcatatgagagtattggttggatagcttttcatgaaaaatgtctgtaagaatatacattagatttggcaaatgtattagttttctatagctgcagtaacagattaccacaacttggatagtttacaagaacagaaatttggtctctgacagttctggagactagaacttcaaaatcatattgtatttagtagataaagaagataatatggcagaatggattggttgagaaaagaacagaattggtaagaatagaaacatgatattaaaaagtagaaaatagtgtaattatggtagatctttcatatgagagtattggttagatggcttttcatgaaaaatatctgtaagaaaatacattagatttgacaaatgtattgattttctatagctgcagtaacagtttaccacaacttggatggtttaaaacaacagaaatttgttctctcacagttctggagactagaatttcaaaatcacataccagcaaaattggtccctacagagctctgaaggggagtccgtcccaagcttctttttctgcttctgagagttaccagttacccttggccttctttggattataaatgcgtaagtgcgagctctgcctacgtccacatgcagaaatctttgctctgtgtctctgtctcttctctttttataacaatagcagtcattaagggcttactctatgcaattattgcttcatcttaactaattatatttgcaatgactctgtctccaaataaggtcatattcagagattctggtggttaggactttaagtgttgagaagggaaatttttacctataacagaaagtaaatattttatataatagggttgtataatatcaatattagcttgaagtttacaggaactcattagatgtacagattaggagaaaagcaattttgaaagtggaactttgggattatttaattgtttggagaattctacaaaaatacaaatatgaggtaattaaaacatatatagtagaaatggaaagaacatattaaaccagtctcttgttaaagaatgatataccctaatagtactgctgcaaaacaaataaaaataccaagaaactataaaaaaaagcataacataaaaacataactttgcatctatcaatgatatgaaaaataatttaaaaattctcagaggccaaacggaaagtaaaaagaggcaaagattctaaaacggtcgtcaaattctattgattttaaccttcaatttttgctaccgtgtagcagaagacaaagtgtagaaactgactttatgggaaatctgatagaagactcaaaaaacaaagctgacacctgtaaagactattctcttagtatgactgtgaactaaagaataatagcaaaataataatagcaaaatttgatgtgcaaatgtgacttaaattattgattttatttcttttctaaaaacaatattaaggctatgtaataaatttaaatcttttaaattatgcatgttgaaatgctgatggtaaacactttaaacaaaacaaaaatagtgtatttaatttctaaattagaggaagaaagtagaaaaagaaagcaaaataatatcaaacaaaccaaagttattacaatggaaagaaaaataataacataaagcaaaataaaattttgagccaaagaaagttgtagaatacatacattgtgatttaatttatatacaattccaactacaaagccaagtaagataaaaaggaatgcacatatatattccaacaccacataaaaaagaaagggagtgattaacatagaattggggtaatacttctctcctgaacagagaaagggaaaaagaattggaaaggaggcatacaggggatctaatattgaaaattaggaatttgtattacccgcatttcaaagaagatatacagttatgtgttttattatttgtatttaaaattaacaaaaataatttgtgcatattcaaaaattaataaaatattttaaaagagaataaaaagattgtaaaattatactaaatttagagagatacctttgccaaaagtggaaatttgttacaggatttgttcgtatactaacattctcaaacggcgatttttgtccttcaatgtcactttctggttgttatgattgtttctagacagaaagttgaggtttgatgcagcaagcttgtcctcctctaaaattgctttgcacagtctaccaagaaatctaattttcaggtgtagtgaactcatcatagaagcatatatgtatgcatatataatcaaatatataaatatatatttccaatcaaattagacaaagacactgtctttaatgataccattatttagtatgctttatggttcttagaaattatagatttgtccccttaatctttggtagagtcaaaagtaatgtcttattagtgtctcttgaaaactagtaagagacattgccattgttcttaatcttttatatgtttcacttaatctcattcaatattataactttattcagctcttgtaaaatttaatatagttgaaatgaaggagatatatactgaaagatacatttttagaaggaattatggaaatatgtatatatgttctattcactgataaatacata

SEQ ID NO: 1881494 - DNA, 4001 bp, Homo sapiens
gaagttgggttacagtttctctgtttatcattgcatgataacaattcattacaatatgtgagaagttggtttgaaatgattgagaatgaatggtctaacatttagcttgttcatatatgtattttatataggcattttattgctattttcatcagctacatctaatatcactactactttgtaaagtaaaataaaataataacaactaactgctgtctttttctaagggtcttctgccaatcactttatgtttattattccattaatcctctcaagacctgtataaggtcttgagaggattaatggaataatcctctgaacaaagtgaaattgaaagaaatgatgtcttatgcaaatatcacaaagctagttatcataagacatgacttgatctcttgtcgatgtacttcttttcaaacatgaactttgtatttttatgctccatagcacattctaaagggtattatgcaagttattccaaaaaaaaaaaaacctccattttcctttcatggaaaaaaactgggagtatggacaatgttatgactcagactgaaacaacacctcaaagccattttaagtggagacatgtccatgttccagctcttggagatatttggtctgggtcacctgttttctctggtggcattcccgtgactgcctgtatggcagttgttcccaccacggtttcaccagagagcaagccctgtgtcatatgcttcatacagaagatgctcacatttgtaatacttttgacaatagtaaaccccagtcaagaaagaaaactctgttaaatggtatattgcttacttaatgtgaactctttcaatctgtgtgtaaaattcaaataattcagtaaatgagtcattctttaaattaagccttcaatcgattaaaattgtttttcaattgaaaggaatcctagtttgaattaaatgtgtgacataatgtcaagacagtgtttaaatttcttgaataaaaaaatggtaaactcacactgaatttggaatttgattttcaaaactgatttaaaacaactgttatctacttgtagctaagcattttaaatggtttgaaatattattttttaaaatcagactaggtatctaaattacaaatttaaaattattttgttcaaaatatcaatgaaaagaaactaattttgtattagttagatatatgctaacatttaaaaagtatacaactgaatttcttcaggtaaaacaggaaaattcaatccctaatttttatcaatcttttgatttggaaatgtgacagtaattgtaaatcttgttgacatgatttccccatgttctggcaaatatttgagcttgtatttaaacagccaacactcattatctgttactctggtttccttttcattttggggaatatattcttttttcttgtgttgcagggtcattctaactaataggtttgtattactaagtatgaagaaggtgactacatagatgatgttgatagcatgccatcatttttatatttataaaaagcaattttttaaaggtaagaattcttaagtattataggattagcagtaacaggaatagatagtgtctgtcatagcttaagctgagcaagggaacccatttctgctttctttttacatttgtttagctttagcagtaacaaagcactatttgtctaacagatcctcactaggtaagaggctgcatccagcctatgatatcagcattttcactttaaaatttatttgattgataacacagtatcccagatgttgtctgatatatcttagctcagtgactaatatttattttgaaatgcagggcacaataaatcagaaaaaattaagtccatttattttctattaaagctattcaaaataatacttctaattgaatgatgacaataggattgagggaacaaaagaaagataaaatgttctataatccttctgaccaggtttggctgcagatgacctcttgttctttctctgatttctcattgttccacaagagcctgtacagaacagaacaagaattctttagtctctctcgtgcagcattaataatgcctcttatctcttatgacattgacctataaataaatgggagttaaagactacacagcacaagatcaaaagtatattttatgtagtgacagcctaaccatcagatacattaaaatattgaatatataccaatcctaggtcagtaagcaatttctggtatggaataataataaaactctcaatatgtgagatatgagtgggaattattgattaggctcaattaaaaattagtgttcaagacataaatttttttagatttatattaaatgtccctctctatttcttgtacaatggcttgtcttgaagtttattttatctgatattaatatagcaacactagtttgcttattattaatgtttgcatgggatacattttaatattttacttgtgattcattcatgtctttacatttgaagtgcatcttattgaaaggaataattttgtatggtttatcattttttgttttcagagtttgggctggcaatttggaacaatctgtacattttaattgaactgtaccttcaatttatatttgatgtaatgcagttgtatttatatttacaattttccatccatatctattgattcattttttaattttcccattttgtatttatcatttttattttcttgaattgatcaactatttttttaatattccacttaagttccattaatggactttctgccatatcattctgtatctattgtatgcttgctgttgggattattttatgtttgtttacctcagtatagggtcaatattttaacactttatgcaaaatgtatgaattttataatatttgtatttaatttacctcaaatttgttgtaccatggacatatattttgcatctacatgtgttaaaacataatcatacaaggttacatttttgtattaaattataacttgtatattaaggtaattaagagaagaataaaaagtaagtcttttgcatttattcaatgtatttatctagtctcagcctctcttttggtcagctccatttggagtctgaaaatttcttatagcagtttttgtggtacagatcttttgatgataaattgttttagctttcattttctgaaaagatttttaattcaccttgctttttcaaagcattttgactggatatagaatttttgtttcttttctttcatttgtttccttgttcacttttcctataagcaccttaaagatgttggcccattccttgtgtgcttgcattgatattttctgattcttgggaattcgaccattatttgtgtcatttctattttactctgactgctttcaagatttctatttagttgtcagcaatttaattacaatatgtctaggtgtgattctctttgcatttggcctgctaaagggttcctgtacatctcgaatctgtgaatttgtatttttcttcttctttgggacatctttgccattacttcctcaaatacacatgcacgcatgcgcatgcacacacacatacacacatatagtcccctgtcacattctctctttcctaagaatctaattacacatattctgaaccaactggatacaggcatcaaatttacttttttttcaatctgttttgctgcctgtgttgttgcctgtacttcatattttatagtttttttgattgattaattgatttttagaaacaaggtcttgctctgtctcccaacctggagtgcagcggcataatcatagttcactgcagcttctgactcctgggcccaagtggttctcccgcgtcagcctttcaaatagctagaactataggtatgcaccagcacaaccagctaagttctttaaatttgtgtagagattagggtctcacaatgctgcccagactcatctcaagttcctggactcaagagatcctctctcctcagctgtccaaagcgctgatattacaggtgtgagccacttcacccaattgtatacctt

SEQ ID NO: 1881495 - DNA, 4001 bp, Homo sapiens
cccgcctcggcctcccaaagtgctgggattacaggcgtgagccaccgcacccggccgacacttgttgttttaatggtgtatagcataaagccaagaggggcaatatcttgcataagaagccctggggcaaccaatggcagttatcagtggtcccaggactcctggaagcaggttttcatttttttctttttcttttttgagacagatttttgccctgtcacccaggctggagtgcagtggcgcgatcttggctcactgcagcctctgtctcccaagttcaagcaattctcctgccttagcctcccaagtagctgggactacaggtgcatgccaccacacctggctaatttttatgcttttcatagagatcgggtttcaccatgttggccaggctggtctcaaactcctgacctcaaatgatccccctgcctcagcctcccaaagtgctggggttacaggcaggagccactgtgccaggccaaaaggttttcaaagcctctacagtgaaggagttttttgagggcactgacaggagtgcctattgattttaatttagaagtaaaatttgtaaatgaggaatatgttgctgccagaactcagaagtactaagaaatattggacttaactgaccttaatggttgtaaacaatgaatctccttggaagaggatattaatgtagtgtcatacctgtgttcctggagaaagtagatgccattaagatcttgtttgagaatattgtatgtgatgacaaagctgttgggaagtatcccattggtaacccagaaaggtgtattgtgcttcttcagaggtggaggcaaactgcagctgtgaaaggacgtagaaataggaactgaatggaacaggttagccaaatctataagagcaaactatgtaccagatgttgattgggttgaatcaacaatggtaataatattagttattgagtataggggtcctaatgaataggatcaccgtattaaggttgtagtagtctgtagtacggcaccttttgtatgtctacatatatatatatattttttcttttttttcagattcgggaacagagaaagattggttgctaaatggaaaagcaggagggagaattatccctttaataattaggttttatatacttagttttaatcttgaggagcccatttcaacttatattgggccatattaactattaactgggggggttatggggtcccattttatcaatccaatttgtaagtgccaaaaacttactttaaatttattacttactgtgtcagagaatctaagtccaacatagaatattttatagcaatggagtatatgattacgggaagtgtaggcatggccatagttaaattgaggaatactcatttttgtattttatacaggcaaaatatagaagtagaatatttaaatttagtgggaccccagatgtaactatagtttgagtcctggtattaattaagcccatgcattttggtcaattagtgcattttagcaaatgttaaaagttaagttagaatctctattgtggagacacaaaagccaatcagtgctgtttatcgtttttatttattattaacaaaaattctttagtatatgaattttgactttccaatgaaatcaaattatggaaaatatatatacaatttatttattatatatttatattgaaatattgtgtttgcatatgtatgtattaatgttctatatataaagttaattaaattaattaccttttattttcctcacctcttcttcaccaacacagtgaagctcagtgtcatatcacactttccaactattactgaggggtcattgctgctttcctgaaacctggtggcccctgtctataacctgtgaaatggtggtagagctccaccatcctggccagctcactctagcaagatactaggacttcaccatttataatcaatacagtaccgaccactacagagatcccagggcattggaacagtatacctgccacaaggagcaacacacattcaaatagtggcctgctgcacagggtcctttgagatcccaagaaaagctaatgatgtcacaaaggaaaacacaccctgattatattgggacttgctctctgacagcttcaaaagaactttaagagctcatagagctgtctacagccaccacaatttcaagcaaatccccaaggcaacacctgagagcagaagtaggcaccagtgcgaaatagcttgattgaatactggcaagtagtagtgccatcagataccaactggaccatctgatacgggaaataagtcatccattcccagtgggcagacaatgatattgtatccaagctttgactataatcataccttctacatcagttgttttggataaaactctttgagttgatagctattgttttcagcagctaccagatgtccagacagaagagcatcacccagggattcacctgcatgagtctcctttcggtggcttcacagtcaggggtcagattgcaggtgtggcttcagtgacacaaccaccacataatagtttaagagattttagtactcacagaccctggagggtacatggcatgtcaggaagccatacccacatagagggggttctggtagagagaaagagaagggacccatgtgtcagtgcctttattgggtccagggcattatccaaacaattttcctgtagggaaaccaccagctgtaactggtggttttaaagcaagcagtcattatttccaggaggttacgctgtgactggaaggtaaacacttagaattcacaggcaaatgtctgaatggtctattcaaaataagtgagagaaaagctgggagcccagcctactacatgggagagatgcctctaagtttttatctctggtcactggctggaaccatttaggtgagtatagtataggaaactgtgccaagtgtgacggggccctatttctggtaataaaaagttaaacttacattaaaaagtggttgctaaggcaacagaaagttatacgcactctacactctccaccctccacacacatattttatgcttttgatgtcaaaatttacatcattttataatgtatatctcttggcaatttatcttacctacaatttttattaatagttttacacaccatcattacagaactatagtattttgaatatggctctgctctacgtataccattgagttctgtgatttactatgcttcatgttattaattagcagccttttgcttcagtttaaagaactccatttaacaattcctataaggcaagtatagtgatgatgaactctctaagcttgggtgtttgtgtaagaaaatttttattactgtctcaatatggaaaaatagttttactggataaagtatttttggttagcagttagcagtttcccccacccccttcaagactttggctgtatcattccattctctcctgacctttaggatttctgctgagaaatccactgatccactgatagtcatattgacacttttatatttgatgtatctcttacatcttgctgctcccacaatttttatatgtgtttaatttttgatagtttgattattatgtgttttaatatactcaatttgagatgaatttaattggagctctctctgcttcctgtacctgggtgttggcatctatcctcatattaggaaagtcattatttatttaaatatggtttctggccttttttctctttcttctcctccttatgcaaaagtttggtctcttgattgtcccataattcctgtaggctttctccattcttttttattcttttgtctatttgctcttctaaatgaataatttcagatgttctttctttcagctgatttttttcttctgcttgtttgaatctgctattgaagttttctgttaattttttttctgttgttcagtcattgcattcttcatctctagaatttctatctggttcttttttattgtctctatttctttgtcagtgttattgctgtttccatgaaatgtt

SEQ ID NO: 1881496 - DNA, 4001 bp, Homo sapiens
gtgtcgaactgcacttcccttcccgctctgagccaccgaacaaacttggccatgcccggaaaggattcccgtgctcagggaacctggggcacaggagagggtggataggcgcgaataagcgggctccaaaaagtggtgtggcttggcaatcctattcgttcttggcgggcagaaaattcagtgcgaataatctccaaataccctggttggagaaaagataacttgtagaaagaatgtgacggggatggccaggtcagataacaagctcgggtgttagtgagcgtaatctgaccgcagaaaagctgatgggaaacctgggcttcgcgccgcgtcccgcttttcctactttcccattccattcccatctcccttccctttccttcccttctctaccttatcctccattcccttcccttcccttcctaggcatttaaataagaacaaagattacacccacaaaaagaaccttgcctaggagcgcgtggaaacagcaagggcgcccgagcgggagaggttccctcggtgagggggtccgcgcagcggcggaccccgcaccccggcccccaacggcgcctaggaagttgtcactcctctcatttaaagcctcagaaaaatgcattcatgagattgtttctttatttttcctttctgcccctctccgcattctttgcctatttgctttacggcttttcagccttgttgaggccaagaaaagaaaccaggttcttttctcttgcgattggatccgtattcccagttagggcgccttttgatgtccccatttagcgcctttgactggtcagctgaatggggccgcctgcttttgtcctttcccacaagtcccttcagaaagatccctttaaacgcccggtacccgctgatggatccgttttcaaacggcgcggggacggcagtgccggaggccgcgtctccttagtaatcgcgcgggcagggctcggcaaggggtcgctgcaagggtcgcgctcacccgccccgggtttgggcgctgggggtggggaagggagagaaggttcgaacagttttgtctctcccgcgccccggctcccccagggtgctgcgcctccagccgccccgaggcgcttcccccggcgtccgcgcgctcctctccgcaggggtctcgcgcccacggtgccgcagccgcgcggctcagccgccctccgcacccgcgcctttccagcgcccgggttcccaaaccatcgctaaaggcggacggggggcgccaggagtaacggctgctccccggagaccccaccgagcccagcgcccgcccccgccccctgggcgccctgccccattttctccctttcccaactatcccagacccccagaagggccagaattttccagaactgtcccactccacccgcgcccagggcttctgcacattgcccttggcaggacgcgagccggtcgaggggcatttaggggtggccctgcacggccctcactgctgtcccttcttctccctccgttctccgggccagggtcctcggagaccccgttccgcggcaagtacccctcccccacccccggaggcgggtgcagtgcagggcgggggcggcggtcgcagcggctcagaagccgaccctccttgaacccgaagctgccctggcccgagtatccgcactggcctgggcccgagcgaggctgcaaccctgtgaaaccccctgcaaggcggaagcctccaaacccaaacgaccccgagggcgattccgccagaaatccaacgcgggcccaaataaagtccgaggcctttttgtcggaagcccgggaggtgcccggccaaggtgtcccctgcccggccaaggtgggggctcgaaccctgagcggccgcgccggctacttacgttgaaggtgcgcgcattccagacggctctgacctgcctccgccggtctcgattattttatacatttctcggcgatacacttataaacaagtggaaattttgcatcctactgcaccattttatacatgatgagccgtcagtaataggattattaaacaaaaaccgtctcaggcgctggcgttaaccttttttaaaatggctaattaggttttggacagaaaaattagatttaacattgcttacattgcctacattttcagttgatgctccggtaatttcggataggccgggctgccgccaaacaaagagataataaaaaattaactattttaacatatattacagatctcctataccaaaataaggcaaagaatattttcatgatcaaatattatatacataaaactaattatcttttttcggcagcctccatcaattaccggggagggagggagcgcggggcggcgcgcgccctctgctggagcgcgcggggagcaggccgggccctcccggtgtggttaaatgaatggtaacacgcatggctcgtccgcctctctgcttcctctagacatcctttggctgttttcatcgctcgtgtttatttcctactaccatcaagagtagtagctcgtgacagccttaagcatctcggtaaaaataaggtgcctactaaattaaaatgtttccctaccagcgattttacgggcgacatggaaagtcaggtgtccaaacacgtaaggccctggttttgccatgtaaagccagcctggttttgacagaaaggcccatcgccgagtttatctgggccttttatttacacagacttcagtgccgtgccaaaaataaaaataaaacaaacaacaacaacaacaaaaaccacatatccagtaggctagatactatatagagagtattcccacgttgtctcagattaatttaaagaaatcctaaaagggcgtctttgaggcgtttgctggactcacaggagcggaaccaggtttccaaatggtattgtttacaacaatactcaatactgcgctcctgctctttgcctagaggtaaacgtgtccccgaggccagatgttcttctattgtgcacaggcccattgacttggagccttgctttagggataggatctccgttttactcagaagggttggagggtgaaggtgtcctctccttgggctttgctcctattcacatgaagcaaacagctgtgggacggtggagaaagagcaattagggagaaggatatttataatcccttaaaggggcaaaatagaataagagacccaaaagagattatttgaggtgttaaaggtaaaaaaaaaaaatcaaataaatagaggctacagaactgcctataataaaaattattttagaagagcttaagtccctgtcccatacttgtatataacactgctacagttataaaccatagcaatctcttttgaatgaatgacgagttcagaccaagggccttttattcagtttacccagtttcattattgtagttcatcattctttaaatccttcaagccagtcttacaaataagcacaaaaaatgaaaaattaccagccctgaaatgttttattagtttgcgtctccccaaggctacataatgttatgcaagtgaaagaccatgaaatcaataaaatctcctagttttctgctggccagtccgaatggctattggccttgagcacaaaagtccacaaggactggtaaggtcgattttgtgctattttggtctccacgggctgaatttcaaaattcaacaggaagcactagcagatagcagatccttgggcttcggatttatttgtttctcttgttttacagaaagaccagcctcagtgacagtcacactgtatggaacagattcaactggcccactcttttttaataaataaatgacattaaagagtctggcagttctgggaggcagggttttatgagctaatcacacccctggggggaatttggtagtgtgtagtatagtctcaccctgggggtgtgattaccctatggtagccacacccacccatcatgctttatttcttaaccaataaatcactacaaatgatgtgatctgcacagccatatatctcaggcccctccttgcacacac

SEQ ID NO: 1881497 - DNA, 4001 bp, Homo sapiens
atgggtagatgggttgataggtggttgtttgagtaggtggatagaatggatggatagaagttttatgagggtatgggtgaatggggagtagtggataagtaggtgaagcagtcaatgggtaagtgagtgaatgtgtaggaggatcatgcatgaatgggtgagtggatgtcatgggtatatgggtataggagaggtagataagtatgtgtacagatgggcaaagggaaggatgtgggcgtgttatggggtggttgggtaggttgacggatggatgggtggataagtattgtgttacatgggagaaaacaagtttagttaggttgatgggtgaatggatgagtgagtagttggatatagacatggaagctggctagctgggtggatggatgatgggtgagtgaatggatgggtgggtgatgaaagaaagggaggacggatgggtggatggatggatgagtgagtgaatgaatggataggtgggtgaatggaataggtggatggatggatggacggatggatggatggatggatggatggatggatggatggatgatgaaagaaagaaagcatgaaaggatgggtgggtgaatagaataggtggatgaatggatggatggttggaaggatggatagataagtgaataatgaatgggtggacgaatatgtggatgaatggatggatgggtggatagatggatgatgaaagaaagaaagggtgaatggatgggtggatgggagagtgaataaatgaatgggtggatgaatgggtagatggatggatgggtggatggatgaatgaatgagtgagaggatgggtgggtgatgaaagaaaggaaggatgaaagggtggacgggtaggtggatgaatgtatgataggatggaagctggctggatgtgggggtggatgagttgaatggacagatgggtaagagggtgagtaagtgggtggatggtgaaggaattaataatgttattattataaacattattattattatatgaataagtttctggtttagaagactagtatccttctgagagctctctcagagtgtcaggctctacaaatttgcttccttgggctgcccctctctgggttgtttccccatttgctccatgagtgtgaaggagtagattggccagattagctgcgcctgctccaggggcccagcccaagcccaggtgcctgggagtcacactccaggacactcgacccctgccctctggggccagggtcagcagcctctggccagacccctcttcttaaaacaagctcaggtagggagagaacactgccctgctggtggttgccatggaaaatccttcattgcttgtttttctcctcgactgattaagaaaagggagtcataaaatgacagggcgtcactgggccttgccgctggccagctttgacttatcccctgacatttcccaggagccagctaaccttttctgccacaaatagactgaagcgggtcccttgaggcagtctagcctgaacagagtccatctcaggggaggtcaggacccgggatacagcaacaggagccgggtcattcaaataaccaggaaggagagcagacagtgctgggaccgagagcacagcgaggaccctaaggaagccaccaaaaaacagccttcgcaacagtcaggactgctgtcaggaccaccaggcagagcccagggagcaaacacctgctctccctccctggggtccccgctgtgttcccaggcatgacactcacctcccagagcagcagcctggcctctgctcctctccgggcagaaacgacacagggatgctccccagtcagtgtgctggggtcctaggggcgttggcgacgccggggcaggttccaccatagatcctgctgcctcaatccagagggctttcggaaggcgcccctgctatggcatcgcagagggaggagacccgggatgtggcccagcagggctgtgtatacaccaagatgcctccgtctgcccttccagctgtaaatcaagactcagccgtggagagggaggataaagtccacaggggctgaacctcctccccagccctggtctcagcctcaggatagaagactttaaccccagaaggccctcaggaggccaggcaagccaacaccctcgaacctgtgccacgatggggggcgatggggcgaggacagagcctggagtcacagaccaggaaactgggttgcctcagctcacccagggtcccaaggccaggacagggcagagccgagaccaaagtccctgcgaggccgccctcatgaagggactcgggagggttcactgggtgaatggatgagcctgtacagtgaatgaaggccgagcccacggctgggagctgccatccccggcttcctctgaatacagacagcctgatgcgcaggtctcagatctggaagggggcctgggccccttgaccccatctcttcatttactgctggggaaaccgagggccagcctgccacagtaatgccgtgggtgcctgagtcatctcctcctcctcctcttccttctcctcctcctcctcttcctcccccttcctcatctccccctttcctccttctcttcctcttcctcccttcctcccacccgtctccctctcctgagccccagctctgctctgccaccaggccttgtcccttttagggtccaaaagagcaggtcctgccctggggccagtcagcatgaaaagggatgaccatctcttcctccagaggacagggactctatgccccaggcactccaaggtcaaacctggctcccactcagactatgaagacagcatccactgggtcagagtcatgaagccacgggtcccaggggacagctcaggtggccacagggccagactggcaggctgccctctgcctcctgttagcacaaacacccctcccctcaggcctgaactctgacatgagccagtgggcaccgggccctgtcaggaacaggaggaggccacagccatcctcaggagagaacaaaggacacacaggcctccggggagagcagtgggtggcagtgacaggaggggctactcagaattcatgagcgagggccaggcagcttggccaccttggaggagccgctgcacctatccaagcccaggtttccctgctgaaggcagcaccggtgtctcctcctgggggtgttgagagggtcatcccaggccagggaggtcgaagggctctgtgagctgtgaagcgctgggcacctgtggggcgggggcgttcatcctgcggtcagtctgccctggagggcggaacacctacgcactgttccagcgggaggggtatggcgtccagtgaggcccagctccccgagcctttcctgatggcactggaagacaggcagcatcccagaaacatataaaaggcccaggggctggtgctgggggcacatgaccggggcgaccctgggctgggctgtgtacccccggagcactgcagcagacagagcaggggtgcgaactccagggtcccaggatccatctccttccctgcaacaaacccctctctgctggaaatccctggagcggttcctccatcctgctctgaacctccttgactgatcccaccgaccggtgcactgcacagctgcctggagaccagaagattccatacgtctccctccacctgcccaacacccacaagcccaggaggctgccctccataattctggcttttctgcgtatttttcaaagcacagggcactggaagaatgcctgcatgagacattcttgcaagccagagcccgctggaggcatgcaggagagcaaaacctccctgctgtgtctgcagatttgcacacatttctgggaaataaacctgcggcccctcctctccccgagacgttggtttatcttccagggcaaaaggataccgtcttttctgtggcaaagatgggggcgagatggctagcagtccccttagaagatcaagggtttcctcggctgacacaaacctgctctgtttgccccctgagatgt

SEQ ID NO: 1881498 - DNA, 4001 bp, Homo sapiens
taatatgaggagtgtaatgttatggaagaaacaatctaagatcaggaaaaaaatgtgaagataaaaatcattgctaatataaacacccacagttaggtatttcaggagaggaaaacaacaaatcatttcctctactcatcttaggttctccagcagaggccctgtgaattagactagccaaagacagattaattagagacaaataggcagaagttttctcagtggcctttaacaaaaaaaaataaaaataaaaaaaaattgtattccaaagaggcttattttgaagtgatatattccagtacccctcagaatacatttctgtcgtatgaaataatcccatgaaccataaaggaacaaaaaaacagaatgtctgtagatcagactttatttgcaatattaaatgctaagaaaaacaaaggtttacagagctttgggcagaaaagattgagatccaaggcattttagttagaaaagctcatatttatatgctagagcgacagaaagttgtttttagatacactagactgagaggcaatgtcatataaaattctttgtgaaaaaaactatttgactagtcacttaagtcaactaagaaataaatataaataactcagcaaatagaattcttagctctatagagtgattagctttaaaatttcaaatgtagtacttacaagataaaaatacaaaatattaagctaataattaataataacctggatctgaaatctgagattatatcagcaaaacagtgtgaaggaaaaatagtaatgtgaaaattatgccaaatgtagcatctgagctggagggatgtgaatgataatagttactgttttactctgttcatagatgatgagagaaaaatagacccaagtaagttttaaaatgcttaaaatttagaaaattgaactttctgtgtatctgtattagtcagggttctctagagggacaggactaataggatagatatatatataaagcagagtttattaaggagtattgacttacacaatcacaaggtgaagtcccacaataggccatctgtaagctgaggagcaaggaagccagtccaagtcccaaaacttcaaaagtgcagccttccgtctgtggccaaaggtccaagagtccaaaagctaaagaacttggagtctgatattcgaggtcaggaagcatctagcatgggagaaagatgaaggccagaagactcagccagtctagtctttccaaatttctctgcctgattttatcctagttgcactggcagctgattagatggtgtcccccaagattgagtatgggtttgtgtctcccagctcactgattcaaatgttcatctcctttggtgacaccctcacagacacacccaggaacaatactttgcatccttcaatccaatcaagttgacactcaatattaaccatcacggaatcctttccaaatccctaaaagaaaaaataataataatatagtcaatataataaacatcagctagaaaagaaataggtgagcaaaatagagaatctctgacaagatcagaaagaataatataattagtgtaaaacgttttagtagttcaattaaaaactaaagtttctcaaattaaaacattattttaaaatctttacttaatagaaaaagaccaaaagtcaaatgtcagagaagtagtaagaaattttttaaatggcagaaatatatcataaatacaaagaaaaataaggaaataatagcaatcataatgtagaataaaatataattcgagataaaattggtgaagaatcacaccaggaacatatcagaaaaaccaaaagaattcacagaccatttgaaataagcggcttgccactgaaaactccatgagactgccaaaaaactgagtgcctgaagtgtgagagggggaaatccatctccaaacatacatcggccctggagaacctgaaaatccagaagacgggagaagagtttaaccttacctagagctgaaatgaatttagagagcccagtgaaatagaaaagtaaaagaagtgggaaaagaactgcaggcactcttgttccccagggaagccaaggatagccatttctgaatttatctcacaggggtccttgaggagggcagccagtggaattggggaaggtccacagggagaaggagacttccagctgaactttgtaataatttccaaagacgacaaattttcctgggcagagtccagggggttggggtgtggggaacgggaagtacagataggagcacagaagccgcaacaggaagggaagggtgaggactgaaagccatgcttgctctctcagcagggagtcttgtagcctggggcaggatctcagccctgtgcaccagaggcctgggtataaattgggcactgttggctgctgggggagtatggcaggaatgagactggccttgctggtttcatgggagctgggtaaggcctgtcactgatggctttccaccacttacctggcaacctgtaggaagcagcagaggcagccataatctcccatggaacataactccattggcctgagacacaccccatatccctcaaagtggccactgcaagcccaaggagagtctaggctgagacctgcctaaccctgcccccacctgatggttttctctacccttcctggtaaccagagacaaaagatataaacttgtgggagctctatggcctcacctattacctgagacgactgaatatttaccctggccaacttagggcaagcctgtatcccccttctactaccgcagctgatgctctcttaaaagtgccacctcctggctggaagtcaaccaactcaagccattacagcaacttagaacaatcctactccaagaaaggagaaaacaccacctgtaacaccctggctaaccagaggtcctgagtctgtccacatgacagcttcactgctagcaaaccagcattcgagaaaatctgcacactaaacaaactacaaccagcactctcacagagtccactttgcttccctgctacctccactggggcaggtactggcatccacagctgagagacctgaagacaggtcttcacaggatcacatcacagaaatctttgcagacactccccaataccagcccagagcccagtagctccactgggggactagacacagaagaacaataacaatcactgcagttttattctcaggaagctccatttctaggggaagaaaaagaacaccacatcaagggatcaccccataggaaaaaaaaatcagattagcagcccttgagtcccagatctttcctctgaaatagtctacccaaatgagaaggaaccagaaaaacaattctgatgatatgacaaagcaagattcattgacaccccaaatgatcacacaagctcaccagcaataaaaaacaaacaaaaacaaacaaacaaaaaaaaaaacaaggtagtcaggcaacaactagcaggatgaatagaacagtacctcacatctcaataataacatcgaatgtaaaaggcctaaatgctccacttaaaagatacaaaatgacagaatggataagaattcaccagtcaagtatctgcgtcttcaagagactcacctaacacatacagacccatataaatgtaaggtaaatggatggaaaaagatattccatgcaaatggacaccaaaaacaagcagaagtagctattcgtttatcagacaaaaccaactttaaagcaacaacaatttaaaaagacaaagagggacattatagaataataaaaggactagtccaacaggaaaatattacaatcctcaatacatatgcacctaaaactggagctttaaatttacaaaacaattactcctagaattaagaaatgagataagaggcaacacaataatagtgggtgacttcaatactccactgacagcactagacaggtcatcaaaaacaagtcagacaatggacttaaactatgccctagaacaaatggacttagcagatatattcagaacattctacca

SEQ ID NO: 1881499 - DNA, 4001 bp, Homo sapiens
agacaggtctctcctccagagctgacggtggatttacagaccaaagcatgtccccatggaactctcacctccaggggcgtgcctcggaactgccatcctccaggggtgacctaggaactcatacgcaccaggacagcacatcgaaagcatgaccacttggctacttttacaactgaactctgcacaggaaggtgccaactcaactgcctggtaggtaactgaccagaagcagtgggacccctgcccttgctcatgtcctcccttaccctatgaaaatgcccactttttgcaacagaggagaagcggcacattcaaaggcgggatgctttgtgccccttcccccaagctaacttcggaataaattcacttattttggatcagatttccctcgttaactgaactgtacgtgcagtgagcaagtaacctgcatttcagttacaaattacagaagacctggccactcagagtagatagcctcatctagtttcagatgagagagagcaatgaaagtttctgcttttttaaaaaacaaacaaacaaaaaaaacctggcttgtcttgaaactaggagaatcaggtattctacccctttttggcatgacttaaacttactaccagtgtaaagccttaactcgttctcagatacaaacaagctcttaagagcaaaggctgcctgagcagcttattgcacggaggaagcaggagaagagaaaagattatgtgaatatcatgcaagtagtaatgaagaataaaaacaggaaagtattaatcgaagatgtgattttccctatgtaatcaagaattttgtcatgcttactccatgaggcaggtaagtacggaggaaggtaacagtgaccagaagattccctttagtaaacatctcctcagggatctgtgaagtcaggaatctcagctcctgttacaaatcgaaggccattaattaccatggtgtctgaagttgtcaatagcccacccctttaattcccacataatcacttcaattattgtgctcattgtatgtagttattgcttgtctcctcccacagaatgtaagacccatgacagaagagaccatatccatctttttagaaaagtccttgacctgtaatactcattcaaaaatggttatggaattgatgaattctacaacctgaaaaaaaagttaatactctgtcttctgaaaaacaaaaacaatacaaaacaagtgcattatcttcaatggcctgcagtataataatattaaaaactgtagccttattttcaaggtcttgaggacctgaatgatctgttccaaatctagtatcctctgtttctttccaaattcttctgtctagacatcctgtgctccagccacagaaagtactttcattccctcggcttatgctttttttttttttttcttttgagagggagtcagtctctgtcgcccaggctggagtgcagtggcgcgatctcggctcactgcaacctccacctcccaggttcaagcgattctcctgcctcagcctcccaagtagctgggactacaagcacacgccaccacgcccggctaattttttgtatttttagtagagacggggtttcaccgtgttagccaggatggtctcgaactcctgacctcgggatccacccgccttggcttcccaaagtgctgggattacaggagtgagccaccgtgcctggcccaggttattcttttaaactgttcagaccatctcacattgcatccttcgctcatgcactgttttgctcaatctttaccttttctcttccacatcatcttacaagaaccacccaggtggtatgttctcactgacgtttccaccattccccttagaatgaacctctctcctctgatttcctgtggtatatcacaacatgcattttaatcttttccacacttactgtgttttattactctctcctccatctaactggaaactcattgcgaagagagagatttggatatccaccttcctgttgacttgcccagatgtctatcacggtgccttccgtatcccaggaggacgttgaacattggcaggcatgcctagctgaaagccgatgcaccgaggcctgctccatgctaaggctgtaattcttcaccccaagaatcttcattctggtcttcaagtattcaaggtaaacagtcagttgtaggcaataatgttatgtgacttcttctgtaattccttcttcttttgtatctatttttgcctgggtgggggtgggagaaaggggtgtgagaaactcaagtcctgatgtcatggtttgctcttccttttcaacattcatagaccccaggtcccagtgcccaaagagtctctttcttttatctactaattattaactggggatgcaaagcagaatctccagcttgaggcacccaaggtgtctcctgtcagagctccatttcaatagtacatgttatggtttgaatgtgtctccaaaagtttatgtgttgaacacaggagtaaattcattatggggtgagtgggtttgttataaaagtgagttcagcctcctcttgctgtgtgtcttatgtgctttcttgcactgccacctggcaccgtggaagaatgcagtgagaagcccctcaccagatgctggcccctaaatcctgaccttctcagccttcagaactgtgaggaagcaaatttctgtttattataaattacccagtctgtggcattctgatatagcagcgagaaacaaagacagcactcctctgtctgagcgtccacactctcctccctgaatcctgatgagcatattgtctgtcctccctcaggcacaagtgaagcagcctactctgcgacacaatggctcctggccctttggcattagggagggaaacacggagcagggaacccctgagtgtgctgcttcacaatgcacgatccccaggtgctgggaagggctgacaagtaagatcagagggacaaatgagaacatggggacaagttgtgagatgagggacctgtggctctggaattgtatttctgggaaactgcaaggaagctgtgtgtgtgtgtgtgtgtgtgtgtgtctgtgtgtgtgtgtgtgtgtgtctgtgtgtgtgcaagtatttgaaagaaactaaaaatagagaaattcaatcatactagtatctccaactgcttctgagtctgtgactagaccaatgataataaatgataaagaactaccatgcatttatttattcaagaaacatttactgaatacctgccctcgttcaagtaaaagacttaatggtaggaaagtcatatgttaaataaattcaatttttgttacaaagaaatacaagactgccattagagaatacacaggggacctgatatgtctgctctgtgggggaaggttctccctaaatgtaaagtttaagatgaaacccgagggataagtagctgttatgagagggaggattagaggaacattacagtgtaggggaaatctttgtatcaagacacattttgaggccgggcaaggtggcacatgcctataatcccagcactttgggaggctgaggcgggtggatcacctaaggtcaggagttcgtaaccagcctgactaacatggtgaaaccccatctccactaaatacaaaaaaattagctgggcgtggtggtgcatgcctgtaatctgagctacttgggaggctgagacaggagaatcccttgtacctaggaggcagaggttgcagtgagccgagatggcgccattgcactccagcctgggcaacaagagcaaaactccctctcaaaaaaaaaaaaagaaaaagaaacattttgatcaaccactagaattgtattgtggttggagcagaaagtaagaagagtgatagggctactgaggtgggtaggactggagcatggaagctgttctggaatggacttggtctgcatccttgaggacatgggggccaatagagatgcttagcagggaaatgacaggtgcaggcttgcatttttaaagctaaatcactatagcaaggcaagggagg

SEQ ID NO: 1881500 - DNA, 4001 bp, Homo sapiens
ggacattctgggcctggacaggctgcaaaaggcaaaagctgtgcctggaaaagtcgccatggggcatgagcttggcctgaagaggccactgcaaggcaggagctggccccgtagaggctgccgaaaggcaggagctttgcctgaggatgccacagtgagacaccatctgggtctgcagggtccactgtgaggcagaggctggcctgtagagtccgacagtagacacaagttgggcaaaaggctgatttgaggaagttttgggcttcaagagtcagccaggaggcaggcactaggcctggaaatggcccgacagtcatgagttgggcctaaatgggccaccgtgagggaggagctgtgcctgttgaggctgctggcaggcaggaagaaatttggcctgaggcagctgccatgaggcaagagctgggcttggaaaagcccctgggaggcaagagcaggccctgcagaggctgttctcaagtcaaagctgggcctgttcatgccaccgggaagcagaaggtgggcctggagagtatgacttgaggaagttttgggcctacattggctgccatgagctggacaggaactgggccaaaaaaggctgttgtgaggcagcagttgtgcctgtagactcagccaagaggaagagctgggcctggagaagcccccatgaggcagaggttgggcctgtagacgctgacaggaggcaggagctgggccgggagaggtcaacttgaggagattttgggccttcataggccaccaggaggcagcagttgggactagagaggctgacttgagtaagttttgggcccggagatgacgttctgggacaggagctgtgcctggagaggtcactgtgaggcatgagctggatgtagagaggccagtgtgaggcaagacctgggcctgtctaggctgctgggagacacgcaggaatctggccagggaaggttgccatgagacgaaagttgggcctggaaaggcccttgtgaagcatgagcttggcctaaagaggccactgggtggcaggagctgggtgtgtagaagctgctaaaggttgggagcttggcttggggggtccacagtgaggcagatgctgggcctcaagaatctgctatgaggcagatgttgggactgtagaggccgacgggaggcagaggctgggcctggaggggccaccaagatgcaggagctgggcctggagaggctgcaaagaagcatgagctgggcctggtgaggtcgacttcagaaagttcagggcctagagagaaggctgggaggcaggagctgggtctaaagaggccattgtaacgatggagctgtgcctgtggaggctgttgtgaggcagtaggctcatctgcggagactgccgtgaggtagggtatgggcctaaataggccattgtgagtcatgagcttggtctgtagaggctgactggagaaagttctgggcctggagaggctgccgggaggtaggagctgggccaaaagatttaagcacatttacatttattaggcacttcgtttccattattacactgtaatatctaataaaataattatagaactcaccataatgtagaatcagtgggcatgttaagcttgttttcctgcaactggatggtcccacctgagcgtgatgggagaaagtgacagatcaataggtattagattctcataaggacagcgcaacctagatccctcacatgcacggttcacaacagggtgcattctcctatgagaatctaatgctgctgctgatctgagaaggtggagctcaggcgggaatgtgagcaaaggggagtggctgtaaatacagacgaagcttccctcactccctcactcgacaccactcacctcctgctgtgtggctccttacggctccatggctcaggggttggggagccctgctcaagtgcatccaaagcgacccttcccacaccagtcttcatagtggtcaagtgcagtaaccacttagctcccaaggcatgtgcctcagctggcatttcgtcacaatcaacagtaagtggtagcttgagtcattgtgaggtcacttcctggaaatcaccagcatcccatttcccactggcaaagagctcagcactgccccctgggaaaccaaacctatgcccaaatcccatctgtgtgggtttatctcctgggacccttcctaacatattagtcagagtccaatcaggaagcataaaccactcaaaagtttaaagtggtaaaatttaatacggagaattattcattataacaggtgaacggcataatgagagattggctaacccaaagtaaagagaactctagagaatacaggactagcccaggccaggcatggtggctcatgcctgaaattccagcaatttgagaagctaatgcaggaggattgcttaaggccaggagctagagaccggtctggacaacacagtgagaccctgtctctatccaaaaaaagaaaaaagttagctgggagtggtggtgcacacttgtagtcccagctactcggaacgctgaagtttgagcctgggaggtcaaggctgcagtgaggcatgattatgccactacagtccagcctggtgacagagcaggctgtctcaaagaacaaaacaacaacaaccatttacagacagaaaagagatagagctaataagctaaggaaagatgttgaaatgtgacaagtaaagtaatatgaggtcttttatctatttaaaataatcaaacaaaaaatgacttagtaaattataataccctgtgctggcaaaggtgcagtgaaacgggcactttcttgtactatgaggggtgtttaaattgtgtataagccttcccgggtaaagcttgtcaatttcttaaaataatggagacagggtctcaccatactgccatactgcctcctccaactcttggcctcaagcactcctcctctcttagcctcccaaagtgctaagattataggctgggaggcacccaaaaccctgtcaatttacatcaagggtaatgagaatgtccattcaccatgtctcacagtaatcttacttctggggagataattcaatctaaacaaaaggtcatctgtacaaacacagtaaaaatctgggagtaactgaagacagagttggtaagtgaaataagaaacagttataagaaattaaactatgatatcaataggcacctggtataaaaggtcagttgatgttagctgctacttttttgttgttttgagacagggtctcactctgtcacccaggctggagtgcagaggcctgatcatgactcattgcagtctcagcctccctgggctcaagtgatcctcccacctcagcctcccaagtagctgggactacaggaacatgccaccacactaggctaattcatgtatttttctgtagggatggtgactccccgctttgtttccaaggcctatcgcaaactcttggcctcaagccatcctcctgcctcagcctcccaaagagttgcgattaccagtgtgagccaccacacctggccagctgctacttttagcaatattattattattccactcaattaaaaattattattttcaaggctatgcaacagtatgtatcctacagcgtaattgtaaaaacatatacagtcgtcgtccctcagtatacagaattagttccagccccccatctctgcatataccaaaacccatgcttactcacgttttgctgtcaccactctggaatccacttatatgaaaattccaaatattagttgggcatagtggcaagcacctgtagtctcagccacgtgggaggttgagatgggagaatcacttcagcctggaaggttgaggctgcagtcagctgtgatagcactactacactccagccttggacaacagagggagaccctgtctcagaaataaaaacaaaacaggttagaaattgtactgaggtctgttgggcaaaattccatataagcaaagtataaattaataaagcaaatcgtgataaattagtacgattgact

SEQ ID NO: 1881501 - DNA, 4001 bp, Homo sapiens
agaaatgtggttccagcagcccaaagctgaaaagagacattggtaagctagagcacgcccaacaaaagtgatgaacataagaaagtaattcaacatttccgatgatgcacatacacacaatacacacaaaacacatatacaacatatgtatcacacacattgaacacgcaacacacacaacacacaaacatatacaacacatgcatattacatgcatacacacaacatgcattaaccatgtatacaatgcatcatatgtacatcagacacacattacatacacaacacatccagtacaggtaaaataccgcatacacatatacatccacacactagacaacactcgtagcatatatgtgacacacatgtgcatatatgcaccacgtgcttgtatgcacaaaacatccacataacacacacacagacacacacagacacacacacacacagtagagttgcctagcaagccaaggatatacataccatagtcccagcaagaagcatgggaggaagggaagagactgatgtgtactagtctttgaagggctacaagctcacatgtttaaccaagcagagagaagagaaggcaaccaagaaaaaaaggcatgagaacaagatatgatcaccctcaatctctgccagtgcaagccacagtaccattgtgggagcagaaactgtaaccctctgagcatactgttgggtgtccagcactgcatcagagtgagctactattcctttacagaaaagaaaagacactcaaaccgcccccccaccacctttatttatttatttatttattttacaatgaatgagtggtctcttggaaactctcccatgtctacttcaaatgtgctgtttgaaatgttgaatataaatcattgtactataaagacatacacacatatgtttattgcagtgctatttacaatagcaaagacagggaaccaacccaaatgcccattaatgatagactggataaggaaaatgtggcacatatataccatagaatactatgcagccataaaaaggaatgagatcatgtcctttgcagggacatggatgaaactggaagccatcatcctcagcaaactaacacaggaacagaaaaccaaatgccacatgttctcactcatcaatgggagttgaacaatgagaacacatggacacagggagagaaacaacacacactggggcctgttgggggtgggggttgaggggagggaacctagaggatggatcagtaggtgcagcaaaccaccatggcacacgtatacctatgtaacaaagctccacgttctgcatatgtatcccggaacttcaagttaaaaaaaaaaaaagaaagaaagaaaatgaaaaaagaaatactgaaggcatgggaagaccattacatatagttgctacagactcaatttctgttgacagaaaaaagagacttagacaaagggcactgggccaaacctgaggtagaaagaaaagaggttttctgccatcagtgggcatcatcatttcacactaaggccacccctccacgatgagtcttggaaaaagtttttgttttatctgactgagttctttttttgttttctacataggaagaatcccagacaaacatgaaaattcattcctttccttgttgcctccagtgaaaagagatggagatgagggagaaatttactgtttactctttttttttttttaaggtttttcctattttcttactcccccctgagcaaaatactctgcaaatggtctccaggctctcaacaacaatactctgtttccatttcttaccgcatttcctttctttcccaggactcttctgacagtgccaagttgcacgctgggttgtcatagaatgttctgaagtcgtgtaaaaggaactggcacaaaggaaaaaaaaaaagagtttttctcctactctgcttaaattagtcgttgcctccagcagcgatatccatttcctttcactttcctggtctggcttcttcttctttttcttcttcttttttttttttttttttcctgcagatattctgatttgagctcagcacacacattcaccccagaagttcccaggatgccaataaagatccttgccagcagatcttatcatgttcctcttgaaacggttttgtcattctttggatgactgtagaacatctagtctcatacatgcctgtttttttattgggtttctgcacagtcacaacccaataatgcacaatggtaagatgccccaactgacacaaaactaaagagtcaaaatgctctccgttgtcaattgctgcttagctcagaggctgttccaagatttgccttgagttcaaagaattgacccgaggtgcatttatctttgaaaatacatattctgtacagcgcttcttccttttgcctgggaaagtcctggtttgtgcctatcacccaggagtaatcatttatagcacccatttcattctcacaagtgtctcagtttgcacagcaagttccatagtcagcaaggatacagtatacattggagacacaaagatacaaaagacagtatccttgccttagaagagctcagtctttttagaaagacaggtaagtagatgattataatataagagctaagataaagatatgaatagagttatatgactttgtcccactgtctctatgtcccttctgtccagcacactgtccagaacacagaggcgtttggtaattttattgttgctgcttttgttttaaccaatcacagtgttctttctatagacagaattttcccaataatgggccattctccctttcttctgctccatcttttcttgctccattattttcttccataactcttgagtctcctggacatataacctcaaaaaaaaaaaataatcaagagcatggacgaaaatcacaagggtaacaaactgacatgctagctctgagtccctcctcaatctttgcataaaaatcacaggaggtgctgttgctgcctctttccacatgttctgtagccctgagtgccaagatacatctgcccctgatggccccaatttgtagtttttccagctgtttctgcttctgctgccttggctactggtaatataggcaggtctcgctaatagtacttaagatcaatactgatgttttatccaaatatggtcaagttaatgctaggattgaactaatggctcctgctacccccagggagggcatgatcagtgccaaaatcacgggctatggcctcagacttctgtggccatgcatagggcccttcttgagatgagggcaagtgcttctccaccccagttataactcttcttattctctgaaaaggatgacttcacttatcatttactcataagatcctcttgcaagcaactcttgtgtatgactcccacaaatgaatcattcaagctgggaggttccatctgagtaaaaatgcagcctccatgtacaaatgttaaatgttcctgggtttattttctatgtttaatttttatcaactttttaattaaaatgtcattacaaatttaagacagaaggaaagggtaggagagaggccaggatgggagaagcgtgttagaatgtattgagttgtgtaagctgtttctttatttctttacgctaaagtgttctgaatttctgacattttgatatttttagtagcttcaaatcctgaagtttgtgagtagaaaattgtgaggcactgacttgccaagtggcaaagaaataaaaacaaagataaaaaccagaaaagttaagtgaacaactgcaattctgtgagaaaaaggctaaagctgagatgagaacagagacttttgagggcacagaggcaggtgtctaaatggggcatggagggacacaagaacataggatgttatcatctctcagtttcttcttgtgttgttccctaagatatcttgtctcctaagattgttaagttcttccgtggaaaggacagtattttatttctctgcctcatttgtccatattactttgtagtgcttagtacagtg

SEQ ID NO: 1881502 - DNA, 4001 bp, Homo sapiens
aacatgtgagataacgcatgtaaaatatttgggaaagtgtccagtacatagtaagttctatacaggtatttgctattattatttatcagctgtgagcatcactcattatgctgtaaggtgcacaaaggctggaattgtttctgtatttcccactcctcatatctgctttcaaatagtttttggaggaagaaagttgtgaaatcccaaagtttcctctgccatcactaaatctcttcatctcattcacagctctgccacattctctacggtcaccaccattggagttgctgtcaccacagctaccacagcccctttactgacacatccaaataccttaagttcaaaaggctgtggcatcagattcagaaagaagagtgctaattctaaaagatagccattcgagcagcagcaatgtaacagatgttttgttgatttagcaattatttcaaaggtaacaaaaactctggctaacaatagaggaggaaggagcttacgctccagaagaaacacaccaacaactacaaattcacagccactatccaccaagggggtacaaaataatagtaagaataacaataacaaaaacaacaatgaaagcactaagatgctttcaagggaggcaccatagcagagtcgtcatgagcacaagacctggatcctgccaatctgggtctcaagcccatctctgttacttactagctgtgaaacgctgagctgtttcttaatttttacgtgatttagcttcctctctgaaaaatgaagataaaaatagtatcagcaccactacagtattactataaggactaaagaattaccttttgtagagaacttggaacagtgactggcacataaaaagtattcaattaatgttggttatttttgttaattgaaagagttttcacagacatatctcaaaggaccagcactgagagttttccacacatatattatgcagacacacacacacccaagacctttttcccgacacctcacattaacactacactttgatacagtgtgtactctctcaggccctttccttgggctcttacacaaagccaagagttctgcctgttgctcttttccctgatgtgactattacctgtgttaagacaggtatcttaacatgcatagatcttaaatcaatctatgcatggctaccattatttcactgcagaacacggactaatagtcccagctttacttctcaatcgaggctttctgtaagaagaagagcttcctatccaggttttcttatgaacacacaaagaccaatcttttatccatggcctaacccagtgtttaccaaacttgaatacatctgaagacttgcaaagctctatcaatttctgtctgagagacatattccaacccttaaatttatgaaagactcaacaagctgaaaaagcaagcaatacaatttcagagaagtagtttatccaaggatacatggacagtaaaaagtagaactatgccttaaaacccttcttttgactttagtacaatgttttcttttaaattttatttattcaagaagtttggaatttagaaatcatggagatgattgggcaaacctaatactaaaggaaaagtcagataatccataatatcattgctttttatcccattaaaaaagctgagaatactaataaagctaacttaactaaaatctgtatagttatgatcccgttctataaaagaagagaccagtgaattttttcatccctggtggtgcagcaggaaacagaatctaccacagaaaagaaaatgaggaactacatgaatcttagacaactattaagacctgtgtgtgaactagcttgacatgctggagtcccaaggaacccatccacaccatcaagctgtactcacctgccagcactttaccacaggtcttcaccaggcacagaggaggactatactgaagactgagggaaagtcaagaaatctgagagagagagatccttgaggcatgtgaaccttccctaagtgcaaggcagcatcccagtgaagactggagtcagggcagaagagttaaaagaaatctgtctgagaaagtctaggccttcactaggtcaaaacagttgcaacggaggccagaaataaggcagaagaactgagaacagttgctcagagtgttgcaaactttcattaagtacaaggcactggatgccaaaggcttgaagcagcagagcaaaaagaagagagacctcctgagattaataaagtcagaaacaggaaaggaaaaagaactccctagcaaccaaaacagtctgggagcacacagagatctctgaaatcttgccagtgctcagatcacaagccctagtgatagaaaagaccttattctgttttcaaaacatttgaagtcagtggtaaactaatccaactaaagctgaaataatcccacatacctcaaatatacaacagatttcctcaactttcccaagaaaaggtctaacaaaaaaagtatgcacttttttagggtaaataaatattaattttctcaatctctactatttttctcacaatatccaacatagagtaaaaaattttgagacccacaaagagaaaaaatgtgagcaataatcaaatgagaaaacagtcaacaggctgagactctagaaagcacagacgttagatttatcagggagtaacttcagcataactatgataaatatgtcaaataattcagtggaaaaggtagagagcatgcatgaatatatagagaatttcagcagagtaatgaaaagtatgaaaagaaaccaaactgcaatgtcaaaatttgtttttaaaatacactgtcatcaaaagagaatacatattaggagtctaacaggccataaaacacaacagtagcctattagcagcagcaaaaagcagaagtaaacctgaggacaggtcaattatccaaaaataaataaataaataaaagggggaatgagtgaaaaacttgagtctatgatctctaggacaatattaagtagcctagtaaatatgtaattgcatctgtgagagatagaaaatgagtcagaagaaatccttgaaaacataatggccaagaatttctcaaaattgattaaaaatatcaaacctcagcatcaggaatcatagtaaccccaaaagaggataaacacaaaaacagaactaggcacaccatactcactctgttgatagccaaagatgatacaaaaatcttaaaagcagtcagagaaaaaagaaacattacacggaagaaaaaaatgataaaaattatgtctaatttctcttcagaaacaattactccaaaacaatggaatgacatctttaaagagctgaaagtgaaacatgttagtctggaattctgtataggattctaaatagattctacataaaattgtagcatagtcctatatcctacaaaaatgaaaaataaagacattttcatacccttctccccaaatcagattttttttccaggagacctacacaagaaatgctaaaagaaattcttcagggccgggcgcggtggctcacgcctgtaatcccagcactttgggaggctgaggcaggcggatcacaaggtcaggatttcgagaccatcctggctaacatggtgaaaccccatctctactaaaaatacaaaaaattagccaggcctggtggcaggcgcctgtagtcccagctactcgggaggctgaggcaggagaatggcatgaacccaggaggtggagtgtgcagtgagcctagataatgccactgcactccagcctgggtgacagaacgagactccgtctcaaaaaaaaaaaaaaaagaaaaaagaaattattcaacatgtacataataggcacataaaataggcacaacaaaccatttggcaaaatccaacatccattcctcataaaacgactcagtgaaaaagaaactgaagagaattttctcaaccaaaaaaaagcacctatgaaaatgtattatactgaaagataaaagaccagaacaagacaagaatttttactctcaac

SEQ ID NO: 1881503 - DNA, 4001 bp, Homo sapiens
gaataattttccctctgatatgtgttaactgatcttgttctacctctgtttttgctgttggattgctgtctgtcagacactgctgatgatttctaagtaattcatttgtcccacaagtgggacaaattattccctaaaatacttgagaaagtgtacagtagaggagcctagaacaacaaatctggctcaattctagcctcctataattatctacatgccctgagggaagccatttatacctgagactccatttaccccctctgtataacggacgtgaagacctacatgtattattagtccgttatcacactgctgataaagacatatccgagactgggcaatttacaaaagaaagagctttaattggacttacagttccacatggatggggaagcatcaccatcatggtggaaggcaagaaggagcaagtcccatcttgcatggatggcagcagtcaaggagaaaatgaggaagaggcaaaagtggaaactgctcaaaccaacagatctcgtgagacttactcactaccaggagaacagtatggggaaaactgcccccatgattcagttatctcccaccgggtccctcctaaaacatgtgggaattatggcagtacaattcaagatgagatatgggtggggacacagagccaaaccatatcaccacataaagggtgatgagtattataagcaatgtcctttaagtgcctagtatagttcctatcttacggtagatggagatattattattcattactgcaatggttaatactgagtgtcaacttgattggactgaaagatacaaagtattgatcctgggcatgtctgtgagggtgttgccaaaggagattaacatttgagtcagtgggctgggaaaggcagacccacccttaatctggtgagcacaatctaattagctgccagtgtagctagaatataaagcaggcagaaaaatgtgaaaagagagcctggcctagcctcccagcctacatgtttctcccatgctggatacttcctgcccttgaacatcagactccatgttcttcagttttggaacttggactggctctccttgctcctcagctggcagagagcctatggtgggactttgtggtcgtgtgagttaatactaaataaactcccatatatagatatggagtttatggcagactcctatataaccaccactaactgccattaagctttaaaaataaaagagttttgtcagtaaatatatgaatggcttatagatgaacacttcaaataatccattacacaatctcaccactcaatatcatactgtcaaagaactcttattaagcaagaggacatgtcatgtgaaagacccaagatacactgaaccatattacatcagtaccctgttttgtttttaccactagacaatttgttagactgatttattttctgttattactttccattgttccaggaaaaggaaagaaggaagaaagtctcttcctttgaatgttaaagatttaattgcggctgggcgcagtggctcacacttgcaatcccagcactttgggagaatgaggtgggtggatcacaaggtcagaagttcgagaccagcctggccaacatgatgaaactccttctctactaaaaatacaaaaattatctgggtgtggtggcaggtgcctataatcccagctactctggaggctgaggcaggagaatttgaacctgggagatggaggttgcagtgagccaagatcgcaccattgcacattgcactccagcctgggcaacagggtgaaactccatctcaaaaaaaaaaaaaaaaaaaaaaaaaaaaaaaaaaaaaaaaaaagcatttaattgcacttaattttgaacagaaagcatggagaaaacatcacttaccttctcaaactccattttgtacaccccaattgactgagtggtgctttcccaccctcatccacagatcacagagacacagctaggacagaagaattctcctctaacagcagatctggctgggtacaaaaaaaaaaaaaaaaaaaaacaggaaatgttctaagtgactttcatccatttatttccaaagtaaataatcccacagaaatggataggaaaaaaatttagcctacattcttttactttacaacatagttccagatatagtctttggttttattttcataacaagttacgttcttaatatgtcacagtgaatttcaaggaaagcattatttgtcatggttccaaatattaatgtctctgatgaaattgatgtttctgtcatttctagttgtcagagtttctgtttcctcaaggtcttctctagcaacaaaatcccaaaattctttaagaacatgaagatggctcttgatacaattttgtattatattgcatgttagatctacaaagaggctcttctccctatactgagagaaactctttctgattgagtccttgtgtcttctaaagtggatcactttatggtattgtttgttcttaatagtaatgatcagaatggtaacactaagcaaagagcacctgtagggctgggctaattattttacatattagtttatttaatcctccaaacttcctgtaaaataggttttcatttctgcatggcataagagaggctttcaagggattaagaggctgcaagtcacaatttggtaaaatctggaactagtaaaatctacatctctccccaactccaaaacttgtgttctttatgcagtactaaccagagtaagaaggaaaatgtgtaaataaattatgctacttgacagttatagaacctaagcaaatgataaatgcaaagtctaccagtagtgagtcaagagcaaagtctaggggttgaacccaagcagccccagacatccaatccagagccatgtttgggttaacattcataatgttttgatttttattcagaataattgcccacatttaaaactatgcagaattcccataaaaagcaggactgagaacttctattgacaaatcagaatatctagcaacttgggcctccacattcccacatggtagcaataagtgaagcagagtagcagatgccccttcggacaggacactccacccatgcactgcagcctactctctgctgacttagtttgtgtgcctgaaccctcagggcttttgagtttgtgaccctccttttctccatggcatccaatgtagtcaaattagaagggtaaaatgttctcaacttcataaatatacagtgtgtcaaaaactataagaaagaatgtaacttgtaccttttcctcaatggtttcttcctggggatgacccagagattgtgagggtttggagaacagcctagggccttcaattaaaatagttttgtctttggttactaccggaataaacctgtaagcagacagctgtttcatgccagctgaaattctagtcttgggtgggatggcagaggtttatgacttcagatgagaaacaggcaggaacagattatattcttatgccaagtttctctctttattgccatggaagcaagaagagcaatgcagaacatggaaagctttgctagagcagtgtttcactcagactttctgcaagacatcaggagctgctcgagattttgcaaacacatttatgggaaaatcatggctatagaaaagctcctaaaattaaaacagagctggaaaagaataaagatcattgcatttgtctttaaactcagaagcagaacccctgggatttagcattgtataacaacactggaaacattattaacattaataaataaacatctggattgacttgcagtctaaatttaagtgtcctaaatattttggctcaattataactatactgcttttttctaaattctcaaatgtttcttctgtccttagcttatatttcattttcttctaactcttttaactcgaatctttaaatggaccttgttgtataaatgtttaagcaccaaatgtctatataaggatatggaattgatattgatttcagatttcatatttgtac

SEQ ID NO: 1881504 - DNA, 4001 bp, Homo sapiens
accagagtctccagctagaaacctaagagtcattcttgcttattcattcattcattcatttactaaacagctctatctttgcatctccccaatccctgcactgtacaacgtacttgggatagaatagtaaagaaagcaacaaagtccctacccttacagagtttacagattagtgacagaacagagattaaataaactacaagctcacactcaccagcccccttctaaagtaggccacaactcagttccctgggattcccaaccaatggacccaaggcttggccctcctgagaaatagtcaagaaggatatatttgcagagtgagaatggagtttgaagcacaggttagtaagttcaccgacatggtgtgatgcctatcatggtgtggaacagagttgggattggaagagaagaaggagaacaagaataggctatgggccaggggccagatgtccctgtgcttccactttcctgaatggaacttcaaggattccaaggatttaaaattcaaatatgctttcccagtcattataaaggtatatttgtcaaagtagaaggaaacaatagattttacttaagcttttatgagtttggcttataatttttaagtatttagaaataatacactacatgaacttccattcatacttttgccccacaaatattaggggcatccctgaaatgtatttggtaatactgaaaaagataaaagagagataaagagagaggaccacaaatatacaacattaagaatgagaagtggatgacattactacacatacaatagaaattaaagagggaataccaagaaaagcctatcatttggaaaaaatggacaattttatttttaaaaactatacaaaaattgccttatgtaaaaagaaaatttaaatagttctataacattaaagaaattgagcaaaacaataagtaaaaaattatcatgagggaaaaataacatcactgagatcagataattttacaggtaaattctaccaaaacattcaagaaacagattattcaaattttatacacactctttgagaaaatataaaaggacaaaaattttcatctcattttgataccaaaactaaaagacagtgtaagtaaggaacattgaaagctaatctcagacatgaacactgatgcaaaatgctgaatcaaatattaaacaagctaaatccagaaattaataaaaataatatgccataccaaatcttgtgtaccccagaactgctagaatgattttcactagaaattctatcaataaaatgaattactttaacaaatttaaggaggaaaaagaagtgaccatctcaatagaaagaggaaaagcatcaataaatttcaaatctgattcataataaaaactaataaaggaaagatatttccttaaagagatgatgagtacctaaaaaaaaagaagaagaagaaaaggaaacttcaacaaaagttatttaatggtgaaacataaaagtattccgttaaaatcaggaacaagtaaaggaagacataaaaggttaatttctggaagtggaataactgagatacaggaaattagtattttaattttaatagataatacaaaagcactcttccaaaaggtgttgattttacaattctagtgcccatttccccatacctttactggcattgaatgttattcatctttttaatcactgcccatctgttaagaaaacaaattttatttttgctttgtgaagattctgtttatgtcatttgtagagtcttacttaatattttaggttgttgtagcttaccattgttactgaatattgagggagaggaggatgagaaaggttgccaatagtcttaactgagcttaatggcatcggtaaaaaatgaaaatgatctctatgaaaacttacccaaaagggcattataaatatgtgtagtataacaatgttatctgcaccagaagttgagtcaggaaatctgtatctgtgcctcatgccttatttcagccaccatatccttccagaggcttcatggcaggcaagcaacacaatgagagaattctggtgttctcaaccatggcaactctcacagccatgggtgaaggcctctcccctgagatctcagacctggagatgcctctgtcaagcaatggctcttgggtgaacatgtatgatacaacttctattatcgcaagtctggaactgtattcaccaacatatgcacatccaatgctaccagaatctatgaaaactcagtgataaaaaaatcagagtcaaattcccccaggtttttgttttaactgctttcttgcagaaaaaaaacttcttttctggatgaatgctgtttcacagaaacccatttctcagtctacaaacatagtttccggataataatttgcaataaaccttttgctcaaatcaccaagaacaggaggtctgaaatatacttcagagttgtgtgacttttgaaacccacctcagcagccctgaagctgttatttgttgctctttttcagatataacctcagtccttcctcactgagaatattagggttaagatttaagaatacagatagtctttgaattcagatagctctggattaaacaccagttcctccacttaaaggctgtgtgaccttgggtgagttcctctaagcctccatttcctcctcagttttttgtttttgtttagttgttgttgttttgagaaggagtctcactctatcacccaggctggagtgcagtggtgcgatctcggctcactgcaacctccacctcccgggttcaagcaattgtcctgcatcagcctcccaaacagctgagactatcggcgcctgccaccacacccggctaatttttattgtatttttagtaaagactgggtttcactatgttggccaggctggtcttgaactcctgacctcatgatccgcccccttcggcctcccaaagtgctgggattacaggtgtgagccatcgccccaggcgttctcctctgttttatgaagacagtatagccctgcactgaataattgtgaagatcaaatgagacaatgtatttaaatcatacctttaataagtgctcaataaatggtagctatcatcactattatttctctcaaagaatgctcctttctagattccccagtccctcttgcttttcttcagttccctcacctcctcaaagagctatcgagcccagccttggattggctaagtcactcacaagtccagagcgcaattcacagctatgtccatactgcgccctctagtgtcactttagggactatgtgactctggaagcgccgttacctccaggattacgccaagggtgtaaatttctctatgtcaggtgcatgccctccactgccaacgtcactccacagcttgataatggtggtgctcacagagcactgacattcatttaggtctgggtaaggctcacattccataaggtgggatggaaagaatcatcagtcccttctaacagggagctttcaagctccagaaaccaggagactcattcaacacattcatctctatatgtccacctgggaccattaggcacatagatgtaaattttatctggaaatagccctgagtgcccccatgcgtgtgtacagccagggaaacacacctactgggaggtcatactcaccaccccacttctaaaccaggccacagtttagaaccccttggttatataatatggataacggatgtctaataaatgcttttaatggcttgagattatatctgctcttgagcctgtgtgttcaaaggtagtaaaaccaaaacactggtgaaatggtagaagaagaataataaatttgttgacacaaaattccagcacagattttcaattgctcatctctgttcaatatgacgagaaatgagagctaacacctattcagcacttgctgtatgttaggtactgttctaaaagttttacctgtattagctcatttaatactcagaacaacattacaaggcatttatttttcccatgttttagatgacaaa

SEQ ID NO: 1881505 - DNA, 4001 bp, Homo sapiens
caacgcagctctctggggataagggtgggcggcatctcccagtcgggtttccttttcagcatctgccgggagggctgcaggccggctgggtattttcatagctgatctactcaaacaaacacatctcctaaagacaaatgttggttatgttctctgaagacactacagtttaaatccacattggggaactcccccactagccaggcacctgttctgcccttgaagtcggcgggtccccatccctgggcagaggagcttttggtttctgacgttgtcctcctgaggctgctggaatcacagaaagacctcattcccctttaatgtcagctttcccatcccctgcgtgtggtctcaagaccttggagctctttcttataacaggtgggtgggggcggggggcaggggaggggtgacagtttcttctgtcatataaacataaaaacttcagcaacagtgtctgattgtgtcaaagctgagacccagatatgctggaatgtggagacagagacagtcctggtgtgctggtgtgggggagcttaagggacatcagaccagctgctgaaccacacccttcatttgccaaaagctccatggggagaaacggggatcctgtcgaaagcttgcacatattctgacacatgcagatatgtcttatgggcttagcaggcctggacagaggcagggattgagcacgaggttggcgaatgtctgactccccacaggcgaagaaggaagaaggctgaaggagccacgctcacagcaggacaggaaggctgtgggtgtctggaaagctgtgggtgatgtgccttgattgcccccgtggtggagcccagcactccaggagggagaatacttgtaaagaattaaattagaatgatttgcctgggaggtggagtcagcagcataaggagactgctaaaagggcgagagcagagcgtagtgagaagtttctatacaggctggagatccctggaagctagtggtggtggagtgagagaggagagaacagacacgtcaaaggccaggggccgtcgctggtggctggactaggtgagcagctcagtgttaggggggcaggtggcctccgtgggagaagctgagggcagcaggatgaccagggccacaggaagcagctgggttatttgcagacagctcccacctgggctgcatccatcacccacgcactatcttatcctcagagacgcaggccaaaaacgatggcttcttttcagtggctacattttgaatcaggtgatgcttgataaaaatgaaacatcctgctcttcttcacccgacctgccttttcacctacccaaacaaacaaaagcaaaaataaaacaagacaataatagcaatgaggcagaggaaagaccgagtcccatcctacaagaagggaggcctccgtctccccacagccactcctatcaccccagatcatcactgcctgaatgctgcctttaccatctcagcccaagacactgtgttcttgacattttaatcattggcatcattatgtcatttctttggcaatcgaaagcaatgttcctgctcctgtgtgggtttgaacaaacagcccaaggggagaaataatgaattctcaaaggaaaaaaagtctgtttctcatctcaagcacctggaaggctaaggcgggaggattgcttgaggtcaggagtccgaggctgcagtgagctatgttcacaccactgcactccagcctgggtgacacagtgagaccctgtctcaaaaaaaaaaatcctgtaagcaatgagacacacaaggagtaatcagcacacagagccttagcacacactccagcctgcacactctgcaacgttctgctcttacctcagtgtcacaaggtgtggcttgagcagctcttgcccagacagataaaaagcaggtgtaacatagtgaccccaagggacccaagggtgcccatggtttgcaagagaggaaagaacagagagagcctgaacattcccagaattgcattgctcactagccaagctgtggcttccttgacacatgtagctggcatgggctccgcccacaagcaggcctggctgagcagaaggcagcttccaggaactccagggtacagttattgtgttgatccaacaggtgcccaggccaacaccaacgtggggcctgaagctgcctgcccactcctctctggcctctcaaccctgaccaacagccaccctcacagcagcatgggccaaagggtcatgggacaagccacaaatgcagttgacacagcctgggtacatcatgcacagcagggtccactctgttccaccatcaaagacccctgcctcctaattgggcttaagaatgggcaggacgcacctgtgctttagtagtgcagctcccataatggctggattgccacatgctggtatctcagtacagctgcccaggtgtcctaaacatgttttagtcatctttctagagaaggtagagactatggttatagtaacaggaaaagtatgaaacaggggaaagtaccaggatgtcccctcatggactgtcactactggccgtcactacagaacttttattcattgtttcattgtttttaaaacgtgcgtatgtgcaaggcctcagatctttctgctatgagtccctcatcgttgacttgggaccacagacttcggctagaaagctcactgtcatgctggatgagggcatggctcaggcaccgtggcttatcgtttgggctgaggacagatgtagctttcactgaactctcttccagtgcaccagtgcagttttgggtagcggggacgtagaagtgtgcccagaagggctgaagacgttttgctttttttgtttttgtttttgttttgagacggatcttgctctgttgcccaggctagagtgtagtggtgcaatctcggctcactacaaactcctcctactggggtcaagtgattcacctacttcagcctcccaaagtgctggaattacaggcatgagccactgtgcctggcccaaagatgttttttaaagagaaatagagggaagagcagctgccatagggaatggaaatgtgggagaagagaggctatttaagaggatttttttattttttgagatggggtttcactctgtcgcccaggctggagtgcagtggtgcaatctcggctcactgcaacctctgcctcccaggttcaagccattttcctgcctcagcctcctgagtggctgggattacaggcacgtgccaccatgcctggctaatttttgtatttttagtagagatggggtttcaccatgttggtcaggctggtctcgaactcctgacctcaggtgatctgccctcctcggccttccaaagtgctgggattacaggcacgagccactgcccaccgcccgaggattttttttttttttttttttttgagacagagtctggctctgtcacccaggctggagtgcagtggtgcaatctcagctttctgcaacctccacctcctggggtcaagcgattctcctgcctcagcctcccaagtagctgggattacaggcaactgccatcatgcccaactaatttttgtatttttagtagagacgggggtttcaccatgttggtcaggctggtcttgaactcctaacctccagtgatccatggcctcggcctcccaaagtgctgggattccaggtgtgaacccctctgcccggccagcttaagaggattttgaaggggctttagtgattccatgttccatgtgaccaagaaatcaccatcaaaaatcgatatatgttttgtcgtaacaaggagatacacaaagggatagcgactacctctgcctcaggagtcagcaaatacttcactcaagaactgatcttgaaggatgggtgagaattttctagaatgaaaaagatggataggttcgtgtgtctcaaaagcaagcccaggacagatgccagtggttacgttttcactggtctgaaaggacatgagaaaaataaagaccaggtaggaagcttttcaaaaa

SEQ ID NO: 1881506 - DNA, 4001 bp, Homo sapiens
acgcctctcacaactcttaagtgtatgtatgtgtgtctaaaccgaatcaagaaagcttacaatagagcttcatagtaacagtatttatttcagaatcataattgtaaacatgagaataacttaattatgaactccagtttagctcttttataagtgcagaattatattttagctgctgttatattagaataatttttaaatgtcatcctattttaagcactcatgctaaggtaagtgaagaacacttttcaaattttctccagaagaatcataaacaagaaactaaacaaattacctataatgaaagtgactaatgagcaagcgggtttggccagatactatacacaaactttgataaaaggcaaaatgcttaatttatatatatatatttttagatggggtcttgctctgtcacccaggctctagagtgcagtggcatgatcacagctcgctgaagccttaacttcccagactcaagcaatcttaccacatcagcctccagagtagctgggactacaggtgcacaccaccacgcccagctaattagaatgctttattacacttgtgaaattttcttgtctaacctgaatttacattctatagtgataacatagcatatgtattgttattaaagtgactatgtaaaaaaattaatataaaactgtatatacaatatgattccaattttttactttcatatgtgcagagaacacagaatgaaaagaaatagtcctaataattatttgtcagtggtcgacttgggtttttttctatgttatatagctctgtgttttctaaatattcagtcagaagcagatatttttcttatcattacatgtttaaattatggtggagaattttcagcaaatattaaaataaggaactccttgggaggccgaggcgggcggatcatgaggtcaggagtttgagaccagcctggccaatatggtgaaaccccgtctctactaaaaatacaaaaattagccaggcgtagtggtgggtgcctgtagtcccagctacttgagaggctgaggcgggagaactgcttgaacccaataggcggaggctgcagtgagccgagatcgcgccactgcactccagcctgggcgacagagcgagactccatctcaaaaagaaaaaaaaaaggaactcctgagttatccccagtcctccttgggtcactctgtccagcttctgattcctctgcttattttagctgcaggctttatgagatctccctagtatttggtacctcattcctggactaagtggtcaaacgtgtgtaatggggcaaaaggccttaggatgttgaataatcgctgagcaggtggtaaacctgtgacactgatgtgatggatgtaggagtggtctccttgcagccctggagcctttcatcagagtaggatttcacccatctgagctggcaacaagccctgttattcccaggacatctagaattcatcaatcgtgcctggattgtttattcacttcactcatgctcctgaattctttgtagcagagtcatttcctgtttaattctctccaaagtttccccctttggcccaggactgaaaattatctgttctacagtgcataaaatatttttcacaaaggtaagccgttagttatgtattagtctgttctggaaaaaaaaagtcaaaatagttgagacctacagttagtccatgtgatctggaagtgaccaatagtcatcacagggggtgcacttacctaaatcgaatccgtgtgtatcattttctgcgttggtaagtagatccacgttttcctttgggaggctcactttaatatccttctgcttctttaagattgggaaaccacccaggcctcccagctcttggcaagcaacactctgacttcatgttgttactcagcattttgttccttattgaaatgcctggctctgcacaactggtttgtaaagtctgaagatcccctggccatgcccagaaacagcagcctcaggaagacagaactgaaaagaacacacagtgagaacgagaagggctttacagctccggtcagcctgactcaaacctgtgttaatagcccagactcttgttgctccatccagaccttcctctctcttctagtcacaatcctacacacccttctagtaggaactcaaaagccacctcactcagcctaaagtaatctatccctcttctgtgtttcttataatacttttatttactttgtcttacaaattttccttgtatcatacttacttatgtatgtatgtcttcctacgaggttgtaagtgttcaggaaaattagaatgatccagtttagcttgtacacttctccttgagcacaatgccttgtacttattaaataaaaatgcttgaattgcatggaattgaatcaaaatctaagaaaataatctgctttagaatagatctgagaatgctgagtaatgcacaactcctgccttctttggggggacctgaaaccttagggggacttcaattacttctggatttggtatagcttcagcaaaggcaagatttcccagggttgctatggcctacaggaatatcagcctccattggtcttagtgtctggctttaaatggtaatggaatcacactgattttttatgttcgtatagtaacatcataaagatactgaaaatactggcagtatgaaaggagaaaagcaaattcatttcttttttgaaagataaatctcattcataagggattaaacttttattgtagataaggtgaaatttggtaagttaaaatgagaagaatttcaaaatgctttgttgggtgaaaaaaaccttctaaagtagtatgtttattatgattctttttttggtaaaaacaaatttaaaaagataacttctatataaagtatatgtatacacgcctggggaaagcatttggaaaattatacaggcattaatttctcctacagttaaagtgtccctaacaaaaattggacatagcacaattagctgcttattgaacataatttaatgaatcactgttagtaataaccagaactgactgggaactgggaaatgataaaaagctgctgcttcccctggctgtaatggactgtactgcaggcagacctgcatggcaacagtgatgaggcattagacggtgctgaatacgtggcggaaagtgtaaggaagtttgtgtttccttttgtaggttttgatctacctttttaaaattaaagctagcaataaccaaatacatttatggttatgaaaacaaatttattgttaaaattactatttttaaaattctgttctactgtgagttttaacatttctgttcccattaaaacatttttttttaaaaaagttagttttaaattgcaatttggcttaattttaataggagatacacttttaaaggacaaaatctaaaaggcacatgctagtatttctaaatgagaaatttttgttccatccctattccccagccatccttctccaatttcaaccagtgttacctgtttctttacattcttttgataagttgagatttcttagaaatgcacctattttgcaacagtagaataggctatatactaaaatactaactgtagttattttcaaacaacaggataataggaaatatttatctctttatagttttctggattatttttttccccagtaagtaaaagaattaaagataatttctaaaaccattttgttggactctgtgtgacagcatgcctaaatattacattgtcatcactttttaattattccatttctctgcttctggtctttagtcttggttaacagtatggcaatgcaaaaaaaaatttccttttacctactttctcttccttcctcttcctcagtccatacctcatgaaaaaagtaaaattgcatcaaagtcatattctgaaaagaaatttcttattaaaattttcactggggtttctgaatataatttgactcattctaattaaatcagattaattaatacctgctatgcttggttcactaaagat

SEQ ID NO: 1881507 - DNA, 4001 bp, Homo sapiens
cccttgatatgatgtgatgaaaagggcactttaaatttgtgatctttccccaaaatccacaacaccgttcgaattgtgagaaaatcatcagaaaaactccaatagaggaacattgtgcaatatacctaaccactactcaaaactgccaaggtgaacctggtgcagtggtgagctcctgtattcccagctccttgggaatctgaggcaagtggaacacttgagcccaggagttcaagatcagactaggcaacacagtaaaaccctgtctcaaaaagaaaactgccaaggtcatcaaaaacaaggaaaatctgagaaaatttcatagtcaaagtagcctaacgaaatgtgacaaataaatgtaatgtggtatcctggatggcatcctggaacagaaaaaggacattaggtcaaaattaaggaagtctgaagagaatggatggaaagggtcacacaaggactgtgaggtggtacggttaatacgaacaatcaggagaggtttaaatagagaaaataacaaactcaaatcactaaattctcagcccaaggcacagttatgaaaaaaaggaatcatatataactattctaaaataatctcttgcagcagggccaaaatagctgcaaaccaaatgcaatggttaattctgaattttgctttgatctgttgaattctcagccttgccagtagaacattgaatataaaaaggattatttagtaatagtatatcaatctatgttaattgtaacaaatgtaccatattaatataaaatgttaataacaggagaaattatgggtatactggcaactcaacgtgctctctgctcaatttttctgtaaatataaaactactctaaaaatgcaagtctattaataaaaattataaaaggcagcaaggcagattttgccttcagactctactttgctgacccctgctatattccattaagcagagaaaacagtcaagtttgctttcacctggtgggaacagcagaatacctttattattttgtctcagagttacatcaaatctcaggttttataccacaatacgggagatcagtgccttgaacatcccatcatcctataaaacatcattggatcataggtacactaaattgatgacatcatgctgacaggagttgaagagcagaaattaagagctactctcaatgccatggtaagatacatgtctataagagggaaggagatatatcctataaaagtgcaagaaggagcctaccctttcaataaagtttccaggaatttgatagtcccaggatattggaatttcttcttcaaagggaatgccagattggtacatgttgtagcccctacctattaaaatggtacactctggggagctttggattttgtagacagtattttacattcaaatgtgttactctgagccatttacaaggtgacctgagaagttgcttaggctcttacaggatgcaaagaataaagaataatccattatctcagttaacagagcttattgtaagattaccaggaaagtacgaaaactcagaaaaaatgaaaataactcaagctaagccaccagagaattaaatattatggctatttgggacacaatgaaaagttttataataacgtctactgactctagcagctggctgtgctcctgattccggtcttccattctgcttatctgcactcattttttcttcgctaggactaattctctaccctctcttggcttctgtttctgctcctgttactactacgatggaataactatttttaatctcttctatttatctccaggtttctgtttactcataacttctcctaccacccagtttttacttactgccttcttcgtgtgtgtgtcttggcctctccagcctgctgactctctgaatgctttgcgttcagtctctcaaaaagagtttctgattggactcttcacttctgtccaatgtccttttatggcagagctcttgtgctggcctccctcagggagccctggacaacttctagatagctaacaaacacccatcacaggtccaatcagcactgactgtggttgtgacatcacacaatgccaacacactgacctatgcaaaggatctttcagaagaggctgcggttgtggtagacactctaaagcttcaccatatggaggcgttatagccaggaggcacctttgctggcctgtccagacaactgaattggtcattttgactaaggaggatgacaacctttaataccttaaagcattaaagggaaaaaatgaaactcctgatgatttcagcttggaagatgaactattaggttggtgcaaaagtaattgtggttttgccattactttaaatggcaaaaagcacaattacttttgcaccaacctaatagaaagctttgacctagaggaaggtactttaggagactgccaatcatcagcatgctttctgtttccttttctctgcttatctatgtaaggttttattcaaagtgggtactcctggtttatggtgggaatatgagtagggttgtggagaaaaaggatacagaggcttctaaccccacgagtaagtctgctgccagtggtagccatacagtgagaatacgatacaattagagtccatcagcagagtgctttattagtccctgccttggctgggtcacgtgtaagatgatcaacttcttgctgcttttttctttaaaaaagttaatctgaacttggcaactatgtttttgttcgtggaaacctggttatccagcccgttggcacagctggtttgggttttgattcccagaactcagtctacaggcctttccagcctctctccagcatagattgcagcgctctgcaaggtgcaagtcctgaaaacacatcatttggatttcctctctctggttaactgtcacagccagctgctctcaatccctggattcatttcctcttgaattctgtgtaatgttctccttaatcattcaatgtaaaaagaagaaaaactttttcctggtcttttttttttttttaaatgggagaggctttactgattttcttttcaatttgaccaataattcccttatgcccacggatactccttaacagttgttctcttgctgttgtcattttatattaatgttcagagaatacttaatggaatcttccttcaataactactcatattggctcttatttggtttgcaattttgaaaccaaagatctatggattttaaaccatacactcctcaggcaagaggttattaaacaatcattggtgactgtatttaatgttaaacttataattcagaaagaggtagactgggtgaattgaaaaatacctcagagactcagaattaggtttccaaaaagcaatcatctgcacttttttttcaaatgaaaatagtatcatatcaggattaattcaagttaatagctaagaaaatatcaatctaggtactgtacatagcttcaatgcccagtttcattttgctacaagaaactatatattttattggacacgcacacaaaaagcttgtcatattactcatcacccctagaagcagttcatagagcagcaaagtaatgttgctaacaagaagcagttttctgtagtagacagcaattcttatcctgtcatggatttatcttattattgacagcaaatttggctggcatttaccagaattgatgctttacccagccccataccagagctggaacataaaataggcttataccacacttaatgtcactcacgtatttcctctgttcaaagtcacatcccttttctgatctgaatgatgaaggaggacgtttaaaacatagacatctctatgctttattatagagtagtttgtaagtactgtttacagtgccaacacatgaggaggcagcagcaactactttaatatgattaaaggtagcagtatttgctacaacaaatgagttctaacattggccaccagagttgttttttttttttcttggtgtctggcttactttctacttaatttgttcaggaaaaca

SEQ ID NO: 1881508 - DNA, 4001 bp, Homo sapiens
tatacctaggaattaccataaagtgatccagaagtgacaacactttttgctctttaaaaaataagaaatgcattgtattatgtaatagtaggaaccaagctaagaaacacaaatattgtgggtatataaaaacattttaaaatgtgttattccttttttaatataaaatttgctcaattaacgtacttcactgttttccataaactttaccagagagttaacaccaaatacacaaacttgaaccattaaatacatttaaaggactatgattttaatttattaaattgctaggattggtagttttggtgtcattaaaataaataacatctccccttgttgctttctttttggttgttctttttctgcaccgcagaaggaaatacactgactattcatagttctcagtctcagaatgaggttttgcagcatctatacttttcagcatttcggttacatgatgctttcttgctttgtgcaaaccttgtagggtacctgggaaaaaacatccacttgaggtcattgccctttacagctctttacaattacatcagttttgaaggaacgccatttaaatttggtgtcagtgctcagcaagtgtaaggacgcagagtggaacagcagaatgcttacagtctttcaaaaacagtgtgtcctctcctcccccgctgtattatttaaattaccgttctcctcacttcgggcagggatgttgggaattatgtatagtgaggagattgacactggttgcctggaaggtaggggacgggcaggtatgggtttggtgtcccgtacagcgatcgctttgtgggtttagtacttggtgctgacaaataatggagtgagatccgaacataaaggcaggcagagatgttttggggctgaatcaccgaatactagagtaggtttggggctacgtaaagacttgcttgaaaacaactaccatttagttgcgaatccctcccctcttccctttgattcgatgtttaaaaagaatcccaaatcacagttggacatactcctgccacagccttgggcagaagtcttcaaagcatgaaaagatgtggtttggcgactttgagttgtcgggtatttttgtgtcccaggagtgtgagaaaggggctacgttccgcgtcttccggaggcgcacagcaagggagtctcctggtgtcatctcgggccattacggcgcttagtcgatcattaggtctgtgggtgactgtaggcagagccgggagttgggtgcttggcgcggagggtgaactcgcgggtcttgagctgcaactagaagctgctcctagcaaggggtcgggtggagatgaaaagactgtggggaaggggaggtggttgtatgcccagagatatcccggcgtaactacggagtccaggcccagagtggcggtgtgtggcgaaggcgcagcaggcctgcgcctgtcggaggacggcagatctggacgcgaccgcgcgggcgtgcctgggtcccgcttcctgcccatcgagggcgacttccttcgggctcagctgtgagctccaggaactctgcaacctcccgacgggcgccacgctccggcttgggccggcccgggagttggcggagctgcgcggcccggccgggcggccggtgaggctttcgagaggcaccgggctcgctcagcgtccgcgcctctctaccccgccgcgccccctccgcgcccacgggcccattttttcctagtcttctgcctctcttccttcttcctccctcccctcctcctccacacctttgtcttcttcctcctccctcctcctgcttctcctccgcagtttggatcctacgggccccctacgtgccgcgcccttcggtccccggaaccgcccgggctgggggtgctgctgcgcggtgagacttccgcgggcggcgggcggagagcgggatttgactgcgaaagccaagggggcggggaaggggaagccccggccctcgggggcgcgcagtaaactgctgcacacgtgcccgcgctcccgaggggggcgcccagtgggctcgggatttcctggctgcgccaccgcgcgcctcgcccccgacgcccgccacctgtgccctgggccgccttccctgacgccagcggccggaggtcgcgcgcgccgggtgctgcccagcaacgaaaggccatgcggggttcgtccctcagatgccggtgaccttgattgaagtcacctgccttctctagcttccagtcctttaaaacgagggtttggacccggtgccttctgaacccggtgcttcactgagtgagcaagtgaagggtgtgtgtgtgtgtttggggtgggggcgggggcgaggggagggaggggcagcgttgccggctccccagagccaggtccaggcagaggtcgcgcccagcactgaccgtcggtcccaatccgcagactcccgagggcgatccaaaccgcctaagcatcccaagcgtccagcacccgcgcctgcgttcctgagtaatccagcgccctgcagcgtttttcatgcacacgatcaaaatatatcagactgcagagagaggctgtattgtaactggccagcttataatactataaataataatataaaaggtagttttatattttaacaaatattgctcactgacagtgtgccaggaaccaaagcctattgtttcattgaatgtacacacccctgggattggaatgagtagaaaacattgttatgcccgttttacagatgaagaaactgagactcctgactatcagtaagtggctgtcaggatttaaatcaggctttgtctgatgtcaaatccagttggattttctactctaatcggcttttctcattaaccttattaattgtttcccatcatagaccttacccatttttaattgcttattcattggaaaaggagcttcgttcggatttaaggtaatcaaagaaaaaatttagtcagacaaatctaatgactttttttctgttccacgcatttgaaaacaaatcacaccaaggcctgcggatctgaacgtaaacctcgttgtgtagaaagaaggaaacacaccattttattataatcaacaaactaaaccgtgtgtagagggagacagccaggtgatggaaactcattaggttcagaaaccagattgtgcgcgcggttctgagacgtagccaagcgacctcacgcaagaccctctttggggcttagttttcttacctaaaaagccagggttggagatcacccctcagggtgttaaaaagacgtgccagcctcgaaccctcctgggtatggtggaggacgagcgccacctagcgggcatccctctagggttgtgcgtacttttatggggaggtactggaataagtagtacacgaaacggactgttttgcttctagtttcgtgtacacagcctcgcgctgccagagatctaacagcggagatgtttcattttaaaaactcacccaggcacgatcaacacctccattgaagactcacctcgctccagggccaaggggaagggactggagcaggacgcgggcgtgttgggatcggtttcagaacggaggccacagcaagcccctggcccacctcctaccctatcctgcattccacagctgcttgctgtgagtatataaccagagctctcgctggatgatcatttagggcacaggcatccctgtgtgttttattggcgccaaaggaatgttttgttttgttttgttttgtttgtttttgtttttgtttttgagatggagtctcactcttgtcacccaggctggagtgcaatggcgcaatctcggctcactgcatcctccgtctcccgggttcaagtgattctcctgcctcagcctcccgagtaaccaggattacaggtgcccgccacaacgcttggctaatttttgtatttttagtagagatggagttccaccgtgttggccagtctagtttccaactcctgacctcaggtgatccgcccacctcagccttccaaagtgctgagattacagccgtgacccaccgcacccg

SEQ ID NO: 1881509 - DNA, 4001 bp, Homo sapiens
aatgcgatctgtcacaacaactggaacatgtctccgcgctagcgaaaataatgttcgtgattaggaatcattacgcacgtcaagccgagtccattaagttgtagggagaaattagccttgacgggcagaatcaaactacaaatacacaggcctcgccttcaggaggccaagcggcggcactcgggaggaggcagccggagtcggtgttttcttaataggaaactgtccagagaattaatactcccttccccgcacccctgtgggattctcccctcctcttcccacagcctagtccccaccctaggagtgggagggggcgcagaggcgtcgcaaacattaactggaggctttgaagtcccacaggtcccccgggccagttcccgcctcaccaattccaagctgtgtgaccctgcccaagtcacttgaccctcctgaactttgcttgctgctctgtaaaaaaggtataatcccacacacttcatgggttctccccaggattcaccgaaaggtatggtcagtgcaagcacgtggaaaccgcagaatctgttcaaccttctttcctttcctggagctccagtctctgccttaccctggtgaagtggtggggactgcagtgtgtgtgtgtgtgtgtgtgtgtgtgtgtgtgtgtgtgtgtgttggggctgaagcattgggattgagtgcccagaactgggaaacttgccaatcaggcattgagcaaggaggccagaatctctgaaactgaggagggtgagcacggagcaactgatgtgccttgctgggccttgtaccctccttcctgtcaccccaggtaggaggaacggccctgggtcctccgccttgcctgtgaggcccgccagagctacctgcacactaggatctgcactgtcaccaaggagtggcacgtggtaaatgaagccaggattaaaagccttccctttcaggctgctgccccggtctccactggagacaaaaaaaaaaaaaaaaaagccatttactattcacagtagggagttttggaaagatcatctccctcttctgcagataggaaggaagggaagaagaggctgagcagggtctagaaaggcgggttccatccagccttgtgtgcctgatcatcttttaagagcttgctctgtgccatgcacccactccaaagggctttaactacgttatctccttttatctccaagccaacctatgagtctccttattccttggggagaatgagggcctgagtttagggaactcctccaagggtctggaagctgggaagaagcagaagtggaagataagcctggccctgccaccaaagcctgttcaccactctgccatttggagctgcaaggcttcaacccaccaagtcttctatctggctttttcatggttcctatgggccctcaaattccacctctcaaagggctcaggaaaatgaaatgcgctaaaggtaaaacattcagctctgtgcctgacataacattgatgcccatttagtcacttactctctccgggcctcatttttctcctgtgtaaatggtacccttatcgctgcctggggaaaccaacgcacgtgtggcccgcgctgagtagtttggagccagacagactaggttcgaaccccagctccaccggaaatagccgcggccagggtagtgttgatccccaaagtggggtaatggaagttgagctgctggaaggaatgaatgaaataattcatggaaagcacttactgcaggacaggaaagcgattaggcgctaaataaagcgctggttaccaggatgcaaagattggcccgcacaggcttggaggtttgctgcccagggagaaggagaagcagctctcaggccctttcggcaacttctcggcttcccttgcatctctgaacgttagtgatccggacctcagatccggtttccgagggcgccagggtcctagggctgaggtccattcaaatgcttaggcgactctgccgcaggcctccggaagaggcccggtcgttaagaaagggggcggggtaaggaggaacggctagcacctagagctggggcctggcctctgcccccaccgccctgcctttggcaaccagcgaatcaggactgaaacgtagggacacagagggacagagactaagtccaggatagcgacgatcagtcaggcagacatggagacagagagatagtgacatggccttaggatcggcagccacgaaaagcgctcttacaaacatctgatattccagtgaccttccttcactaactccctaaataatactgcgcctcacaggcgctaatccgcagcatattttatttttcttttggcactgccatttcttgtctcccactagactgtaaactccaccaagcgggcaatctttcttctctgcatccctggcacagagtaggctttcagctacttttgctgaatatctgagcactaaataaatgaacgagcaaagaaagaaggaaagagagaacagacaaggatttcacaacaaagatttttctctttaaagaaatctctgtttacgcatttcctcggagctcattgttgagattttcccctggctggccaccttttgaaggataggactccaattctccttcctgcatcctgtggccaccttcccaatgtgtgcttggcttgaattctcctcaggcctgagccctgacagcagggctcaagcctcttataaatgagacaagtgtatttaggaagtgcctcactgcaggcagtatttcatggaaaacaattaataatataaataaaatattagacatcttaggaaagaattgtttttaaaaattcttctgcagattcttttggacagagggaatgccctggaaaatgaagctccccctcaatgtatttcttttctaaaccttaaaagcctatatattgaatttatttttaaaccacaattgcagttgcagatgggatacacataacctattacttcaaagaaggtttccagtgggggctgacttctcactgtttgggctgttgttacagtctctccacactttctgtccacctcttaccatcttcgtaaatatattttttaaatggtacatgtccttgtttaactttgcaaaacttattatcagctaggctacaagtatttagtggtgccaaatactcaagaagcatgtaattctttcactaccccatctttgtatttggaaacggaggtattcattttttcagcaaagaactgtgaactaggtcttcaggaaagcctggctccaaatccacctctgtttcaatggggatttttcaggaggaagctttcattgccttccctcttgagagtatcaaaaagatgtcaggcctgagtcactgggttcagcttttccaaatgattgctcctggacgagtcatcagcttcttttgcctctctgactctcagggaatcaatactacctgccttcagattcaagagaactggcggcggagaatctgttttgtgtttgtttggtttttttttttttttttgaggtggagtccgtccagagtcttgctctgttgccaggctagagtacagtggcacgatctcggctcactgcaacctcactgcctcccgggttcaagagattctcctgcctcagcctctcgagtagctgggactatgggcacacacctccacacccagctaatttttgtatttttagtagagacggggtttcaccatgatggccagggtggtctcgatttcttgacctggtgatcctccgtcctaggcttcctggagtgctgggattacaggcgtgagccaccgcgcccgcgtggagaatccattcttgaaacataaaatgcttcacgtaggaatatttcatctgaaaacatttcagggcttattatgtgtcaaaccctgcgctggaaatccagagagcaagagcaattgctggaaaacaactattccaacatgcagcactggcttaagctcatgatcccaatgggtacgggggtctaaatccctctagcctcaacaaggcatctggga

SEQ ID NO: 1881510 - DNA, 4001 bp, Homo sapiens
tagataaaataaatattttatcagtttcattaggagctaaaaaacagaaaaacaaatctacacctttgaaagggattacatgtttgagtctaagttagtattttgtttgattttcaaattgaaggtaaaacaaaacgggcttttggaaatatccaaaattgtttaaacttattaagtgaccacgaaggttcgatgacaatgcatacaatcgggagaaaggagatgttagtggggtgaaaaaggatctgcaattataataatctaaaattttgagtattttccaaaagttatatttacaagccatgaactctataaatatatggcaatcaaattcagtgactttgaaagaaccgagggaacttgtttggatccaagaggatctagagtctaaaaaattgattgaatcttgcatagaattttttcaaacaagaaatttggagtttaaagaaattggatttattgtctacaattataactgatagtaactactggcagaagcaagctacaacccattccctttatccaatgccatttgcagtgtattaacagttcagcggacgttaaagaatctgttaaaagctcaaaggcagggagaagaatccgttgatcctagagctctcaaagaatgacaacttggtaaagctactcaccaaatagcaaataaaatgagatgacatatgaagtttaggttttggacatttttggttctgggagtaccagaggaagagtaaactcactcatttgctctcctgctagtaactgcacacctgttttctttgacaatttatctcttctctcctaattatctgtgtaatttggctggaactgacgcaactctctggcatcaagcatggtgctagacttggcaatgggattagcatattctcttagctttttgttgttgttttgggttgacaacctggctcagaaccaagggccaatcatcagaatcacgttgtattaactctagtcactcttatcagaatttttgggtaagaaggcttcacacccctttcccactgtggcagataaactatgcaaccaaatctgagccgctagtaatattccttgacttttttttttttttttttagatggagtcttgctctgtcaccaggctggagtgcagtggtgccatctcagctcactgcagcctccacctccctagttcaagctattctcctgcctcagcctcccgagtagctgggattacaggcactcacaaccacacccagctaatttatgtatttttagtagagacaggatttcaccatgttggccaggatggtcttgatctcctgacctcgtgatccgcctgcctcggcctcccaaagtgccgggattacaggcgtgagccaccactcgtggccgtaatattccttgactttatagagggagtccatctacagagggagaaaataaacctaaactacagaggaaatactagaaatggagagaaaacgcacccttatgaaaatatttgagtctcctaaatttatccaacttgatctgagtttctgacattaacaaccaaaataatagactaaaacaaagtgtttataatattttcaaacgttgtattaagcttcacatctaatattttatttcccaaatcgcctagaataaggatgggagttatatttactaaatattctactacttagagatccgagtttcaagaaaagaacgaattatactttaaaaggcagatgtcaattaagtccacttcatcttgacatactttaattagaaatcttcggctcgtgatgacgtaagggaaatttctgagtttgaagagtgctcatgagagcatctgttaggtctagggtgaggttccagcccatgctgaggtccgaggggagtgggtggatgaacgccagatagcttcaagaacactcacgggccataggcaggtgaatacggtttcttcagcagcttacttccattagctctctcacactctgctctgtctcggctgcttgagccggccatttccacgcacagctgcgcggccagctctcccttttcttccgggtcagaagcttaactctttcctggttcctggcttccccctgcccgccttcaagacggacagctttggctcgctctctcgttctctgggcaccagcgccatgttgagccatgttatgccaagccgagccaagccacgcccaagagcccctgcacagcatcagcagggcagttataccttttacaaacaataggggcatagagccaagtatgagcttacagaaacaggttatataacaagtagaggtgtgtgcctgtgcaccagtcccgctgagtcatgcaggccgggatgtctgcctcggcccattccttgaccaaagcacatccgtgtagcttacagcattcacagcctcagctgaaagctctggtttctagcttcctttaaaaaaaaaaaaaaatactgggagttttcttatacaagtctcctaaatgttttgtggtgtataagccaagcttctaggtagcttatctaccatattactagaaacagttctatgttcagctttttacattttctttgataatcacatagatatttttaactcttaaatttcctttaagttgaatatggttatttcaagtgactattattgcctggtaaaagttatagtacataatacaaagctaaacagtgattattgtaactattggcgattatgaatggtatggggatttgtcccagtgagattgtggcacttgctgaatgtaccaaaacacatcatgccataacattatgaatgttattttattcaactcaaaaataaaatataagctctggatacaagtgactatggaaagtggaataaaaaacgaaattctctgaacattctggatatatttgccttctctttccaattgccaaaataagtctcgtctaatcagttaatgataaattgatccctcattgtctgttggcactgagagcattctcctaagtataagctagtatctccttgaaatatgttcatcaccacaattaaaatgtaaaatagactcactttttaaatgaggataatcaccgccactttcactatactaccctgtccatatcaagaatattgctacttttgagttatcactcccagatgttccaaacgaagtttgctgcagagaaaaattatgaaaaattcaatcatagacctaatttcttaagaaaaataacagattatagataacaattgaattaggccattagcagctaatagagtgatggtagaatcagataatctacattagtaatagacaaaaatcatcaactgaaatcagggacggcaggattgataagtgacacagtgtgtgtgtgattctggagtatgcacagcgtaggacttggtcaaacaaacaaatgaaaacagaggaagagaggtaaccatgaaggaaagaatcttcataaggcctgtatctctataataacaagaggcgttctgtcaaggacacctcgcaatgaagaattatgtccgttctaccagcagtcagaactattagaacttttaacctggcttagatgttttaaacattaaattttcacaaggaagcctgaaaattaaaaacagatctgtattcacctagtcccagacagcagtattctcttctattttctgaagggtttgtcccagtgagattttggcacttgctgaaatctgccactcactgaaaactgctgctaaaatatatataaagcaagcactgaaatctgccactaaaatatgtatagaatctatagattgctgtaacctcaagatgatgatttaacccctctctggcaagtggaatataaggtcatgtctttcctcgaaatgagtacccaagatttgtaggcactctgaataattcaggtatcatgtcacaagtgaaaaagaaggtataaaaatttagttattataattcattaatttagggctaattctcccttgatcagtcaatgctaagacttacaacccacatttcactcaaaaatatgaagcttatatc

SEQ ID NO: 1881511 - DNA, 4001 bp, Homo sapiens
taatctaatgtggttttgtacccgaagtcttctaaataacttaattttctatgtaaccatagtattaatataacaactctgtactacagtaatagccttttaaaaatattcaaaatatttcatgcctgtagagggaacaaataaaaatatattcaaattaatatcctgttgtgatcattgtaatgaacatacttaaacctttgcttcatgactcaggttcatcattttgcttagtgattttacttttctctagagtatgtgtaagtgctgtgaactcagcataatcttgggtttatctcttcctaaataaatttcacctacagccatgatttaattaatgtgccaccacattattattattgtgtgtgtgtgtgtgtgtgtgtatgtctgggggaattgccttttctaaaaacagtgtaatgcacattctttaactctaacaaaactggtctccatatataaagaatacaacatcggtggtattctgaagaaaggctagagcagtatagtcaaaatgcaatgcaggatacattgaagtgtccaaagaataaggcaggtggggcatctttatgaaactgttaccaatcagaagatgagcacagagtggagtctgtgtcagagaggtagtcctgaaacagggctttaaatgttgtggttaagaagataatatgtatctcaacatttcaaaatcaggtttacataagctactaaatattcaccagggacagtttatccttaaaccataaatctatgccaagtatagttcataaaactgctatagggaagttctcatttgtctccacaatgtattctgagaaaccttactgtacagcagattgttataaaaattttatattttctcataggaacaatgttataatttgatgttatatggtagaccaagcatttaataaatcatagacatgactgaaaatatgtctgaaagtaacatacaactacgaatttgtgcaataattttaaatgataaaattatgcttggtgttctgttcaatgaacataaatgtactatatactctgataattcacaggccccagtgaatcataaaatgaaagcagaatatataaaaatacaattctgctacattataaatttgacctatcataagattaatttaattttcctctgtgattttgtatattgttttctctaaggacctcctcattctattactacacccccatacacaactgaaatagttcctatattcaatgtaaattttaatactcaaatccatcccacttacagtatgattaaatgttgaaactgagaagcatctcagaccaaagtgtggaaaagatcagatggttatttggaaaccctatttctaaatggtagagggtgtgcctgagctactactgacatacgtttgtatggatgttttgtttgtttttgttttgttgtatttttggaagtcaattgtataaaggaaaaaaattactctttgagcaattaaaaaacacgtggaagaatctccataactctttctctctgttatgttcaaggaggtgtcatttcagatactgtgcaaatgtatttattccaggccttaagtatatttctttaaaattttggtcaatatgctcttactgttttttttagctgtttttatctacagtatcttcagtattttctgacatcagctattcccagtctcttatatctttaattttatcttgctgaggcaatttggctaataagcatgttcaaatttcacctgtgtcccaatgtaaacacacacacatacacacagaaaaacaacaacaaaaaaattttaagaactcttaccttttcccagacatcagtttctgtgtttataacaaaccttcaaaggatgtctgtgcacgctgccgctgcctctgcttcccattctcatgacggtggagcttcctcccctctgctttctggctttctcaaatgttttttaaagtaagtagctgacaaagtcaatcagcctttgccattcctcctctttttctcctctggaacatgtgacactgtcaacacttcctggaaatcctgcactctctcacgatgtgctcttgtactcctcctgcttttactgctgtcttctcagctttttcctactccctaacacagtttttgctctaatattctgcacttgtttatcttttccagcacagttatcttcaccaatcttatttatgcacagcgtttttcgtttcttcacagagaaagtttcccaattgtccatccgtttgctgacttctccaggactcacattccgtaatacctgctgggaattctgagctggttatctccccagaagttttctgccctagataagctacttgctttcttcccgttttatcagtttcaaacctaactgctctctaaaattcaggtgcgatatcaacccggctgtgaaataccccagtttcaataaatgctccttcacttgtgctgctttctacctacatttagaacctctcacatctattcttacatttgtttactaaatgtgttcttatcactacaacagtattttcaaatttactgaaggaaaagaaacaattccgaaacagcaaagttattaaatattcagttagaaactattttggtaatatgcatatctatatctatatctatatctatatctatatctatatctatatctgtgtgtgtgtctctctctctctctgtgtgtgtgtgtgtgtgtgtgtgtgtgtgtgtgttaaaagttagacttatttccaggatttttttattagaatttgtgaaaatgctaacagtgttaaaatacagtgaccttaaaagctaacaatatgacaaggttggcttcatttttagaagtaggtacactgtctccaaagggttttatttactacagatatttggtctgtatatttagtgctgaattgtatgattctaaacattaaaatgtaagcagcacatttaacataaaaaggaaaccagctctaggtgagatacatgtgtcacagagattctcagttattaatgttgctacaaaatttccattctaatagcaccacaagaatccaggtatgcataaggcagtctccattaagaatcagtagcaatcttatgttgcaaaacatagggtgtctttagttttaatatgttaatttttatctcaattctgtgatatcacttcagtgtggagaaaactgaaaaaatacacatcaggttcactgctgattaaaagcttttatttacatttttacctgatttttcattctaacctaatatgctaattcattaaataaacttcatattatcatattgtgaattattatcagtagcccagatggaatcttcatgtgaattcaagataaaggcatcctatctcaatatgctttacttccaactgtcatactgatttcgttggaacatacatgtcattgctatctatcaaataattgttgcaacaaatatataaatacattatatttgtgaatgaatggcagctccttaaactgtggcatgcttgtgtaatacacgacccccacaacagtgtgtgctgtgtgtacaggccatggactgtgctacggtttgcagattaaatgtccctgagcttcagttacctaatttcttaaatgagaatggcacctatctcatgactttttgtaagcatatggaaaggtattacaacgtgaagtataaaatcattattcaataaatctgttttctgtgtgtgtgttattttttaacctatacttcagaacacactgaagattactttctctaagaatggtgtcctgatgctctcggccaggggtcagtacgtttttttcctataagctaccacatagtaaatacattaggctttgcaggccgtctgttctctgttacgactactcaaccattgtgttataaaagaagctgtagataagacagcatgcaaatgaatgatcgtgattgtgttctaataaaatttaatttacacacacaaacaaaaatagactgtatgatttggtccacaggttatagttactgactc

SEQ ID NO: 1881512 - DNA, 4001 bp, Homo sapiens
cctgggagaggccactgtcagtttcagtaccaagaattattgggcttctcctgagcaaatgattccttttacccttatattgcttactaaaagtgtaaatgaaattcatgaccccctttcagcagggaagaacccttaagcatttacctagcagcatattcctaacttcatgattttgttcctattctcattctgtgagcccattttctttattcatgtaatttggttttcatttaatcttgtcttattttctgtatccatataagccatcttaacggttctctagcactaaaaggagataaatgtactaaagaataagcaaaactggatgataagagtttagaaatgtgaaagatattccagaaaagacatcaccctatggtgaaaaattgtgtcagataactcgcatggtggttaaatcacaagtgtcaaagtgataacttattccgagagactgacctatgacattgctgatgtgatgcttttctcagacagtaggattttggtttttcactaaagagcttcatcatatcagcaacaagttggaaataccgactttaacttttcttctaaagttgtctggaaagcataaaaatagagatcggtggtggggatttgggtagctgataagagaacatgttactgctactattttctgatttttttctttcagttcataaaacagataaataatgtatgtttcttttttctcttctaaaactttatattagagtgtatttttagctagacatgtagttgaatacatgcattacctttctctttaaaaaaattgcagaaaaccccagaataaagatgaaagaagctctattttctttcctttttccttcagtagtccctggcaaatgagaagaaagaaggatttctcctgtgtaaaaacaactgatgtactggtgtattcaataaaaatatatataatcatttgatattttaaatattcaatataatatgaacttactttaattgtcaatattcatattacaacaagacaacacaaattaccaatgattacaggcttgtcttccatatacaccacagtactattattaaaatcatgacaggataatacatctgtatgaaccagtacagaaataaactccataatttaccagatttttccctctttactatatttattatatttctaaaaataggtgaaatcacaaaattgtaatgttccatctttttgacaatcacaactaatatcttctctgtaattttaatttataaaaaattggcattttaacgtagttgaacaatatattgtgtccatcacaacagtggggtttctcactctatatcccctataaagaactcatcctacttgtgttaaagaatatgaaagtaatttttatttttttaattataaatttttctgtggttggattatgacacgcccatggaaaactttatagttaaaacgcatttacaagaacaataaaagagtcctgaggtgtgctatcagcctttggttcagtacagtgctttcttggggtagtttgtatctggattctccaccttaattcccatcaaattaaatgttttagctgaggctattttgagaaaatgtaaaacaaagaaaacatgtgtaaggattccctgacagtttaattatccaagttctcccaaatccttgaaatgaaagttaattgccatagaccttaccatcatttcactttttctatcaggactaatcgatcctaagatccctgtaaaaaggagaaaacttagacagcccagattaaattggtccactggagtacatattgaagagacatgtcgaaattcagcctcttaaaacacaccctcttgaaacccgctctgtagtcattcatttctaaactcccctttcttaaagattgacttactttctttactggggatcttggatgagaaacttctctggagagaattcaagtctgggcagtatggctggcatgggcctgcggagagattacttcagtgaccactgaaacaaacaccacctgtgagctagcacacggcagttgtttaatgaagcacagcatcacatgcagagcaatttctgatgggaaatgaagatcccactggaaattgctaggggcattagacaagcaaaatgtaattatctgaactgaaatccagctgacatctctgacaacaaataccaggggatctttaaggatcagatgctccattttaagtcagtgcctctggcttcagtgttctctgctcccgcttcgtccccccaaggaggagagaacacctcacactgagtcaccagcatgtattttgtctgccaattctttctgctagcagagaggaggtcgggcttacactaacagagtaattgagacacgtatccaaatattttaggccaaatgaattttgattctttccaaattaaaagaatcatataatatttatagaaactagaattctgccttgcccactttcctatcccagacagagccagtttcccttgcctttttaaagtagacacttggagatagggtatcttggattggccctctgtggtgcccaatgaagacgttcatttaaattgcgtcttttgtaaatgaaacttttaggaaagaactcttggacctttcagccatggactttgttgttgttgttgttgttgttgtttttaagacagaaactaagtgaacagattaaaaccaggatatgatctgagctgtgccaatgtttggtcttgggattttaagtacctcaagtgagattagatactacagtcacaaagaagggctttttgccttaagaaaaaaaaaatgaaaactttgaaagttttcaagaatattaagaattagagctagaaaaaatgtctttgttcaattatcttttaatggtgaaggcgtagttcttctagtatatgtatcatggatgttctccattttaatttttaatatttcagttcacattagctgaagtgccttcccttgagaggatttttataatctgtcttagctgttagaaaattgttgctggtactttacttagctcaatttttcctctgtttaggttcatgctattagtcttaattacattctactggacttctctaaatagttctttcctttcctccttgatttatttacctcatcataggaaaaatactgtttacttcctgaacaaatgtatcgttgtctctgtcattattttatttgctttgagtcctctcctcattgcccctttaaaaagagtgagttttggtcctgttttgtgccattatctggcataatgattaacaccagtgaactggtttgaatgatgatgtatatagttaccataagtgtaaaacactgatggggttggtaacttcctttaaaaaaaaattacaatctcagataatgtacatgaggaactcactctcaccattacgtagaaaggttgtgaaactgaatgtagggattgcctttttcacgctctacttctccacgtgctaacatattcagtcttaattgtgtaattatttgtttaatatctgctctcctctttagactgaagcttcatgagagcagggccacatttctctactttttctccgaatctttaaaaccctgcacagtgaccgttacatcataacatgattaacaagtatttgttgagcaaagaaataaaagaagttggatctcagaaactcacagagccttgtgtagcctgtcatctcctttatcttctctatattactccagtcctttcaccacctctaccttttagtttggttttataagattatttgttctctgactcatatttatggaaatatagccgattaccaacaaatactatttctacttccctgagctcctgaaattaaacacaaaggaatttgtggttttggattaatatttgtcaactattcaaaataatgaactcatctaaaaaaacctaggtcctcttagcaaaattgaccttatttaagatgattaagccacccattcacattacagaattctagattttattctttgccaaattcc

SEQ ID NO: 1881513 - DNA, 4001 bp, Homo sapiens
cgagataaacattcatctaacagtcccttcctcttttaccttttgtttgtttgtttttactttggcaccatttatgaaggtccaaaataaatcccttttttatttgtttggttgtttgtttgttttgccttctaaatcctgagtctcatctacaaagtggaaaaaaaaaaaaggctgtgaatttccataatgtaagtttcgttttctatgactcgattatggcaagtgatgtataaaggctgagtggagtgacaaggaggggcacagagaagagggaggacaaactttacaccagcaaatccaacaatcggccccttttgaaaaatcattagcagcctgctggaagctccaagtctcccagatttgggatatgagagagtaacaacatgaatctagaaaatgtggtgcctttcgtgcatagatttgaattagagaattcttggtcagttttgcatatgaagttggggagaaggcgtgggcggcgcaaagaaaaacagagaaacacctccccctgctgcctggatggcgaatagcagcaaagatgcaaaaaaaaaaaaaaaaattccatggtcatataaaaaccctcagcctattccgagggtttgcaaaggattcactatgtgcaggcagctgaattttatggaatgcattttcctatcctaagttaccttcaaaggtcataaaaaatgatcttaggacattattacaatgatgatgctttccactgggcatgttgttatttgtttcttgaacaggaaatatattagcgtaacttttaaattaaaatgatataaaagttataattgaaaagtcttgtttctgactgccttacgtatacctagctacttttattagcttttcatataaatataagtaaatgtgactaatgtagtcttctttttttccttcttacacaataattagctgtttgacactcttccggatattgtttttgtcacttaacaacataacttggtgatcctcccagagccgaaaagctctcccagatatgtttcagggcagcgtaaccttccttgttcttccttcactgagcatgttatatgtggaaagaacacatccccacttggggaaaccagataaattgtttaaattattgcaaatgtgaatgattttaatgtagaaataacctttttcattccacattaatcacaaatactgttcacaacccttcgtaataaacttgtctcctgcttatttttttttttctggtattccttgtgattagaatctctcgccttggtatccgctgtgttcaagagcagaacagagctttgaactttacaggctagtgctcagaattaaaagtgcttaatgccaccaagatttctattaaaaaacccagggtaaaggaaaaagccttttgcttcagctgaaatgttcttgtaaagggcaaaatggaaaatacaaacaccactgccgtttgctggttggataccacagccatcggcacctcctggaaatggcaagcccatgagttcctgatggaagccaaggttagtcttattgcatttgagagagttagaaaagtgtctttcagtgtggacagagagccagcaagattgtgaaggtcaaagaaaaatccaattatccatagcaaacactgaccatacaattaaattacaccagtcaggaaagcatctgatcttctgcaacggacttcttccagcaaatttacccttgaatcagtctgggccattcattggcagccagctgatcagtttccttctgctgccctgcatcctgcaacatgtctgtagcagatgtatcactgcccacctacatccccttggcccaccccagaggtcacctgcagctgcagtggtcaactcccaagcacgcagacatctcagcatcaagaacctgcttctctctgcccaagggctttttctggccatagaagtatcccctgcacagtccagatatgcaggctggacagaagttccagggagctaccattcccaagagcaagcctcaagcaatgcctgggagataaacacccagctcccttgcttgccccttgccttgctggggcaatgccaaagtgtgtggtgcccatactctcagagggacaccagtgcgactgagccccaggtgggacctactcattaacatgctgtttattggcttttctctcttccctactgtctcatcatttttctgggattgactcctgtgagagccttgatccagtcaagagacagaaactacacagtaagttcaacaggacaagtgtaacacagagtcattaactacaatgaagagtatagatataaggaaactctacaaagcaacctagagctacgagggagaacttaggaaaagacgaacttgagaaggattcagacctcttgggaaacggtgaggttcagcccacgagacagcagagaagttagctgctttggctaggctggagccggcctggaattgctgggaacctccaggtgcagccagcctccgttgtgcacgcagggggcgccaatcagcaactgatggtgagggatggagcccgggagctggcgggggctgcaggaggctgcagaaggagcggagcggctactcaacgcctgaccctgccagctaagtgcagctgcacacaggccgagcagaagcttgcaaagggaggctgagtcccggacccaagtgtagcaagcagggaaagggagggtagggcaccggtaagggcaggagcccttcggaggctcactctgtgctggggagctctgctttccatgtcaagaagcctgcacaaaaattatcaccaagccggggctgcaaagtcacagaaggaccagttccacccgctgtcctcgtccacccacactactgagccgcggtccccgcacaaccggcggaaaccctcctccagctgcggtgtcctccggcgccctctactgaggaagcctagcatcgcgcgcacttaaaggagacgggctcaaaggcacgccttcgttagtcccagagcataaattaataaagggtccattcagagctgagaggcacaaaaaaaaattttttaaaaagataaatacacctccaaagtcccacttgcactcaaacccttgtctcaggatctgcttttgaaagaacccaaatcacgacaatgtcagacagagatgtgatttttgttgacaaaaagagtcagactctaaaatatttaaagagatttattctgagccaaatatgagtcactaatggcccatgacataaccttcaggagatcctgagaacatgaccccaaggtgattggggcgtcacctagatgtatacattttagggagacgtgagacttcaattaaatacatttaagacatacattgtttcagtccagaaaagggaaagtggggaggtctgcttccagttgtaggtagatttaaaatttgtctgatttgtcaattggttgaaagagttactatctctagaaagaaatgtctcggttacaataagaagttgtggaaaccaaggttttatcacgcagatgaagcctccaggtagcaggcttcagagagaatagaatgtaaatgtttcttatcagacttaaggtctgtgttgatgttaaatgctggccacgtttcctgaattcctaaagagagtagggtataacgagacatgtctgacaccccttcccgtcatggcctgaaccagtttttcaggttaactttggagtgccctggccaagaaggggtccattcagatgcttggaggggctctagaattttattttttgttaatattttaatcttggctctgtatgacctcaagaaagggttttatcagcttagagtctccactttctcatctgcaagatggaggtgataataaacagtccacctcacagggactattcttgagagaatgaaacaaaatagaccacctgctatgcacttggtacaaaataagtgctcaaaataagtgctcaatatcacctcccttcctccttttcaaaccaaatcaaagccccaaagtttcttcttcctttcttt

SEQ ID NO: 1881514 - DNA, 4001 bp, Homo sapiens
tttcactctaattgaattttatctcaagaaaatagttaaacaaatattgacttctagttagtgatatactttcctaaatgtttaggggtaaagtttactgaggtcttcaactttaaaaggtatcataaaaataaagaaggtgaatcagtggacgtacagagagatgataatatgtaaagaagccaatatagcaaaatgctaattgtacaatctacatggaaggcatttggatgttcatgatacaattatttcaatttttctctatgtttgaacaattttcataacaacgtgttgggaactaaaaggctttgctactactgcattccaaagaattttttaaattgttgatgatgtaattgctagtctctgtcccaccagagactggtgtgaaactgggtgtgttttttatattttatcacatgggacaaaaggcaaatcaataacatcagtttcattcaatttcaattttcaaggcatatcccataatacttcagctcagatttgcaggttgaatatctagaacaacacaatgctggccacagatttccctcccctcccctcccctcccctcccctcccctcccctcccctcctctcctctccctcccttcccctctcctcccccctcctttcctctcctttcctttctgtttgagacagagtctccctctgtagcccaggctggagtgcagtggcgtggtctcagttcatggtaacctccgcctcctgggctcaagtgattctcctgcctcagcctcccgagtagctgggattacaggcacacaccaccgtgtccagctaatttttgcatttttagtagagacagggtttcaccgttttggccaggctggtcttaaactcctgacctcaagtgatcttcctgccttggcctcccaaagtactgggattacaggcatgagccaccgtgcctggctgtggctgtggatgatagaaaaatatttctaattaaattaaatcatacgacttcactcagttcttatacttttctactgctgaaaatatgataccatattttggtgaaagcaagaaataatttcaaaggaaatatttttaagggatgtagttaaataattatttattttaagtttaaggctaaaagcagataaatgacagtatttcctcctgagtatttctaaaggcttttaataacataaatctgatgatagaaaaatatttctatcatactcaggaggaaataccgtcatttatctgcttttaaccttaaacttaaataattatttaactacatcccttaaaaatatttcctttgaaattatttcttgctttcaccaaaatatggtaccatactttcagcatagaaaagtataagaactgagtgaaatcgtatgatttaatttaatttggttaattctaccttggaattaaatacaaatacatatcttctggctttggaaaaaaacaaaactaggacaaataaaccaaacatagcaaaagagaagaaaaatattctgagggggagttgttctacaaaacagaaaattttccttccctctttagccattttttttaacagcaaaaaaaaaaaaaaaaaaaaaaaaatacctccaggaaagaacaataagtaaaatttcttagctgtggcagttaaatattacatttctagtccatatgaattagttaaaaaaaaaaaagagagagagttttgaggtaaataaaataggggatttataaaaacttaccagaagcattcctgtccctgagagtggctaggaaggaacccgtgagtctgattcaaacagagtcttcagtgtcttgggattcgggactgaatggcctgtgtctgttaatgaacattttcactgaacgctaccaggccatgaaaatgtaggcacttcctgatgccacttcactaaccaaggcttactaatgtcttagctggagttttaatcaggacttgactaagaggaatctgtacctctaaaaaagaaaatcttcccttgtgaaggatcaagaaggaaacaggaaactgtaatgaaacgtagttatttactttttctgtcacccaaccatctgtaaataccactactatacacagttctgagcaaacaaagattgtgctttggctgacagtcaagaaattcaacaggtggtttataggagtgacgtgtctgaacataggtcaatttctatagtattctttaatgtctttagtgataacaggcaagccgaacacgagagtttgataaacaattttcaaccatagtttatcttgggacttcacagctacttgtcagcttttgtcttcggtttttttttttgagacggaccctcgctctgtcacccaggatggagtgcagtggtgtgatctcagctcactgcaacctctgcctcccaggttcacgccattctcctgcctcagcctcctgagtagctgggactacaggggcctgccaccatgcctggctaattttttgtattttcagtagagacagggtttcaccatgatagccaggacagtctcaacctcctgacctcatgatccacccacctcagcctcccaaagtgctgggattacaggtgtgagccactgtgcctggccttgtcttggtttttattgttgcctattaagtggcccttttgctgtttacaataaggagatcttatttctttgcttatttttactcattatttttatttttagtttctacttttagttcagctgggaaaaataaaaagggaagaagtgaactatcagtaatggtaaagatgaaggctgaggataaattccacttggatcacttgaccacttgttgcagcactgatgtccaacttttgtcatttttttttttttttttttttgagacagactctcactctgttgcccaggctggagtgtagtggtatcaggggaacccacccccaacatttcaacgtaggttctttctattttccataagtgttggccagctaagaaataaagagaaagagtacaaagagtggaattttacagctgggccactgggggtgacatcacatatcggtaggaccatgatgcccacctgagcctcaaaccagctagtttttatcaagggtttcaaaaggggagggggtgtgagaacagagagtaggtgaaaagatcacatgcttcaaagggcaaaaagcagaacaaagatcacatgcttatgagggaacaggacaaaaggcaaaaacagaactactgataagggtctatgttcagtgatacactattgtcttgataaacatcttaaacaacagaaaacagggttcgagagcagagaactggtctgaccataaatttaccagggcagagtttttccccaccttaataagcctgagggtactgcaggagaccagggcgtgttccttatctcaaccgcgtaagacagacattcccaaagcagccgtttatagacctcccccaaggaatgcattcctttcccagggtattgatattaatatttcttgctaggaaaagaatttagtgatatctctcctacttgcacatccatttataggctctctgcaagaagaaaaatatggctctttttgcccgaccccgcaggcagtcagaccttatggttgtcttcccttgttccctaaaaatcgctgttattctgttctttttcaaggtgcactgatttaatattgttcaaacatagatgttttacaatcaatttgtacagttaacataattatcacagtggtcctgaggtgatgtacagcctcagcttatgaagataacaggattaagaaactaaagacaggcataagaaattataaaagtattatttgggaactgataaatgtccatgaaatcttcacaatttatgttcctctgccgcgggtccagccagtccctccatttggggtccctgacttcacacatctctccctttctttttatataaatgtgccatggcgatgaagtcttgtttgttctctcggttttgacacaggattctttgactggtccgcacactaaaaataagccgattaaac

SEQ ID NO: 1881515 - DNA, 4001 bp, Homo sapiens
aaaatattgagcctaagtgattttttatatgggggtttattgttttaaaaataaaatggaaaagtgtacaagtttggggagataatttattctaataaatatgtaaagtaataatagcttattatttgctgctgtctcagacactgactactaagcaatgtgtacacacactaattatatatacatatatttttcacaattccttaaaccatattgaaagacaagtattaatcaagtattaatatttaaattttataactaataaaatacaggccaaagaggttaaataattttcccaaagtcacatagcactaaatatttatgactcccaaaaacctttgttgttttatctattttacccaagtagaatttgaaatgacagctgaactttcatgtgactgtatcttaaacagggcataaaacagacgactagcgctagaatgagggactgaatatttgggtttgaaagtcattaggattcgctgaactttgaaagtgggtcatcacttcagggttgaggaacatgggaggaaaaaaaggaaacaaaactaaaatctgaaagttacctagaatgagggacagaaagtagagaggggcaggtcaagaataagacagaaccagagagagtgccagagaagaaagtactaagctgtctaagtcatttatttaacaagtatgtccccagctaaggagcaagtgagctgacatctgaaaggtccactggaagttcaacaagtgtaaagcgctctggccaaaggggactgtttaagtagaacgggaacatactcaaaagatgagtgtcaagagggagcagagattggggataattagcaatggaggggttagactaaaaaaggcagtttctgcagatattttgtcacattagggtcccagcagttacctacctttttctggatcaagtacttttttttctggagcatgtgttatctagtctctcagttttttttctaggtttccggttatcttggtcagctcagactgccgtaacaaaataccataggctggacaatttgaacagcaggcatttgtttctcacagctctcgagaccgaaaagcacaagatcaaggtaccattcagtttggttcctggtaatggctgtcttcatgacttgcagacagctgtctttttgttgtgtcctcatacagaagggagagagacagtcagtcagacagacagagagagatagagtgcagaagcataagctctctagtctcttcttataatgtcactaatcccatcacagggaccccatccttaatgacgccatctaatcctaatcacctcccaaaggccgtatctccaaataccatcacatttggggttaaggcttcaacatatgaatttggttgggaagcggggaggtcacaaacattccatcgataatgatcacggaggcagcttctatttgtacctgactataagagggctgctgcactggtgtttcactgaccttccccagagtttcatgtgatggtaaacaagacctattcctcaaaacttctataatataaaaattgctaatgtgatttttgctaattagattgccaccctagaatataaattataacatcaatagagaatcttggcataccatgcctggcataatgtacctccaaaggtatgaagtaatgaaaatttgtgggaatttttgggaatgttgagggaaattgatttctcaacaatttttgactctaaaatttttgattctttggttctttctctctattctgtagttctaaaatgtagtagaacaacagcagaacacaagtctttgccccatgggaaaattaaaaccccatagccctgtttcaattccatggtcataaaatagggaaaagagaaagttggtgatcttacttaaaagagaactgcacccctaagtcagcatgctgggcaatttccccattattacctgtattttcataaacagcagattttaaggaagccatatttgccacagcaaatgaattcaggggagcagctatctacgtggttgatacattcggtatcctttgtttggaagtgtcttggtctcctagcaacatcatagggaaatctatcagggatatgaaattaaatggctatgtaggcggaatacctgtagagtgttcagttctatgaaaagctttcactagaaattatatacatattgtgcaaaatgctacagtaacataaggttaaggtaggaattgttcaactcccccataagcaatttagagttccagcaataaccaatagccaagggtctacagtgcacagaaaaaaaagaaagaaagaaaggcactatacgaaatgctagttatgttaattatttatgactatggagactttcctccacaaaattaaaaaaaaatagaaaaaaaattgaaaaaaagatttcagggcatcctgatctccaggctcttcttttgttaaaaccttctcccaactttgggggtagaaggaagtgaaacattttctcctgcaaaccaacaaacaaataaataagttagaaatacaaaattcaagaagcaagactacagaaccctgccctttttttagctactggctgtaactgcaaatcaaatccgagctgtgctggtctgctccctgttgcctagtttctcacagagtgtctgaaagacagctgcaggccgactcctgggctgcaactccacgattcggagtcctagagaagcgggtcctaggatttgcatgtaacaaatctgacctggtgattcttgagagctattacttcctgctatagaaagtgctcttaatggtgtctgtcccattccttcattcaaggccattatctttctttgctggataagaaaatttgcgcttggaaagggcctatcatgttttccttcagtcaatgttgttagtccaaactgcaccattttttaaaccccctgccatttttgcaggccttggtcaaggtggaacatgccacaggtgtttgggcctgagaaacagcctgcctaaccacctgaccacaaggcacaggaacatcttttttcttttcttttcttttcttctttttttttttttttttttttttgagtcgtagtctcgctctgtcacctagactggagtgcagtggcatgctcttggatcactgccacctccacctcccgggttcaagagattctcctgcctcagcctcctgagtaggtggaattacgggtgtgcgccaccatgcccggctaatttttgtatttttagtagagatggcgtttcaccatgttggtcaggctggtcttgaactcctgacctcatgatctgcccaccttggcctcccaaagtgctgggattacaggtgtgagcaactgcgcccggccacacaggaacatctttatcatactctgccaagcaaaggcccaactgaaggaacatccctatcaaatcttgctgggcaaaggtacaaggaacatcctctcacatctcactgaaaaaagggctaaaccatctgatcacaggaacatcttatcaatatccttccgggcagcaagccatactgcccagacctctccccgctccataattataaataccccaggctgtaagcagctgtggtctctggtattaagctggtccccaacctctgcaggtttatgctggacataaatgcctgaatttgctgttgagccaccactctctctctctttctatttttatttaaccctcgtcttcccttcaaaacctatcaaatgtgacacactaaaatatccctttaaataacaagtttcttctctgttaatttatttacatatataattttactcattttctcttcctctttcctttcaactaatttcatcaaacatcaaacatttattgtttactgtgtatccacaacagaattgcaatcaagatcggttgtttaaaaatttaagcaaaatttaggtattgaaagactttattttggattttaattatactaataaaagttaattgctttatattatgtatgtttatttacagcttgattgtaaaa

SEQ ID NO: 1881516 - DNA, 4001 bp, Homo sapiens
aaagaagttcaattatcctaagaaaggtcctcaactgtttccttccttccttccttccttcttcctcccttcccttcccttcccttcccttcccttcccttcccttcctctcccctccccttccctccccttcccctccccttccctccccttcccctccccttcccttccctttctctttctctttctttcttcttacttggtccttttattctttgcatcaaaaattgttcctacttgcagatccagaaacctcatgcttggagaactgtatctacaaaagcaagcatgataaatagcaatcccaaattagtggttccagacatgcagtgctgacacctagggctcagggtagaaaagtaaaggggcactgagtcgcatgacggctctcagacgtgtttcagttactgttaggttaggaggacagatggggctgtttaaaggtctcaaaggtcaaacgtccttgtgacaaacgaagaactcctggctgcactgacacatccgactgagggtgggagcttctgagtggcagctggccctccccttatttcagtgaccagtcgtagcacctcctgctggcatcccacgttattgcctatggcctgggcgagcacgtctttgccaccacctttggggtctttgaagcctgacacttgttgcatcccctcgctggtttttaagttccagttggctgcatttcggggtaattgacacaagcatgtgatctcttcaggctcgttgtccccttgaagagcatggtaaacttttgagggaaatcagtctggaaaagcaagcttcaaggttccattcatgtctttggccgaagcaccgctctccatctccatgatgaggagggactggttgcgattgctgccaatgagctgctttgcttctccatccctctcgttttggaagtatgctttgctagccctatccaggtcattcatgatttccttcaggaatttgagtctctcgtaattcctccttcctcacactgagcgataacttcgactttttaccatgtgatttccagcatttgcaccaagcctacatttattttttattattttccctgttaacgctgagctttgcccctcttctgccatcgaccttgtgctaccatctttttgttctgctcattatatgtgaaagatttctcaaaatacaaactgtatttgagcttcaagtcatatgagtggtattttaagaatatgcctgtgaatggtaggtcagttggggagggaaaaggaacaaagatataaaattgggtttgttccaggacccggaacagtgctctagagaaaaagaggatataaatattttcgagcaaactttttcaaaaaactagcacagatatccactgttatttcatttataatatagattatagacattagagcagttgatagaatgatttgatacatattttccatattctgtaaatgaatgattgttctatttttacatagcagaatattttaaattttaatttctaccatcatatacaactcaatatttgaaaatgatcttttaagatctgagaaacacacatttttattgtttaatatcatatttctaagttatgtatgttatgaaagcatagtttttgaagttacataagcttttaatttttagtacctatttagcataaagagaaagactaatgaactccatagagcacttttgtgttcagattatttcacgcatactgtcatttgataaagatgaaggacatctgcatgtgttactcattgtgtatcataatatcttaaaaccaagcatggtaaaacaacgaacttttattatctcacacgtttcagaagtctagtgatccagaagtggctcagctctgtggttctggcttagggtctctcaacaacagtcaagctttcagctggggttgcagttatttgaagacttcactagggctggacgagcaacttccaagttggttcactctcatggcttttgggagaacaggaggcctcagtttttcactggctgttggcaagagaccttatttccttgccacactgttctctccacatgttgcctgaacgtgtttatgacatcgtggttggcattctccacagccagtgatccaagaaagcaagcagagagagaccaatgcctttcatggcctagccatagaaatgacctataaatatttctaccatactctattggtcacacagatcaaacctgatacagaatgggagcaaactaccggggtatatacaacaagaggcaggtatcattgggaaccatcttggactctggctacaccctcataatgcagcaaataccatacaaaagctattttacctcattattcacatgattctattctctcaaatatcaagaagatagccctgcttcttttctacaaaatatttagatgtttttaattgatgttttgacaattaattatgttctattatttttgtgcactgtataataattttattataacaaaactgttattataacaatagcattttactattgtatactgtataataatacagaatctcataactgcctttatattctgtatactgtttatttcaatgtgacaatatagtgccttgataatgtattttcctaaaaaactgttgattatgtttatgctatcataaaagaattgtatctgaactaacattttccagatttaaaataattgcatatatttactaatacatatcatgaatgtatttcaacattttcttttacaacccatgaaaaaactaagttttcagtctaagaaaactcctacagtgctaatccacattaattgatattaatgtatccatcaataatgtcaataattaaattgtgtcaaatttcaaaattctaaaatatttttaatatttacgataactaaaactaataaaatgaggccagctgcagtggctaatgcctgtaatctcagcactttgggaagccgagttcaggccacgagtttgagaccagcctgagcaatgtggcaagactctttccaccaaaggaaaaaaaacagaaaaatagctgggcatgatggcacacaccaactattctagttactcaggaggctgaggcagaaggataccttgagcccaggagtttgagggttccagttagctgtgatcacaccactgtactccagcctaggtgacagagccagactctgactctataaataaataaataataaattcattacttataaaatgaaacaatgtgttaaataataatggcaccatttcctgacaagaacgaataataaatgtcaatgtaattaagtttataagtgagatttttacttaattacataacttaacaaaaagatcttaaaggacactaaaaatttttgtgaagtcagattaaatttctacatttgaaaacaaatattctgtaacacatgataaataattgcttgtatactatttgaagtcctccaaattgacgcaagacaatagtaacatttaaaaacattttaccaggaaaaaactttataaagtttttatgtagaagttttttgaagttcctactaagttaaagaagagcttctcattctcaggtttgtcttactgatacaacaagtattgctcatttgtgaaattgtgttgacaactgattcataatcaattttaaatgcacagcaaatagtaagcttgaaaagataatttgtgacttcataagttgagggactatctgaagagtttgaaactcatggtctttttgatttttaatcactgaagtagcaaaacagataccaaagattcttggtgtctttgaatatgttgagttatcgacaaagatttgctcccaattccgagcacggcttggatatccaaccagtcattcacatatgtgaaaagccagatattagttacatgcacctagaacctcacactaatttatatgtaaacacaaaatattatctacattattttaatataaatataaattcaatcactgtatatgtggacagatgactgtactctattttgttgggaaag

SEQ ID NO: 1881517 - DNA, 4001 bp, Homo sapiens
tactggtttatttgtcataacaaacccaccataaggaaggtgatattagcaatggggtaaactgggtgacagagtgtactgtacacgggaactctatactatcttctcaattttcctgtgaatctatcactgttctaaaaagtaaagtttattaaaaaaaaaaaaaaaagtttgagctctcactttcccctccccacatcttatgtttagggcctgttatgggttgaattatttacccccaaaatgcatatgtccaagtcctaacacctaggacctcagtatgactttatttggaggtgaggtctttacagaggcaatcaagtgaaagtggggtcattagagtgagccctaatccattatgactagtgtccttataaaaaagagctatgcacagagggaagacacagagagaagatgggcatctacaaggccaaagggagaggcctagaacaaatctttccttcacaacctgcagaaggactctgacaacattttgatctggtcttccagacaccagaactgggagatgataaatttctgttgtttaagccacctggttcgtggcattttgttacggcagtctttgcacgctaataaaggggccaaagaggaggggttcaactcatttgcaccagagcagaaggatataggagctggtgctttgagttggaaggggcaaagacctaaaccatgtaagctgatttctcagtgttatgaagcggggtggaggcttggagtttctttgaaatccttgccccacttacacagggcttcccagacattggggtgttatcatggttacattctgcaagctgcagcctcaaaccctggaagaatgtctgtgacaaagcttgcagatagtaaatcaggccaccaggaaaggagatcccctggatttcggtgtcccaaaggcaccaagaaggataatgaccacaagtgatggagaaggggccagccggacacggtggctcacgcctgtaatcccagcactttgggaggctgaggtgggcagatcacgaggtcaggagattgagaccatcctggctaacacggtgaaaccccatctctactaaaaatacaaaaaattagccaggagtggtggcaggaacctgtagtaccagctacttgggaggctgaggcaggagaatggcatgaatctgggaggcggagcttgcagtgagctgatattgcaccactgcactccagcctgggcgacaggcgagattctgtctcaaaaaaaaaaaaaaaaagggcctcctctctcattttttaagcaccacataagtcccaaggagcgtgttattataaccttatgaaagagaatggtttccctaaaatgtaattgtgataagatttttcaacccttaaaagcaaaggctcagacccacagttaattgagaaatgtgactttttttttttttttatagagacggggacttgttatgttgcccaagctggtcttgaactcctggcctctagcaatcttcccaccttggcctttcaaaatgttgggattataggagtgagccaacacatctggccagaaatgtgacatttttgatccaatggttggggttcaaattcaagcttgttaaacaaattaagaaaatcaaaatcacctataacacgtcgtcttatacccataactttccagaacacaggttggctcctacagataattttacaataggcagaatgctagcaacattttatgagctgtggtatgctttctctaggctgtctgtgataggttgccttcatggagagtccaaaatcaagactgggacaagggggctgttgcttaaggcttgagccagatgttggatctccccagcaagagcataggtcatttctgggaccttccctttcatcctcaccagagttcaacatccactctgacagggaaaatgcagaggacctaccatgagcacatgaaattctgaagcgtaacccatcaggcttctcctcagcctggccctcaagacaactaggtcatcactgattccagattctccttattccagactccaccccctgcagtgttctacgtcttctgaaagggccggtgcagggcgcccatgacttgtcatttttcctaggtcagcacatccttgttctcaccactggaagtcaaggctgaaaaatctgatttggttcacctggcttactggcactatttactggtgtgcacagcagatttgatttatgataagtctgttgaaaatgtcactttggggctttgaggtgtggtgggggtcgggggtggatgctgcattttgttttggaaaagagggcaggacttttgcctatgcttttcaaataggaggaaaaattaagttcacggtttgattcctaaagaatcaaaaagtggagctagataaaaatcataccaataggcaattgggagatcccaagcctttttcttttccaggagaaacttgagtttgagttttcaaaatgaacgaaatatttccaaggaagtaaaagtgggcctcctttgccggccatccctcttcccccataccctcttcctcttttctcctcccttccttccccttttcttttttcatctgcccttcagtcaccatctgtactactgtaggaaatgggaaaaagacctacgctaaatcagcatcctactctacctcttacaaagtcaggaaaatatctttttaaaaaaatgtttgaaattaatgcgcacctatccagatctctgtttgaacaagggctgtcatttctgataaaggcacggttttccgagatcgtggagagcccaagtgtggagctttaagaaccctgacaaccaccagtcttgtttcgggtcatgagtgcaccattggttaccctgatgttgagtcagcattctccagaccacataaaggtcaggtctatcttcacaaagtgaaagtgctgaattatatcgaaaccatagaaaaaaaaataagccaaccctgcctcgagtctctaagtctctgctccgacagttttgtttttatctggaattacagtaaactcatttcggcatggttgcggcatgtggtattctgagtaactgactcttctacctaattgcaagttgccacatactctctacagcccttcttcctttccctgcgccagctcctctgtcagtttcacccgcttggctgggtccagacttgtctccttttctaggtggggcaatagatcagtggcctgggatacaccatggtaggtgggacttcagaattcaggcacaggccaggcgcactggcttacacttataattccagcactttgggaggccaaggctggcagatcacttgaggtcaggagttcaagaccagcctggccaacatggtgatacctcaccttactaaaaattcaaaaattagctgggcgtggtggcgggtgcctgtaatcccagctactcaaaaggctgaggcaggagaatcgcttgactccaggaggcggtggttgcagtaagccaagatcgtgccactgcactccagcctgggtgacaggtcaactctgtctcaaaaaaaaaaaagaagagtttaggcacaaagtcaaccagagttggactgtgtgcatcctgggagtcctggagccccttggggaactcctgcccaccctgtgttgggggcaaagagtcaggaaggtttgtgctcagattctgcctctgctatggcctctgattactctgtgaccgctggcaaattgtgaccttacctgtaaagtggggacactaataccccctcacaggactgttgaaagaactggagatgatgcatgtaaaatcatttggcacagagtaggtgatcagtgaatgttggttcttttcttgtgtcctcatcccccacatcacagcctgctcaataatccggagccatgtcccaatctctcttcctccttctaggatggtctctccccgccttggtgcctatctcctctgaaggagggtgagcttctcctcccactgggctgtacagctcacctggctgcactggctgctgagcttg

SEQ ID NO: 1881518 - DNA, 4001 bp, Homo sapiens
ccagcgccaagtcattctgatgacccaggtctcacactggcaccttcagaaaaccatggtgccaggaagttaaaatcttatttgaatccaaataaaggacatattcagactcctagtggctcatgatctgaagtctaaggtttattcggaattggcggagatagcactggtaaatatatatgtttttttaaaatgaaggatccaaaaatacgacatttccctaagcattaaatcagactgagaaatttgtaccagtgatttggagcctgggggtaacgaggcaaaaacttcatgagcttattccgggacccccacctgagtcaaggcctcaaagcttaaggatacaaagttccagtgacggcttgttgccaataacagagaaggcggaatcatgagcaagccggctgtctgtccaccgaacagagtgctcgcaaatgcttggcaacactccccgcctgtgttattccctctttcagcctggagggctttccacgttcacagcgtgcatcctcttgacattaaagacattatcccagggcgcttaccctgagcaaagcttcctcttctcagctcctacagtttggctgatgctgctcaagagtcccccacagtcctggcatctggtttccttctgggaggcatctgccctgctgaaagacaggaggctgtggaaagaacagatagaacaggatccccgcggctctgattcttaagggaaagcaacatgaccttggctggtggatcggctcacaagaggcttaaatagaggccccgttgctccctacaagaagtttggacacactgtgataaggcatttgaaagaaaacctttcgaatacagtgcaaatctgtatcataaacaaaagaagcctttggtatgccctgtgtgcccctgcacagtgcactcagtacataactacacgctgttctgcaaaaaaatgaaacagctggaatttttaatatcatgtctgagatttcctgtgagaacatggtgtacacgttctcctaagttcaaggtgcgattttcctctaattgttttcaatagttccttccactgttagcatctttcagaaaaatatcagcacattgctttccctagagggaatagaagagaataagatcctatgatttaatctttaaaaagttgagaaacaaaagtcaaaaacatccaaatttaatgctgccttttctagcttatgcatgttacgttaatacctaaatgatgtccagaagtatttacttgtgtcatatttacaaaactggctgacagagtttaagaaacttgttttggcttttgttattaatgttctcaggaacaattgacatgaaagttctggttttctataaaacagagttttgacatttttggagaaacttaaaataggtctactaggttctggtgaattcagaatattcagaggacatagcatgactgatgaggagcataggattttgtgcctcagagcacttaccattgattaaaggcctttaggttggattctgacctggagatagtgtccactgacttcacggcagtctctcttctgcaaataggggtagtgctttgcctcatccttatggaaatgatatagtgggatgtgaaaacatgtggtttccccctcgaagttctaaacattccaaaagtgtcatttactcactagatccttaatagatcttcctcctaatatggatttttaaaaaaaaaatttagatcactcttctttcatgatttgagaaggtgttacttagagaaataaggcaaaaggaaaactttaagattgacatttgtctagggtgcctcaaacatttctagaacattagatagattatcactcgatctcctgttttgaaagcaaattggtttcttgaagacccactttgctgatgagacctgtggaggttttcatcgcagatgtttatttacacggagaagaacccctgaacacggtgaccagatgaaaggcagctcagggctgagctctcgggactcagctctgccatcagccaccagccacattttcctctgagtttatgaaaatgatgcacccttacactcagtgctacagttcttgagtcagcattgtgcaagttgattatccaaattgggccattcttgtcatacccaactaaatcagagaagacgggtctgagtaaaaggcactcagggtacatgacgtcactctagaaatgctgtcgtctgcaagtcccgtggctgaaactgcgtgttgtaaccagagaccactttcatctgtagcaggtgagataacaactgcaaatcacggactagttttgcccaccacggtcacccaccaatcagaccttaccagcccccaaaactttgctaatatcaaagaactttctcacaggaccacagaggaacagtcctctttttccaccttcggaccaccctgtctgcctctatattgtgaatcgcaattctttcttcctaaatattaaatttagagattcatctctacatttttaatttgctttagagaaggtcaagcagacacttgccaaaccctgtggtttccttgtcactgtgtggctgggttcgttcctcttcattttgtcctcactcacagcttcctttgtctgaagcttccttctcactgacccgcttacctcgggtggcttctcttctgttgtatcttaagaggtagctgctgcaagtctttcttaattcactggggaataatggcagcctctccaggccttctgtgtcaagacctcagtcctggttggctgcaaagctcctcatccagccttgccagatagtcttgttttgctttcttcttctagtcttcaaatcccactctgattttgagattcttttgttaaagcccagcagcaaggatggtggagggtgcattgggtgtttgggtggcaggacagctggtttctactcttgggttggaaaatgccaagcgatttggctttggggaaatgactcccctttttggtgtgagggattatttctagtaaactgtaatgaagagatttcatatcagtcaacagaagtggttctgagcatgatcactaagtgggagcgggagtcacagggcctcaaggcttatctcctccagggcagttttatccctgccccaggaaggaagtatgtggtaatatatttcctggtctggctgctggtcggaatttgtgagggtgattgccaaatgaattctctatatgtaatccagatatcaactggcatttcctgctcctgtgatctagataagagaggcctagcaagcaggccacttgccgtaggtgccgagtttatggtccgcatcacttttttatgtaggctgaacctggcccacatgacatctgcccagatataaaattccacctcttccttgatttccacctaaaatgtcactcacctgaggcaaggatccatggagatttgaaggagacatgtgagagtacgcttcagaaaggcacgtcctcctagtaaatgttcaatactgagattcttaaatgtttcctcatgcccaagtctgtatgttctacattcttgagagggaacctaataaaaggagttatttttctcgacaaatggagtttataaaaaggactttgagatctttcaaaatatgatctaatataagaatcacttatttttggaaacacatttgtttattcattcacagttacattcattccttctaggcttttttggtttggcctctacagaagaaattataaaactggttcagtactgccccccatcagatacactaattccccaaataacggaagccagtgatttctgcatgtgaattgtccagcttttaaagtcagccatttggccgtctgtggccatttggtgatgtgttacttgtgtatggactgccagggttactagtgtggtctcgatggaaggtagctcttcaaggaagtagtaaaagccaaactgcacaaagcaaatcctgtagctgacaacaatgtgcccaggcttttccagatttgctctagttattccaataagcactatt

SEQ ID NO: 1881519 - DNA, 4001 bp, Homo sapiens
aaattagtctgtggacatccaactccccaacccctgccaccacccttaccatccaatctatctaaacagaaaagcagaaatttaagataatgtattgaagaaagggaatttatagaaataaggagtgctttggtcttttctcttttcttccctatgcaggtgttgccattattccagggtaggtaggaggagatatcaagaaaattacttagagaaatttgggaaggttcttgcaaggaagcagtggcttctcactatccaactggagtctttttgagctgctgagactcagggccatttctgaggacacagggatggagcactgcaagagttcttgggagagcttgaaatgcatcctttgtatctgcggccaggggctgtagagagaatgtcaatgacagttgcttcagaagtcatggaagtagggggtgggagggaatattggagctgctcaagaggctgcagacagacagacagacagagagagagagagagagagagagagagagagagagagaaacagaaaggcaagtctactttcccactattttatggagcctataaggcaaggggaagcagtgaggttgagctgccctgatgagacactgccccaggttgctgccttctccagagaagagatcctaggagtgaggagctgtgaggtgggtaggtcactagggcctgaggccaagggaaaaattaagagatcagtcagtacatcagccatgtagggaaactacgaaatcattcttttcctctaatctccattccagttgcactgagtgtggaagattcacaagtagggaagttgcagtgaaaaatcaagggagggaaggaaaggggatgtgtgtgtgtgtgtgtgtgtgtgtgtgtgagagagagagagagagagagagaaagctgattatactgacagtaacctactgtcttgcagttctccaaacccagctctgagcctaagttggatggggctggggatagttttgttacatgaggcaataaaggatacaattggacttgtctggactttgtaacacataaaaatgagttgtaattaatgaaataagatttgttcttataactggaatgaccagaaagttaaggaagcatcctcagattatcctgggaggatgttggggctttgttttgaaggcagtgatgagaaacaaagttatttgccaccacattgacagagactcattccatgtattagttttatatttctctatcagttttaacaaacacacttctggaatttagttttacttaataataataataaatatatatatttttcttcatagaaattggataatcagttaatatattttgggcaggttttattattaacacacatagattagtataattatttttagtgactctacagtaatccacattatggattttcataaatccttcagttgaagaatatttttgtttctgttttattacaaggaatgctgcagtgaatgctctttcacacataaccaagcatttctatgagctatctataggataatttgataagtggtattactgtttcaaggagtatgcgtacaaataacagcaagtgtacttaaaatttagaaagctaaggcaaattaattttttgaaaagtttcaaaaacggtgtatataaacctttttttaatagttttatccacattggatcttattcaacattttaatctctataggtatcataaggaaaactatatagtgcctttttgctgttttgatcttaatgtttttgaacaaagttgatcatattttcaagtattgtccttttctaaatatttaatgatttaggtaatacataactacaagtggctcataaaaattgaagtgtgacagagaagactaaagtctcctatgattatgaactcaaatcctagtccatttgctatccttctctttccacacccccatctcaccaaatattccctgtgaggaccacatctaattctttaacctgtttcttctgatgttttccttcatatttctaaatgctgtgcttttaacagctgtgtctttattaaattgtgacatcatcttttgacttcttttctaggcatttttgcccattgacaccatcttcctaattatgacatcattattgtcttgtttatttattgatttctggcttacattggtcttctttctctagttacattaggtagtaacttagatgattaaatttttatcttccttcttttcttcatatgcattcaatgctatagatttccttatgagcgctgcttttgctatattccacaaattctgataagttgtatttttattttattctactttaaaatatgtttaaatttctcttgagacttctttgacccatgtattctttagaagtgtattgcttaatctccaaatattttgggattttccagccatcttactgttattgatctctaacttaattccaaggtgctctgagagcatattttatatgatttctattttttaatttgttaagataaagatgtgttttataacccagaatgtggttgaccttggtgcatgttacatgcaagcttgagaaaaatgtataatctgctgctgttgcatgaaaccttcaataaatgtcaattaaatctagttgattgatgtccagttgaagtatatccttatcgaatttctccctgttggatctgtcaattattgatagagggagctcttattaatatctgcagctccagctataatagtggatttatctatttctccttgaagttctatcagtttttgcctcactcacgtattttgttgcttttgttagatgcatatacattaaaagttgttctatctttttggagagtttatccctttattattgtgcaatgtccttccttatctctggaaagttttgaagtcagtttaatttgtgattagtacagctaccttagcttttgattagtgttatcaccgtgtatttttcttatccctttactgtttatctgtgaagacatgtttaaaatgggttttttgtagacagttgagtcttgttttttcaaccaccctgatagtctttttagttggtatatgtagatatttacattttaagtggttactgatatcattggattaattctacaatgtttgtaactgttttctatttgttgcctttgttctttttcaaaaatttttttcccacattttatgcctcatctgtatttttctttatcgtggtaaaaaatgtatactatgagatataccctcttaaaagtttttaagtgtatagtacagtattgttaactaaaagcacagtttcatacagcagatatctaggactttctcatcttgcataattcaaactatacccattgaatgcaactccccatttctctcaacccccagtctatggcaactatcattctactctgcttctgtgagtttggctatttatttacttactttagggataaggtcttgctatgttgctcaggctggagtacagtggctattcatgggtgcaattacaggggactacagcctcaaactcctggcctcaagtgatcctcccacctgagccttctgagtagctagaactacaggcatgtacccaccatgcccagcaattttgactattttgtaaacctcatataattggagtcatgtagcatttgcctttctgtgactagctttacttagcataatgtcctcgaggttcatctatactgttgtatgtggcaagatttcctccttttttaaagcttgctatagctttgatatttgtcctctcaaatcttatgttgaaatttgatccccagttttgaaggtgagtcctaatggaggcagatctctcatgaattgattaatgcccttcctggttgtgagcggtgggcggcgagtcagttctcactctattagttcccacaagagctggttgtttaagagagcctggcaccatccctcttactctctcttgcttccttcctttccatgtgatctctgcatatgctagctccccttcacctttctcca

SEQ ID NO: 1881520 - DNA, 4001 bp, Homo sapiens
gctttcattagggactggcagttgatcatagctttggtatagcaaaagaatcatatccagtaagatggccaactaaatgcagacaggtggaacagctcctacctgaagactgagacgactggcatgctcctaacatgctcctaacagatcttctccagagtgaacagagggagtacatggaagctgggcagaaggaggagaacgttgggagccctacatggagataaactgcacccggactcattcctgaccaccaatggctctggaggaatgggtgagttgaaatggcaaacagcaatctgccctcaccacaggcctctggaccaccagcaggagacccctcaaccatcacaggcattcgaattggcagggagagctgtttagagaagtggtaggggcagtaagccagctgatgtggatcccagagggtttggtgcaggagcatctgtagcagagtaaggccagagatggccatcctgctaggcttgacttgctcccataggaaacattagccctagaggaactgctggatctgaacactacagggtggtcttgtccaacagatagggccagtctgatctgagcgctccctggtgtgctggcctctcccacagccccaccatgaccatgcctgcttgcaggtcagccccgagtggtctgggggcctgtgtcatagtttctgcactggtagactgtgcggaactggcagagagctccagtggggcagcacctacttcgaggccccagcccacatgctccctccctatactgcagcttcccgcctgggctcagggcaactccccagattgctctgttggtgtatgtctgtgcaggcaggttttgctttcctagcactgacagcacattggagtccagtctgcctccccttcccttccagaatgccactgcagacagagccttggagggcacagagccagcaagccccatacctacaagcaccccacccttgtactaacactatgcagagaacagtggatcctcctctgccctgagccatcactcctgcttgaagggaacaaagaagttacccagacctgcgcctgccattgcctggtccctgagccaacactaccttcagcacaactgttcacacagtctccagcaggggtccccagccagccccaccttccccaccaaccaagctgcaagggaggcaggcactgcagaacccactagcactctgccacagctgccactactgctattgctggaatgtgaggatggatcctgctgtcactgcactgtgaaaggctttggctgacaccatccattggagtgtagtaactgggggtctgggagcacctcagattccccgagctcagtagattcctaaccttgagaagccagagagcaaagttggagcccaatatatgtcccccagttagaacacacagttcaggatttgggagcacagtgttggtcccctaaaatcttccggaaatgaagccagtcaactgaatccatgttataccacaatcaaaccctcaagggaatcaaataagataaaagcaaacaaacaaaaaaaatcaaaaggtcagcaatgtcaaagactgaaggaagacaagcccacaaagacgagaaagaatcagcacaaaatccctgacactcacaaagtcagagggccttttttcctgcaaacagctgaatcatctctccaacaggagttctgaactgggctgagctgctgaaataacagaaatagaattcagactaaggataagaaaaaagataattgagctaaagatgtatattaagactcattccaaggaagctaaaaatcacattaaaacaatgcaggaacagacagacaaaacaggcagtgtagaaaaaaaatggaaccaatcaacctgataaagctgaaaaatgcactataagaatttcataaggtactcacaagtattagtagcagaatagaccaagtggaggaaagaatctcagagcttgatggctgcctttctgaaataagacagtcagacaagaacagagaaaaaagaaggaaaataaatgaacaaaacctcagagaaataggggattatgtaaagagaccaaatgtatgactcattgctctctctgaaagagatggggagaatggaaacaacttgaaaaacatatttcaggatatcatccataagaaccccctcaacatagctagaaaggccaccaatcaaattcagaatatattcccaacacagaagcacacaaattcataaagcaagttcttagagaccttcaaagagacttagactcccacataatattggcaggagacttcaacactccactgacagcattagataaaccatcgaagcagaaaattaacaaaaacattcaagacctaaactcagcattggttcaaatagatctgatagacatctacagaactctgcaccagaaaacaatagaatatacattcttctcatcaccatatggcacatactatataatcgatcacataatcacaagtaaaacactcctcagcaaatgcaaaagaacttaaatcatagcaagcactatctcagaccacagcacaggaaagttaaaaaccaagactacgtatttcactcaaaagcattcaattacatggaaattgaataacctgctcctgaatgacttatgggtaaatcatgaaattaagcgagaaatcaagaagctctttgaaagtaatgagaacaaaggtgcaacatgctagaatctctgggacacggctaacacagggttaagtgggaattttatagcactaaatgctcacatcaaaaagttagaaagatctcaacttgacaacctaatgtcacaactaaaagaactagagaaagtagaataaatcaaccccaagctagcagaagacaagaaataagcaaaatcagagctgaactgaaggatattgagatacaaaaaaacccaaaccactctaaagatcaacaaattaaacagcctgttttctgaaaatattaataaaataaatagaccattaaatagactaataaaaaataagggaacagattcaaataaacacattcagaaacaacaaggggcatatcaccactgaccctgcagaaatacaaataaccatcacataatattatgaacccctttatgcacatcaagtagaaaatctggaagaaatggataaattcctggacatggacattctcccaagactgaaccaggaaaaattgagtgcctaaatagaacaataatcagctctgaaattgaatcagtaataaatagcctaccaaccaaaaaaaatcccaggacaaaatagatttacagctgaattgtaccagatgtacaaagtagagctggtatcatttctcctgaaactacaccaaaaaattctggaagagaggctcctccctaactcattctatcatgataccaaaacgtgacagaaacacaacaaaaaagaaaaatttcaggccaatatccttcatgaacatttatgcaaacatcctcaaaatactggcaagccaaatccgacaacacttcaagtatcttttctaccatgatcaagtaggctttatccctaggatgtaaggtttgttcaacatacacaaatcagtaaatgtgattcatcatttaaacagaactaaagacaaatccacatgattatctcaatagaagcagaaaaccttttcaataaaattcaacaccccttcatgttgagacttcaacacagtaatagggctagacttcaacacaccactagcagcattagatagatcaccaaggcagaaacattagcaaagatattcagaacctgaactcaacattggaccaaaaggatctgatagacctctatagaactctccactacaaaacaacagaatatgcattcttctcattgccacatggcacataatctaaaactgaccatataactgaacataaaacaatcatcagcaaatgcaaaagaattgatataataacaaacacactgccggaccacagtgaaataaaaatagaagccaagactaagaaaa

SEQ ID NO: 1881521 - DNA, 4001 bp, Homo sapiens
tactggaagagaagggaggactttagcctctgaaagagtctcctccaagaggaagctgcccctttgtagggaagactaggcaggcttgtgaaagtacaatgaaaggaaacaaacatttttgttgcctttttccctggcaggaaaagccccctgggattgccccctctccacatgtgcaaagatatcaaaggcgggacagaattgctctgaaatcccaagccaggggctgggtctcccctagggagggagccgggatgaaagggagagagagggaggaagatggagcaggaagaggaggaaatgaaggcgcatcaaagccacccgcctcctggatccaccggggtctgctgtgccctagtggggtgggggcctaggtggggttgccaccttcaaagaggaacccttgaggcgctcagcctactgctactgaatgcaaggccctaagatggggcattcagggcctcccaatgagggcttttaaaaaatcagcgcttgtggctaggtgcggtggctcacacctgtaatctcagcactttgggaggccaaggggggcggatcatctgaggtcaggagattgagaccagcctggctaacatggtgagaccctgtctctactaaaaatacaaaaattagcagggcatggtggcacacgcctgtagtcccaactactcaggaggctgaggcgggagaatcgcttgaaccaggaaggcggaggttgcagtgagttgagatcacaccactgcactccagcctgggcgacagagcaagactgcacctcaaaaagaaaaataaatcagcgattgtgataatgtcgtataattaacaatcttgccaagtgggccagtgcttcactgacttgatgccattcactttatttatttatttatttatttattttgagatggagtcttgctctgtcacccaggctggagtgcagtggtgtgatgatctcagctcactgcaacccccgcctcccaggttcaagcgattctcctgcctcagcctcccgagtagctgggactacaggcctgcaccaccacacctggctaatttttgtatttttagtagcgacgaggtttcaccatattggccaggctggtctcaaactcctgacctcaagtgatccacgcatcttggccttccaaagtgttgagattacaggcgagagacaccgtgcccggacctcgttcactctttccctccaacctgtgacggggggcatcgtggtcccgtagctctgggagaatggggcaagtcgttcagcatggtgggatccccactgcacatcagggtctgtgtgactccagggcaagggctctttggccccaccacacgagacttggaatcgaagttgtcctgttaggatgcatattcatttcctaaggtggtcctaacaaagtaccacaaattgtatggctgaaaacagcagtaatgtgttttcccacaatctgagggctggaagtctgaaaccaagagactggcaaggccgtctccctctgaaaccctgggtagaggcttgccctgcttctctgggctttggtggtggccagcaattccttggggttccctgggttgtagctgctcactccagtgtctgactcagtctctcatggtgttcccttgtgcatcccacatggcgatccctctgtgtgtctgtttccacatttctgtcttcttgaaggacagcagtcatattggatgaagcgtccacctactccaataggaccttatctgaatttgattacttcggcaaagactccatttccaaataaggtcactgttcccaggggttaggactctcatatatcttttgtggcaggggagggttgggggggccacaatttaacccacaacaggacagatgcatctccccttctactcacaggcagctctgtggtgccactggccccccgctctgaaaaccactggctccaagtgaaataatggaaatgaaaactcccaggtgccccagttcctttagatgttgtggcccattcacgtccttttgcaatgccctcatccaattttgtacactagccggacgggcatcattatccccactgtacagattaggaaaccgaagtttagaaatgtggcatggtaaagcttaaagctgaaacaatatctgtttgacttcaaaaccaaccaccatccccccattccacgaggggttggggtgggcaggcaagggttaaggctgaggaggaggtgggccctccaggccctgctggctcccggagcgctgagtgtgatgctggtgtccgggttctgtcggttgccggggtgctgattaagatgtcacagaagattatgctgtcaggtgcaagaatcacgctccaggaggggtggctgctgggccgggagggaggttaccctagcaacggagacggaacatccacgcagtgcagcgtcccagcctggtgagaagggcttggggttcagcatcacctgtcctggataaaaaatttggctctttggccctgcagctgggtaactgtgggtaaaacagttcaccttctgagcttcttggcctcatctctgagatgtgggagtcattccatccccctgtggatcaaatggcagagccagagaaaatcccacgtatctgcaagcatctgcctcatggcagttccctgggaaccccaggcaggcattagctcaagagctgaggcccgggcatgggcaggcttgcccaaaggtggcaaagcaatggtgccaagtcaccttgctgccgggactgaggtgctgggaatgcggggtcacctggtgatgggggggccttgtctgcagccttctttttactaattagtggggggatcagcagatcctcctccgagtctcctaaactttctgcactaaatagtgttgaccacagcacatagtcactgtctattcagttgttgtatttcctattcagccgtgaaacctgtctctttagatgcccaaagctcagcatacagcccaaatgcatgttgaagtaaaggaaaagatgaatgaaggtgtttgctcacattccccctctattccttggagtaaatttcttctgtcattgaggaagaaatattctttctctcttgcaaagctactctttccccatgtccttaattctgatcttattttcccaagtcctggctttcattcacccacccaccatccacccgtctctccacccacccatccaggcagcagacagtggctgagtgtctctgagccacatcctgtgctaggccaacagggccaagtcacactgggatcttggtccaaactagttctcactcagccttgtagaggtgtgggggcatgaacccaaatccgtgtgatgcacagtagaactcacaggctgtctcggagaacgggacatggcagaagaaggagaaattatgttccattcagaaatcaggggaagccagagcagacagcgacctctctttgaaggaggaggatttgggcacaagaagtgagcgaagaagcaactgggaaacacccttgtcttccacagccctcaccacatcctgatgtctcctctcctttgcagagccctcacatgggttcagagaggttaactaacttcctccaagtcacccagctcataagtggtagcgctgattggagaagctcgaatgttgatcttcacaaaggccttcctggaccacttctgtgtatctcacttggcctattttcggtcgctccctgtcctgtgtcttttgtgcctctccactgctggaaggccggctccacgatggcggggggtgggggtggccttgccttgcctctgctctgtgcctcgcccctggaaactagtgggtgctcaaagacatctttctgagatgctgtggatgcaccagtccctgttctgacccaaaggactgttacctggtccccaaccttctttccattcctggtagccgtctccttggaggtctgatctgcccttaccactcatctaccttttaactctggccccttggctccgcagctgggcccctcagccaaacatggtt

SEQ ID NO: 1881522 - DNA, 4001 bp, Homo sapiens
gctctccagggaaggccccagtgctcaggggaaacttagcagcagggcatacaggggctgggctggatgcacagggctggtaaaaggcttcagagggggtctgagctgggcaccatcagggtctgctgtttttctttaatccaagaattgagagagagaaagcagtaaaaaaaaaaaaaaataggattgcattgatttcttttcatgtagactccatgatctggacagaaagttaccttcattgatgcactgcagttgagtgagcaccggagacagtcacactggggtttgggtcaaaggtccagctggcagcaaagcattctggctctgttttatctgcagtgtctgcagttcctgtatgtagagggaagaaggctggtgttcccaggtctccttttatataattataaaatgagcttttataattataaaagcaatgcgtgaaaataaacaaaatcaacattcctgaaggggctaaaatatgctcttttggtaggttgactatttcagttaaaggcacttgaaaaacagcaggtgcaaagagatcagtctgaacttcattttcttaaaagcagaagatgaaattcccatgtgaaagatgtcctccctacactagagaaaaagcaaggttcttatcatcaaggacaagaaagttgaagtggaacgaattttgtacaaacaagccttgttcaactaacacttgtcatgctggctacttctctatccagttaaccaccctagcccaagaccctttgcctgatcacatgtttacagtttataattctttgtcaaatctggtaaagaattaactgactctgacagcttctttgtgtctttatttctttatgaggctcctatgctatgtaaaacttgtgttgtgctttgctcctgttaatctatgttatgtcaatgtaattcttggaccctcctgggaccctaaaagggtgaagtagtattcttctgtcccaacagtttctgtcctaaaaggctgagcaccttccgactcactctggagcctgcagatgggatcctgaggggcctaataaatgatggaagaaagtaggaattcttaccaaggtcagctctcctggatttccgtccatagtgtccaattgaaagaagaaggtaaaaatttttgcgtgttccttccttcccaaattcaactgacaggaaaaaaaaaattgtaaaaaattggttctttgaattgtgagtcttgtgaatttgcttctgggtgtccattggtaattgatccacagcctcccaggaagtccttgtttttcttatctctgtcttttgtgtgggttgtcataaggaagaaaattataattaattagatttgaggtaggaggctggcagggcttgttttctggtcatgacctcactgatctggtttgaaaggatatggttgaaacagaatgcagtgaagaagccagccaaaataagcagatggccatgaaagtgacctgtagttgccctcactactcattagcataaagacattcccatgggtgccgtgacagtttacacatgccatggcaatgggccatagcaatggcctggaagttaccatatatggttctggacgctctcggccccttttccagaatgttctgaataatccacctcttaattagcatataattaaaagtgggtataaatacagctgccaacagcttacacattgctgactctgggcacactgcttatgggttagccctgctctgcaaggagcagcactggctccataaacactgctttctgtcaccactggctcacccttgagttcgttcctgggtgaagccaacaaccctctcaggttgatccccaattttgaggctcacctgtcctgcatcagactctgcttcatcttctctgaagtcataagagcttggctttgtaatcagtgaaaatgtgctctttggtttctatcagcctggggctcaagctgttgggcttgtgcccagcagttagccagctctccaggattctgaaacaagaagtgtctctttgtatgaactgtgccagctctcaggacagtttgtcgtaattgtctcagcctttgttgccctgttaacaatgagggtcttcactttcttaggtatccttggaggaaactttggatctggggtgggggtgggacttctgtaccctctttatggatgcctcttttgtccatgattaaaccataaaaagatgatcagttttgagtcaaaactgaagtaggtatacctttgaaaatttggacttttgtatctaaaagtattttttttaagagaactctcatcctaagtaactgtcctattggtacctatgtgaagatttggcttaaaagaaaaaaaaacttatataaattgttatctcagaaaaagagaaactaacctaagtgtttttcaagttcacgtggttttacataatctttggtaaataaaaacctacttaaagtttgctgatttaattaaaccagcaatattattatactttaagttttagggtacatgtgcacaatttgcagatttgttacatatgtatacatgtgccaagttggtgtactgcacccatttagcacatttcgcacccataatgcacgtcatttagcatgaactcatcattttttatggctgcatagtattccatggtgtggatgtgccatattttcttaatccagtctatcgttgttggacatttgggttggttccaagtctttgctattgtgaatagtgccgcaataaacatacgtgtgcatgtgtctttatagcagcaagatttatattcctttgggtatatacccagtaatgggatggctgggtcaaatggtatttctagttctagaaccctgaggaatcgccacactcacttccacaatggttgaactagtttacagtcccaccaacagtgtaaaagtgttcctatttctccacatcctctccagcacctgttgtttcctgactttttaatgattgccattctaactggtgtgagatggtatctcattgtggttttgatttgcatttctctgatggctagtgatgaggagcattttttcatgtctcttttggctgcataaatgtctccttttgagaagtgtctgttcatatccttcgcccagtttttgatgaggttgtttgtttttttcttgtaaatttgtttgagttcattgtagattctggatattagccctttgtcagatgagtaggttgggaaaatgttctcctattttgtcggttgcctgttcactctgatggtagtttcttttgctgtgcagaagctctttcgtttaattagatcccatttgtcaattttggcttttgttaccattgcttttggtgttttagacatgaaatccttgcccatgcctatgtcctgaatggtattgcctaggttttcttctagggttttcatggttttaggtctaacatttaagtctttaatccatcttgaattaatttttgtataaggtgtaaggaagggatccagtttcagctttctccatatggctagccagttttcccagcaccatttattaaatagggaatcctttccccattgcttgtttttctcaggtttgtcaaagatcagatagttgtagatatgtggcattatttctgagggctctgttctgttccattgatctatatctctgttttggtaccagtaccatgctgttttggttactgtagccttgtagtatagtttgaagtcaggtagcgtgatgcctgcggctttgttcttttggcttaggattcacttggtgatgcgggctcttttttgattccatatgaactttaaagtagttttttccaattctgtgaagaaagtcattggtagcttgatggggatggcattgaatctataaattaccttgggcagtatggccgttttcacgatattgattcttcctacccatgagcatggaatgttcttccatttgtttgtatcttcttttatttcattgagcagtggtttgtagttcttcttgaagaggtccttcacatcccttgtaa

SEQ ID NO: 1881523 - DNA, 4001 bp, Homo sapiens; identical to SEQ ID NO: 316734

SEQ ID NO: 1881524 - DNA, 4001 bp, Homo sapiens
ttctttccagaccaatacagaagatgaggtgaaggtcagatcatagtgtgtcctgattattatttaggagtctgtacttgatttgggggtagtgaacacacctgggagctcttgtatagagttgttgcaggattggagccgtgtttccagaagacagagatagcagccatgttcaatgagtaggcgggctggagtgggagagattggatttcctcagacacactaggaagctgtaattccagaatggagtgaggtgttaagactcagctagcctggtatcaatgtcgtcacagcatttgtgaggcaacaatgctttcaaaatggccagagggcctcattgcttcagcaacctacagttagcttcctggcatggtttatccatccttttaatgtcagtaaagggactggcgccactgtttatcaactgtgtgaccctggctgggttgcttaatgctctaagcttcagcatttcttcatctgaaaagacagagatgggtctgggcatggtggcttacaccggtaatcctagcacttggaggccaaagtgagaggatctcttgagcccaggagtttgagaccagcctggggaacatggtgagactttgtctctacaaaaaatgaaattagtgggacatggtggcacacacctgtactcccagcttcttggtctgagatgggaggattgcctgagcccatgaggtcaaggctgctttgagccaagattgtaccactatactccagcctgggtgacagagtgagatcctgtccccccacccccaaaaaaaaaaaaaaaaaagattattatcatctatttcatagggttattgtgaagactaaacaaaaaaatgcattcaaataccttaactcaatgtcagcatataacaaactctcagctaataagattatatcctttagtccttgagtaaggacataatattgagcaaattttttactttccagaccaacacaagtttggcagtttaaaaattcctttatctctttaaggtcactaggatctcattggtgttgctctaacatcatttacaagtgtgaatggtatgtcctttcaagctatcaaatcaaacattctctagcggtttaggtttggcagtgtggtttttgtaaatctgttggaaaagatggtaacaagggaaggggaatgagggagggaaaattggcttttgtgattatttccaaatctttctttgctcagaatgaatttttttccattcccttgttataccagacatgttctagcaattgcctgtggtatagcctacttaatataaccaaagtagtttaaacattaattgaactcaatcacccgagtactgttagtaccaggagctgactgctgaagccagcttacccctgccttatgcagtcacttcagttcaatcagtatagagattaaggacccacatttacaacatctcgggtttcctctgcccactaagttactttgccctaacatacttagaaataattttaattctttattgttcttagagagttgagtacttattaattcattagggaaaatggactaaggtcacgggttttgaaaatgctcacaaggaactagaagcaggcctgccatgtgagatctttccagatgccataacgaaaggagactcttaaggtgaggcagctgtcagcacctacggaagacagaagcatctcagccctttacattcaaacttgagcctctagctgcttggaggagcccctttttccaccaagctaggtgtggcttgttcccatcacttgttggtgtcccctctgaacacttctattcaaactgaagtgaaaaaaaaaacaatgccagtcggtgctgctggctcataggtccatagagcaagtccctcatgggctctggcctggctgtgaacccctggctccagggatacctgacagagagtaccggtcacaagaactctgggttctgacctggctctcaggaccacctaactttgggatgtccagtcagttacttcactccccttctctcagccttaaacctcctcacttgtagtgtttgactatcactgtcaagcagcaggacaattagagcagctgttttctgtgtggtcacaatgggatgaaagatgagaagagagctaggagagatttcttggggaaagcagattcatcagtttaaaaatacagtttgaaaacaccagcctagatgatctttgaatctccttgctctgaactcagtgatttcaggcaaaccagggatgaactgctcaaggccaccaactaggccttggcctcttcttgatcatgaatcaggcctcttccatttgttaacaacaatgtctggtagaaagaactgatgttcccccaagcctgaaaagcagagtctttaaggaagaaattttcaaaattatctgagagggcaaagtggcaaattggttctgttttttacctctcaataagcaagcgataaaactgcaattcattccattaaaaatgattcattcacttctattaattcagtaaacttcagctgaaggcctctgcatgcagagatatatgcagagaaccatggaacagcgagagtttatgccctcaggttttatgggcatgatatgaggtatataagaaatgagtataagctgggagaggtgactcacacctgtaatcccagcactttgggaggccgaggtgggtggatcacctgggctcaggatttcaagaccagcctggacaacatgacaaaactccgtctccacaaaaaatgtaaaaatttgccaggaatggtggcatgtgcctgtagtcttagctacttgggaggctgaggtgggaagatcacttgagctcaggaggcggaggttgtagtgagacactgcattccagcctgggcaacagagtaagaccctgtctcaaaaaacagaaacaaaaacaaaaaggtaaaaataacaataatgggttgagtgccatgagaaatagctagaaagctttataggaagtgggctgtttagagcaagggaaggaggaatcagggtagagtttaattggaagggccttgaaggaaaaattgggtttaagctcaggatgaaaaacattccaagcagagaaacttacattgacacagaggcaggaaaatggaaaacatgtatgaggaaaaatgaatagtttagtttggctgacactgaagtttggcaagaagagtagttggaaaggtccattgggtgggtgtcttaaataaacactctttgtccatttcagtctttccaaggttgtaccacctgattccagatggtgaaattaccagcatcaagatcaatcgagtagatcccagtgaaagcctctctattaggctggtgggaggtagcgaaaccccactggtccatatcattatccaacacatttatcgtgatggggtgatcgccagagacggccggctactgccaggagacatcattctaaaggtagagactgtggctgtggggctgcagcaaggggcttgatataaaaaaatgcttctgagcaaacaattggatagatggatggatgaatgagggaaatggtaaaataaatgtggatagtgactttctatcattttatgactctctgagatttgtcatttaattgagatctttgtttctctctgtcttgctctttcactctctcccccctttctctctgtatataaatatttatctgtctctatatcattttgtctgtccactcttctgccttctcccttctagctttttcaatcttcctcttcattccctttctccacctcctctttctccttttatctctttttttaaagagcattaatataaaataaaactgggacatatattttcttaaattgtttttagagtagattaatagaacattttgtattttatttaatcacaatcatctactttttgaaagtcaatttcctatagtcttacggccctccctgaaaataaaagtaatctctatgctaattccaccaacccagagacataccaggggagacaggtgttggaatagaa

SEQ ID NO: 1881525 - DNA, 4001 bp, Homo sapiens
gaggatcacttgaggtcaggagtttgagaacagcctgggcaccatagtgagacctcatctctagaaaaaatttaaaaactagcagggcatggtggcacgtgcctgtggtcccagctacttgggaggctgaggtgggaggatcacttgagcccaggaggttggggctgcagtgagccatgatggcaccactgcactatagcttggatgacaaagggagagttgtctctaaaaaaaaaaattaaaaaagaaagaaagaaaagaaagtaagaaagtaaaagaaaagggtttgatcttggggggtaaaaccaactgctagtgtgcctggagtaatatcttcaagattccaaagttccttctgagttgaaaagtgtcatggtctttagcaatgacagtgagaatggtatgggaggggggaatggagcactatatgtccaggatttgccaagcctagtctaaaccattcttcctggtagtggtttataatgaaacttaatttttcattgtctcatattttccaaatgtatgcagttccatgttcttatggccactcggattaaattttcagattttaaagtgataggccgcagaagttacagagaaaaatgaccataaaagatgtcatagagagttacaactggtcattcttgaggggtccctcaagctggccttccatcttggggttgatttgataagctctcaaaagatgatttcaagtgtgcacccaggggcgatggatttcctggtatgatttctcataaatatatgcatgaatttatgaatatatacatatttatatatacatatatatatatatattatacacacactttcagcatatagaccagattactaattaatttccaaatggagacatcctttatcagaaactaccctccccagggctacttctacaggtttctacttctccttctgaataatgggtaagaagctgaatgtgtccaggaagtgtcccagtgagcatgaaatcagaaccttccctcttttctttccagtggttaaaaagtgggccttgattaaaaactgctctgccgcttgccgatgagcttgtccttaggcagtttctcagattcactatgtcttggttttcccagctgtagaatgcaaatagcaatgatacctgacacagggttcttgtataaagtgctcagaacaataagtagcacctgttaaacacaatgttcatttttatgattacatttttttctagtagtttagaaatataatttccatgataatgtaacagccctaatggcccaaaaaaaaagcccatattattttttttaacccctgcatattattcgaaatccaggagtaccaagaaagatctcacctgagaaggctaattgtgtagttttttctcttcctttatacactatacctgggagttagctccactcctggattaactcttatttctctattttctttctgttttacaacaattcatcacaccacatatgtagatgactgtgtgtatgtgaacatggcaagtgaaacctcacgatctccaggctgttcggtgaagctttatgcgaattcatttcacctacacccttcccctgcccacccaaggccttgaaccgaagcctgtgatcccctcccaagttggatcctgcccttcgccaaaggcaagaccgctgaaggcgtggccttctagatgattcatcaggttggcgggctctccctcccctcccccttgcccaggggacaccctgtccgcgtgaagaggggggcctttgtgtgagtgatgtttctcaattatcaaactagtggcgtgaaaccttttcctgaaacacctgagtgtaaaaggttttgttacctccctttttttcttttaaataataaaggaatagccacacctaccttagtttctattggataaaaaggtgaatagttttgttgtggtggttgttgttgttttaagccttcaactctcaaaaggcacagagttcccaggtgcaaagaggtagcttagacctgtctggggcggatcggggacaggagccagctcccctgaggtcgagcaccagagccggcccccagaccccgccctcgactacaatttctcttccttctcctcccccttgctttgcgagctattgactgactgcagccagctgaggcccaggctgtgggaatccggacttccttttcttccctctcccatttttccttcttcctccaccctcccccaaaccaaaccccaaaacctctaggtagtccaatattaaaaccggtggaacaaaagcattcccaaaatcaggaggagggaaagaagaagacgagggaggcaaaagtaggaggaaaataggaatgtcaacatttattttcctgaaggggaaaaaaaattctctctgggcaggcaggccatcttccgggacggggaatccacagtttcctcaggtaatgagttccagggatgctggatgcaggtggtaaaaatacgcagcgtttcaatgggatgatgggagatgtttacagccctcctgggaagatgccagagagtttaacagtcctgggatacctcccagctgcctgctctggtgctggatgagtttacgcctcctttcctgctggaaaaggtgaagcaaccagtgacttgtccagggtcacacaccacgcttgggacagaaataactctgacgtctctttcctggctatatcagcagacaacatcgcctaatgacagtactaccattccaatctgaatcatttaaattgctcctaattgcaggcctgcagtgcactgtaactgccgtatgactctaactgccaagccagccgagataggaatgactgaagttttgcaaattcctgaatatggaattaaaaatgctgggcgggggagggggtagcgcaaaagtgtttgaaaaccactttgaaactgctgacaggtatcctatttcaaattgtttaaaagatgaattggaaatgtcaacttaaatttgtcattttattggaattagagaaacacttggtgttcaaatggatgcggttcgaaaaggcacctcagatatttctaagaagttcggcttcacactcttcctttttgtgtctgctaaattactgtctcattttggtgtttaaacttcccttttaactcctttgtgggcagatatggggaaaggggagggcctgggaaacaaccaggcatttgacttcagatctgaacacggggctggacacgtgctgtgctcaggaaagaaagtaaattccacctggcaaattgctctaactgatttatttgtccacaaagagacgccacctacctgcttgcaggtattcaggtaaatgacaggtgggcggggcctcctgactctttcaatccctaaggtctcagcaatgctttatctgtcggggcttccgtgatgtcacccatttcctggtctggagcgaccaatgccgtcctccttcctccaggcacctgttcaccgaagttgaggctggtcacaactccggcggcccaaggagctgctcggttcacccacaaggaatgagagctgcctgcctgctgctgcttggagagccccagacagtcgcttgaagaggtgagttgaaaccctccatttttctctcttggcatttagaccactggcccctgagggatctgaacacggaatttgaatgaaaaaatacaagctgaacggcttgtcgctagtgtttgccccagagggagaagcttttttgagacagaagagtagagagatgactttgacattctagttgcacaataaacttctcccaggccagatatttaatcctttttgtttctctgatcattaatccagcctgtgcttgtcctcgtacttgatctgattaaaacaacaacaacaacctaaagagaagtagagtgaaggcttttgttttgaaacttagcgcgaaggtgcagatctgttcagcccgtttaacgggggctaggaggccagtgcagactggattcagagttcttatttttccttttcttcctccctgtattttga

SEQ ID NO: 1881526 - DNA, 4001 bp, Homo sapiens
ctgcctcaaagaacaaatatttggactcctcctgcatggtcaattgtctcctctctcccatctatttattaattcagtcttttattttggaaatgggatattactaggccttgactcctgggctcaactgatgctcccacctcagcctctgagtagctgaactacaggtcccactctgcccagctcattcagtcacttattacatcagcaaagactcatcgatatttcttcagccctgtgcattataatccaatgctactttattctgctattcaagttattccagcctcgcccattgggaccccttgtcgctgtgtccctttggcccacagttgtgggttgttttttttgtttttttgagatggagtttcactcttgctgcccaggctggactgcaattgtgtgatctcagctcacatcaacctccatctctcaggttcaagggattctcctgcctcagcttccccagtagctgggattacagacatgcgccaccacacctggctaattttgtatttttagtaaagacggggtttctccacgttggtcagactggtttccaactcgcaaacctcaagtgatccgcccgcctctgcctcccaaagtgctgggattataggtgtgagccaccgcgcccagcctgtgttgttttttaaatcatttccaggctcatggtgtataccttctgcgccagtcctaggtgaatttctcctggttggtgagttttcattgtttacctctgctcacacagggactcgaggagggagactaggactcagagtcctccttcatcttgtcacttctctaaacaattactttttgttgaagacgccatgtaagctggaattcaaagccatctctttgaacaactgtgtgaaataatcgtgctaaactgttattctcctttaatcgttccaaccaagcacccacgggggccattattcctctcctacaactgcaaggcagtgcctcaccaactagctttgttcctgaggcaagcggcaggaacccctctgctttcctcagtgagcaagcggcccctgaccctggcgagtgagttttctcttcacagccccctgtccctgctgcccactgagccagccagcccgagggtggaaaagtcattctggctctaagcttccagcacagtccgggagaccacacgggtcctggggagggtggctaagcccgaggggctttataggatgagtcacaagaaagtccatctggtgggccctccctgactcccctccactgtccccggctcacggcgaggaaggcaaggctggtgggggggacaggaaagggctggggtctctccccacctccactgccaacgccctgcagacccccaggccacagcctttcccggggctcccccaaggtatgggaggtggggcgggtccagtttacgctggtttcaaagaagtgagagcgccccgccgccatgtcatggagggtcccgcgcccccaccccttgcctggggtcgtgtgtgggcagccgcagaaagcgccccgacggcaggagcggggttccaggctgagaccgggcctcggcggcgccccttcctgccgggagtggcgcatcccaggacccacagacaaacagggccagccagggtcacccggagcgcgaaggccggctatgggcttagggtggggtctggtccctacggccggcctagggggaacgcgggacaggagaaggtctgggaaaaacctgcttccgaggcctcggcttcggggcgtcctcctgagctggcgccagcccgcagcggggccgggcagggacgccggcctaacggtggggaccggcagggcctgggggcaggacgagacaagcacacaaccgacggggcggggccaggcgagggcacggggccgaagaagcttctgccaggcccgagacccgcacttagttacctgagaaggcgggaaggtgcggccgcggggtgagcggcggactgacccagctccagcgcctctgcagaggcttgcaatggcgtctctcgggctctgattggtcaggcctccacacgtgagcctctaggagccaatcatgtcggcccacctagcatgcgctgattggctcaggctggccaggggcgggcgcggtccttccacggcccggtccccgctcccttccccaggcccggaggccccgcccgagcggctccgctgggggcggttctgctggagaggacggatctgctggggagatggatatcctggaggggcggatctactcggggggcgggtctgctgggaaggccggatctgctgtgaggggcgggtcttctggaggggccgatctgctgagggggccggatctgctgcctgacagggcttcctggcctggggaggaggccgtgtctggagcttgaaagccggccccgctgtgttcaagatacagtcaaacgttcagaaggaggagactccgggggcagggtggtgcccagccagtgcatggggccagggccacgctggtggcacccaggcagcgctgcctcctggctctcgaatggctgttctctgcccagaatgctctcccacgggacacgcgcctccctccgggtctgtgcacgtcactctgacagagaggccccctgaccactcatgaaatagtaaccctaaccattgctctctgctccctgtcctgcttgattttcctccagggcaaacaccgccacttccatgtttatcatctgtcctccatcactaggaaaaccagttccaggagggagggactagtattcccagcccctagaacagagcagcgcatatcacaggggctcagtaaacatctggggaggagtgccattcccaggaggcctcagaccccgtcacctgagatgagagctggatcccggagaagctcaggtctgacccagcattcattgctgtaggaagggctcgtctagactccaagggagccgggtgcggtggctcacgcctgaaatcccagcacttcggaaggccgaggcgggcggatcaccaggtcaggagatccagaccatcctggctaacacggtgaaaccccgtctctactaaaaatacaaaaaattagccgggcgtggtggcgggtgcctgtagtcccagctactcgggaggctgaggcaggagaatggtgtgaacttgggagcggagcttgcagtgagccgagatcgcaccactgcactccatcctgggggacagagagagactctgtctcaaaaaaaaaagactccaagggaaagctgcctgggtcgtgacctggcacgtccaagtcgctgcttaggcttgcaagggggtccagaccaggctgtggatgggaaatgggaggctgggggaggatggaggctgagcagtggctggatgttggggtgccctgttgaggggcagctggcagcagccacggacacaggggtgggtgcaaagacactgagtttctgttccaggaggaaggggggccagctggcagaggagagatcaccctgggcaatttggtggtgcctggggtgcacacttccccagaggcagcaggaggaggagctggatacacccttccctgggcttggaggagagcacgttccctcccagctcccacctggcatccaggagggcccggcctggggtcagggcacatggggccctcctgccctgggactgggcagctccctggggcattcccagccagcagcatcaggaaggttacaggagacccagacatgctgctccctagagagggctcctgacaaagattttttgtgtggtcaaactttagttaacttcctgaatcttctggtaggcccattggcccacttccttgtaaaatgcagttttagcaaagaatctggctaagtcagtttagcaacaaaccttcatcctggagatctgattggggtcctcatgcttcaccaccctatgggtctgtctgattgccctgcctgtctccagctagaatccagttagatgggtttcatcagaatcccccaacccctgatgttcctcagtcattttcc

SEQ ID NO: 1881527 - DNA, 4001 bp, Homo sapiens
tgggagcaccagggaaggagagcggtgggcgccctgcggcttgtctcggggtctctggggcggccccgtttgctttctgtcactgtatgcatgtgccctgtgtggtccgcagtgcacagagtcttttgtgggtagcgtgcctggtttatgcttgggtccccacaacccacgaccttgtgcgaatggtcagtaaagaatgaacaaagaggcctggcctgggaggcctggggcttgggttttgctctctttacctttgaggtttctgtagagacagccctgtgtggggagcggtgagagctggactggatccacttacgctagcaacatcgtgtgctaggttctgtccttgagagaggaacatggttctctctgggcggtctctcagctctccttccactctggaagcttgcatccgtattagaaaggagaaaatctctagccgtattcccgctcataaccaccaaagacatgtggccatccccgggcaccctgaggaggaggggagtgagacacccccagcgcccttagctttccagagtcttcccctgctacaccaggtgcctgcttctcggaacagcatccatctcgctgccacctctccagcagtcctgcctgggctgctttgattgccttttgctttcctttcctgagtgagtctcagggccgcctcacatactcattctgaagccctggaatgttgattctcctcccaactccttagagaagatgctcctttacaaacccttacctaatggccaccagcactgggatctccatttttcagaaactccgtcccaccttgtccttccatgctgtttgtggatatgcactgagcatgtgttctgtgcggattctacagtggcggagaactctgaaggaaagagaaggctttatccctgcattcagggagcttaaagtgtggtactgacttggtcctaggcccagagctcttccctagcaccagccctccatgtccagccgcctccctggcctacctgcctctcttagttccttgttccactaagttcctgatccaatttatcagctgtctcctcacagtacatgcagaacaaaccacttcttacagccgtagtcccggctgatgtttacgtttacttcttgccttgaccactttgggagcctccttgttcgttattccccctccaccccattcccctattccacacaccataaccggagcgagctttggaagcacaaagcgcctcacaccggcctcagtggcttttacttcaattaaggcagctttagaagtgttgagcaatgagatctcatctgttacctcccttgatcgttttatatttcttctacctagagtgctctccctgtaaatcatggcccaggattgagctttccacttaaatatcagtgcctcagagggcccttcccttcaccatcccagcacttacctctacgttagctgctaaggaggcgcagagccttggtggcatatctgtgcgtatctcaggacattttcccgacagcccttggcagttggctttggacggaccagtttgacttcagagcctgtactcttaacttcactgtctgcactgccttccctgcggcactgtggaaaatacacagaacacaagacctggggaacaaaaacatctatgtggttttggaagaaaccaggctagaagtggagaggcctcttctaaaacaatactttccgaacgaatgtgcacacagagcacctggggagctggtgaaaatgcagattctgactcagctggtagaggaggcagagccaggacaggaagagaatggggctgggacttggtgcacagcgagcctggccaggctgcggtcagggcgttctcccgttgcaccagcgcgaggttacggtgaggcctgagagcctgcattgcaaccaggactcagggggtgcactggcccgtgaccacccacccccccggagtggtgaggcaccagtatttggtcgtgctgccatctccctggcagaacctcgttgcgttatcccccgggactttatttttcttcctctgaggctgttctgcagctctgagatgggtggtgctcttctgagcatgtatccagctatgtgcacagagctggcgtgtcccactttggcatatttagcctctgcccgctctgggccaggctcttcccatatgtgtcctgtgggatcttcctagcaaccctcgggggtgggttcttattcttacagttgaagaacagcagctgtaagaaactaagcgccttgtcagggattccatggcattcatgtgatagagccaggaatgaacgcaggcctatgtgattccaaagcctgggccctaacccattctgggtgagagcattaagcaatgtgggtcagaggctgggaggccatcggtgccaccgcaggagtggcagaagggcttgacctgattcactggagattagtgtggaggcagggcctggactcatgggctgtgactgtgagtgtggaaggagatggtgtgggggctggcgacagtgatgtgacgaaagatgagacctgttgagttctactttcagatggcaaatggtgacacctggcctgggggttgtacaactacatgtgggattcatgggagagggtggattgtggccaaatctggcagctttgtggtcacattttgtaccagggctgggggatggggcctgaaggggacgggatgtagctgagcagggttaacagtgacacctgggggcttagggacaacccgtgtgctggtgtgtatgtttgatagcgaggggcagagagaacaggttaaaggaccttggctacagtgggtaagagttggcaagcagtggcctagagtcagattagcggggtctggcgtctctagaaggccggtttgtgatgggttctgcgcaggattccaagagttagaggatgcaggccctgctggagcacaggaacacagacgcaaacacaggtgacagctgagggcaagtcgcagtggtggcagaggagccggagctgttgattggttgccaaagaaattgggctgacactgaggagctttaggagggccagtgctcctctgcaggtggtggtcaggagggctttggcggggaagtggggttcaagctggcccttgtggttttgaatcaaatgagcatgtgaagttctctgtgaaccatggaaggccttgtgcacacacgtcaacactcaggctccttcttggagccaggtggggtgtcctgagtagagctgcaccctttgagatgatggtggacacccaggaggtggcagaaggccagacacatcgatggtcactgccttgtgcgtgcattcattctctcgctcattcattcagttagcacagcctcggggcctggtgtgcgccagcccctgtggtgagaacaggctaggaggaagacagctgcctcacctggcaggtgccgtgtgggcaagtgggcctcaggatgtcctgcggagggaaggacacaagatggctgtgcaggtagaggagagtgtggaggaaggaagggttttgtgttttaagagtctggtgtattcagggccaggcaaaagccagcttggggtgagggaggaagctggtgaaaagccctgggtgctgggtacaagagtgttgctggctcaggctctgtgatcacgcagtgtctgctcgccagtgccaggccctgagcaggtgctttgacacgcgcccctctcaccatctccccgtcccctaatccctgagacaggtgctccccacttttacaaacgaggaaacaactgtgggtgatgtgggaacgtggaatttcaacccaaggcttctgactccatgcctagaaccatccgtttcattgttcaccagccatgccgcaggatcccctagaattcccagggatcccctgagatctgctggattgtcacctctgaggccgaggtctggaaatttggatggatggaaagaaccccagggagctgtgaggcatggttgggaaccatgggaagtggggacttaccttccccgccgggg

SEQ ID NO: 1881528 - DNA, 4001 bp, Homo sapiens; identical to SEQ ID NO: 317400

SEQ ID NO: 1881529 - DNA, 4001 bp, Homo sapiens
gtacattcttcagacaagggcggacacccgggaacccggaacctgtcccgcagctgtggagccagcataggtcccaccgccccagggacaggcccagctgcttgttctgggatatggggctgcaaatgttgtgaacttcccagggggctgagagaggccagctggggactccgaggacaatggggaggtggggaggtggggaggtggggaggtggggaggtggggctccagctggggaggaagcatgggagggtggggaccgaggtccccaaagtcttctgcagaccctgagattctgagatgtacgctttagaacacgacaatggcttagtgactttcactcagggacaaagcccccagcagagtcagcatccacgctcctaagtgtcaggtgcctctgggccgcctctctacgctgtgcctgcccctgcctctgccaacgacctaccccttaggttctggcgagagagtcccaggctttctttacaccagggccagggctgctcagatctcctgacacagccacctgctgggcctcagggacactcaggcaccctccccctggaaaggccacctgggttgtggagacagacaggcacaagtgtggctcagagctctgcctccctggagctgcctcctgaccactctgggtctccatttcccacctgtagagaggcgaacaacagcactgggcatggggctaatgtggaaaagaccctgtggaatctgcatgtcgcatgtgctcaccttgtgtttccggaaggattctcaggcttgaggcgtgggagtgaggaatcccagccagggctgggccaccagcagaaacctgcagggaagaggacctggtgtgaggagtgggctgcaaggtgaggagttctggggactaagggggtgggatctgtgcttcatcctgggaggtcattcaacaggggcctgcccccaggagcaagtcacctgcctggtcgctgctatggcgacataaacaccaatgacaggcaggccccgctctggacgctggctctgtggttttaatctttcccagctctattttacgctgtttatcagcatttatgaaggacaggtatgccttgggctgtccccaggaatcctgctatcctcattgtgggtctagatggctccagactggtctcctcgctgctccattgctgcagtggggacccagtgagcactgggggccggggctgatgcggctggagcacaagcacgcggggtacatttgcagccccacccagccgaacggtgcacagcaggccgggctgagagcagcgggaggagcccggggctgggggttgaccttttcccaacgtccacgtcagtgctggcaggcgatgggcttctctgtggccggtccctctctggctctctccaggttctgcatgtgtcctgctctctcctgagcacctgtcacgcccctgaggcttgctcactcctctgtctcggggcttgcagaagaatgcttgggcaggtctctctagcaccaaggccctgcttctccccagcccatggtttccggtgtggacctgccagccttcccggtgagcacaggatggtgagaacctgcagcagccatgtaggtggggcttcgtggaaggctgcgtgggtacccaggctctctagggtagcctatcctgcacacggcttggtgtgcacagagctgacttggaggtgaaatggatgcattttgtagattcaataccctggatgccccaccccagggatagatgcgccacagagggcctggctggaactttccccagaccacagcagggacagctctgttgcaggtgctgacagcaaggcctggggagtagagggagcagtcagaggcagagagacggaggtgaggcacagttcttccagatcctagaataaaggagaggaaaatatctgttagaaaatccgctgcagcacccccaagaggcgcagtttggtgcccgtgcactcccgctctccctgcagctcgggagctgctgtgcagtgggggaagccgagacccccacagctctgttttgctctcagtgacagaaggcgtggtaaaagctctgtgtccagcccttgcctgagttacatcacaatatgaggaagctgcagctggcctgtggttcactgttgactaagaacaaggcaagctaggagcagcagagtgaagcccaggccctgcagaaaatagcagctgagggtgaggaggagaggagggtgaggaaggtgaggaggtgaggaggtgaggaggtgaggagtgaggaggtgaggagtgaggaggtgaggagtgaggagagaggatgtgagaaggtgaggaatgaggaggtgaggagtgaggaatgaggagtgaggaggtgaggagtgaggaggtgaggagtgaggaggcaagaggtgaggagtgaggaggtgaggagtgaggaggtaagaggtgaggagtgaggagagaggatgtgaggaggtgaggaatgaggacgtgaggagtgaggaatgaggagtgaggaggtgaggagtgaggagagaggatgtgaggaggtgaggaacaaggaggtgaggagtgaggaatgaggagtgaggaggtgaggagtgaggaggtaagaggtgaggagtgaggaggtgaggaggtgaggagtgaggaggtgaggaggtgaggagtgaggaggtgaggaggtgaggagtgaggagtgaggaggtgaggagtgaggagttgaggagtgaggagttgaggaggtgaggaggtgaggaggagggaagttgaggaggtaagaaactgaggagtgaggagtgaggaggtgaggagtgaggaatgaggagtgaggaggtgaggactgaggaggtaagaggtgaggagtgaggagtgaggaggtgaggagtgagaaggtgaggagtgaggagatgaggagtgaggagagaggaggtgaggaggtgaggagtgaggaggtgaggagtgaggagtgaggaggtgaggaggtgaggagtgaggaggtgaggagtgaggaggtgagaagctgaggagtgaggatataggaggtgaggagtaaggagtgaggtgcctggcaagggctgactctgcaaccatttctgtggtctccaagtacctgctcctcaccttgtttctttccctgaaactctcaggctgcccgcacagcagaggcaccccaaccccttcccaattctgtccctggcctggtgctgggatggcaggacctgagctttgtggcctctgaatcccaggccccctggactttgccctgcagtctgagcctgggtcacagggtgccctgaaaggcctttccccaggcagggcggatacgtgggtgccagacaggtcctgatgagccccaggatccccgctggcctagcccggccttgcgtggtatctgctatgggcgtccggaagggtccggagttatgggtgcaggggatggagcagaaacggccatgacagagaggatggagatgtggggttcagagatgttggagggggcatgggctcagggcagcctgggcagaggtttcgggacgcatcgtcctccagacagcatctccgcgtcgcccatttcccgtgttaggaatccacagattcattgatttcaccagcatctgctgtttaagaagcaagctctggactggactggatttcttggccacttcctcatctcggtgcagcggagaggagaggccagactcaggcctgatccagctcccctgaccccagccctgcgtaccctcagctcggccccctcttcccacaggcttgggactcgctctggggggccctgctcttcccaggggttcctgggggcttgaggagccttctgcctgcagccacaagcgttcctgggggagcagctgaccggctccaagcctggctgactgaaatgaaattcagaagagaacttcatcgcctcctgcccccgagcccgcttccctcactctaaataatttagacaaacacacatctctttcacagtggctgccctgagctcctttagtcaaaatca

SEQ ID NO: 1881530 - DNA, 4001 bp, Homo sapiens
acactgtacccatattttggctccaggattataagttgccctctctggtggacccgaattctccagttctatatgttgtttctattggggcagaaatttcctcagtggttgacaaggtaccactaacaatttagcaacccgcagctgcagttgtatagcaaaagaatctggagtggtattgtataaaatgacctttaactctccctggtaatcactatcaattataccaccatagattataatgcctcccattgcaaggcttgaacatgttgtaatccatttatctgcattcgaatttgcagttacggtggaaattttggcctgttgatctgcttgctgattaaatagtctgttaagaataagcagagacgcatgagcatcaacatggaaaacagcgctaatggtagtgtgtgccaggattcagacatctccccagtattgttttccccaaacctcttcattcccaattaaccatttgtttcatcccaagtagtaagaccatttgctactgaccaagagttggtatacaggtgacaaatccctctggcctcctcctgaatagcttggaggatggctaccaattcagccagctggttgctcccaccgtttccttcatcagaaccagtgagttttgggggaactcatgacccaaatcataatcataaagacatcatggttgaagcagaggtgctccgtttccagcgaagcccaatagcaagctaacggttgattcttgaaaggggtataagctttgctggtctctggcagtttccagatccaaaccacaaaggtaccctcttcccatcttgtttctgcctaaggctccaattagcctgttgttgtagttctactggcccatcctgtatgggccgtagatttcagaccagttgcactgcttgtttagcttgttcaaaagccatgctctctttctctccccagtgaaagtcgtagcgttttctagtgactgcatgcagaggttctaaaatgttacccaagtgggactatgatgtctccagaatccaaacaaggcaataaatttctgggccaccttcttagtggtaggggttgcaaattctagtattttagccttagcctttgttaaaatggactatttcctttattccataggatgccaaggaattttacagtttgtgcaggtccttgaattttactagggttaatttcctggccttcagataggagatggatttttacctgctccaaaccctggctgactagttcttcagttttaccctaaccatgccattcagatagctgcttttttcagcaataagctgatagctttgagcctaatcagtcaagacataggcctggcattgggccagggccagtctggaagtcagattagcattttccttttccagcttacatttctcttgaagcaaccagtccctatcttgacacattaaattataagcagtaagcaagcaccatctatgccgggaaattccctcagcatcccctttaccaactgggattccctgcagcacttcacgcactcaaatgttgaaatcgcactgatttagattcccaattatcacaaaagccagttcccctgggccattcaatcaccaagaaggaaaactgagggagttcccatcccaggatgggggaagaccctgagttcccagcccagaccctgcagctaaaaaatggcatgcttttgctatgaaatcctgttcgtgacgccaaaaatgttctatgcgggaaacgcatgaggggagaagaaaagacacacacacgatacctttaagggtaaacaagctttgtcccaagtaaatggcaattcagatataataagcaaatgatagaataagcaaattaatataataagcaaattgcaatgggaaggggagaagggaaatcagatatatatatatatttacactcaccagaatatggaagattcaccaccagactgggaagcaacagccttggctcctgagttggccactcatccgtgcagacgaggagaggtctcatgaagcttcggcacagtctgggactctagctctttttgtaacgagttgtttggcatgaggcccagtcatgagggcccttcatgactgggctcaaggaacacaaaaagatcaacttgtttttgccagtgtctattgttcttcaataactaaagtatgagaatagattgaaatagagatttctccaaaacagcactggataaacgcctcaagaagctcacacaacctgtgccgggacttggtgaccgttgtttgtgcccacgttcaattgagttcaaatataatattttaactcttcctccacagctgccataataaagtatcaaagactgtgtggcttaaacaacaaaaatacagttgacccttgaataatttggtggttaggggcaccaaacccccgtgcagtcaaaaatctacatgtaacttttggccttcccaacacttaactactaaaagcctactgttgaccagaagcattactgataacataaacagttgatttacacatattttgtatgttacatgtattatatgctatgttcttacaataaagtaaggtagagaaaagaaagtgttattaagaaaaatcataaggaagataaatatgtttactattgattaattggaagattggaagtggatcatcctaaacgtcttcatcctcactgccttcatgttgaggaggctgagaaggaggagaacgaggaggaggagggaatagtcttgctgtctcagggatggcagaggcagaagaaaatccagataaaaatggatccacactgttcaaacctgtatacacacacacacacacacacacacacacacacatagaggatctgtatacatgatccatcatggatcatgtatatatatacacacacaccttattagtcctgtccctctagagaaccctgattaacacagattttggtatcaggagtggttctagaggaaaaaaattttaaggatgaagttctttagttggtctgggggtttctggagttggttgcttaatatgactagaccccaaaatgctaaggactctacttctactagtatggagaacacggagagtctttggcatgaattgtttagacagttaagcaaaataaatgcatttgatacttctgattcaccactcatgacaggcaaggaatttagtgattctatatataatatctttgaccatatgtgggaaccaaggaatataatgaagttggttggttggttgctcctaagttcactagccaaagtgatgaaaggaaacatttaactccgagattctgtctctcagctccagaagcccatactgaccctcaaatcttttaatattgccctgagtgagagtcttacctcctgtagggaaagagctgaaattgtggaaaatcagaacaagctcttatcctgtgaatggctgacctgcaataaaagatgcatgcacagacttgtcaggtgtctactgttaaggtgacggcattgattgaaaaaaaatgggactctgcaacttggaatggggacatgtgggaggaccctgatgaggccagaagcactcagctcctaaattctgatgagcctttttttgccagggaaacagcctcccacccacaccacctcccctcccctccccaacccagcctttccacctttgtttgagataaacccttcacttcctgacacaacagtgatggcctcccctgaggcagttgccaggcaaaacaatgttgattctcctcaagacccacccccaacacccctgtttgcttctagacctataactaaagtcctgacaggcccctaaaggtgaggttcagagtgtgacccacgaggcagtgtgctacatgccaaaagaactgcttgagttttctaatttatataagcagaaatctggagaacaggaatgggaatggtattaagggtgtgggataatggtggaaagacataaagttagatcaggctgaatttattgacatgggcctactaaacagggattctgcatttaat

SEQ ID NO: 1881531 - DNA, 4001 bp, Homo sapiens
ctgcaacctctgcctcctgggttcaagtgattctcctgcctccgcctcctgagtagctgggattacaggtgcgtgccaccacgaccagctaattcttgtatttttagtagaaacggggtttcaccatgctggtcaggctggtctcgaactcctgaccttgtgatccacccacttcgttctcccaaagtgctgggattacaggcatgagccactgtacctggctggctcctccctctctcttgtgccggaaaccatctgttgcagggtccctgatgatgccatcttagaaatgtctcttacaatccttccttgtgaaccaccctcactgccactaacctaggtcagacctcatcagcagcctcctgaagtgccctcttgcctccactttttctccattcatcgttctaaagctggggtttgccaggcccactcacttcttagtgagtccacactgtccgagtggtagggccagagcttgcacatggtcattcaaggtccctgagtcagctgcagctgatgatgcccaccttcttcctcatgccacctgcatcatattccagagtccagtcaagtgcagccttgcccttatgaccatgccctcttatttgacattgagtctctttcttggaaagtctttcttccttacatttatctgttcaaatcttatctaccattcacagattatctgaaattatctttttcttcacaaggttctcctgattcctccaagtcagaagtatgctatgccctcccttgaatttcactaagattttatctctttatcaatgaaggcatttattactggtatttactactttcttctatttataatagttattcactgcatatctgatgcagtctccaaaaaggtgaagttcttcaggacaggaaccatttttgttcacttttgtgttatctttggagcatgttatttccttgaccattgcaaccccaataaagaaaattgaattactgcaaagtgactggctttctgcttcttctgggtgtccaaaccttatcagctgattaattaaaatgtaataaagaaaaaaggaaaattatttgattcagctgatcagtcatgaggaagacttctttaaggagtgatgaatttagagttatgtcagatacaaaataggatatcttagttttctgtttcagagatagtcttaatcagaaagacacttttaataacataagtgcttcaggattattcaccaaatttataagcattttttggttttcatctgaagattattacttgaactttacaaaagaatgattgctttgcttcgttgagaagcatcactttctgatgagtcaggatgtaccaatatcaagatgagggatatttttataaaaacaaacatctatttttttcctggccaacttttctactcatcagaattagtgcactgctcttcacttgtaggaatcctgatgagacacgcaattacctagttaccaattaacataaagaagatcttgtggaacttcgggaatccctaatcagctggtctgcagaaaaacaacacagcccacaggcgcgcatgggggaattatgagaaatatttggaatcactgtccacattttcttatccttacacatttttccagctatttgtcttaaatttaatacacagtatgaagtagaaatagacccagggttattagatcagagaaactgatcagggtaaatatgtcctattcatttctacagactgattgcttaccgggtaagaagagaatgtaactccataccacaataggatttgttcccattcagtttaagaacagattacaaagtaagcactttcataattggtgaaattaaattcctgagtatttagtaagaacaaggaagattttatttgcacaatattctcataaaagtaaaaaacaactgagcctaccttccatccatatctggatctaacatttccttcaacaggtggtgataaagaggccacgaggcactcagagaagcacagcaagtaagtagaaagaagtgatttacacagagagttcaaaaggatttctaccatttagttaaataatacctagagtccagactcttgtgaccctgcaaatgctgggaaagaggatttacagcgaggttgggcggggctgatgttacataagaaagcagccactgagccacgcacactgccagatgccaggtcagccaggagctcagggatccaaggcccctctcagactcctggtgcagcgattatagagttcagccatttaggagagtgtgacagagtggcggcagatggcccctagcagaaataagttttgaatctggctctgaatcccaccctcactactgcctctagaatgtcattaaacttaagcagaggagaggaatgtcagaaccaagacaaagaactgtctttggttgagagggtgtttctgtccacttgctgtgccatgcaggacgtgagacgggatagggagatttcatgtgtgtcataggctgatgtggttctgccattgtaagatcagccctcttgacatagtgactgtttccgagaataatcataatgaatcacaaacctgttagcacttttttctcctccttacctgcctctggctgccagcgaagtgctgggttgaaagtgtgtgaagtgtgtgcacgtgcacacatgaacacgtgcaggtgtggtgggaagggggcacatgggtgtgtaagcagtctgtcacatagggaagcagttcagggcccaatagcttgaggcctctgagatgagtttacttgtcctgaagaacaagggtgaacaaaggcagtgttctcatggtggtgacagcagcggggtgcaggtcagtggaggctcagaaaggggaaagttaaaatgagctatgaggtccagcaatccggacaataagaaggagtcaggtgagtggagataaattaggcctgatcaccttgaagtttggaaagagaggtggaattaaggagatacactggcttatccttcaaagccccctataaaacatgtggaaacattaactcacagcattgaaaacggatgtttggacattttttatgtgtgttagggggtgcatatggtgaccaagaatgtctggaggtgaccagagataactgtggcagaaatatgagaaccagtaaaagccaatatttcctggaggatatcagcaattgcctgtgtaaatttaagcactggcctatctgtgagtatctggctaactttaagacagaaggaaaacaaaggaattcattaccccctggaggctgaggacaaagccagggatctggtccagcctttccccataagaagaccaagacagggaggcatatgaagaccaggaatatagttctccagttccatccatgttatgttaagtgaaataatccaggaacagaacggtaaacagtgcatgttctcactcacatgtggaagctaaaagagctgatctcatagaagtaataagtgctacagaggagactagaggctgggaagaggaagagagggaagacgaaggaggtaagggagagatagggatatatttgataaaaggatactaaattacagctaaataggaggaataagttccagtgttctataccattataggatgactaaagttaacaattatttttacatattttcaaatagctggaagggggatattgaatgttcccaacacaaagaaatgataaatggccaggcgcagtggctcacgcctgtaatcccagcactttgggaggctgagatgggtggatcacctcaggtcaggagtttgaaaccagcctggccaacatggtgaaaccctgtctctattaaaaatacaaaaattagtggggtgcggtggtgggtgcctgtaatcccagctactcagaaggctgaggcaggagaatcgcttgaacctggagggcggaggttgcagtgatccgagatcgcaccactgcactccagcctgggcaaaagagtgagactccatctccaaaaaacaaacaaaaaaaaagataaatg

SEQ ID NO: 1881532 - DNA, 4001 bp, Homo sapiens
tgaagaaagaaaatctcataattatacaaaatatttatataaatacacatttaaaaacttgaaccttttaatatttatatcttaatatatttacattctacatttttctgtggtaatatagatcaactaaaataagagattaaaatgtgatagctcaatttctctagcttccctcccagttctttattaaagctatgtttgatatttcttatatgttatttatttccatcatttggtaattggttgatgtttagttttactcatttgtaaaaatacttgaaggtagttttttattgtataaataggctcaatttgaaagtttacaatgggttggataatttgggggatgctgttcactttgactacaccacgctttagaataaaacactccaccaaattagacattttgtaatctcactagtagctaacttctgttgaaataaaacaagtcagcatgatgaagtggaaataattttaaatgagaagagatgcctattgggttgtagaccaagatattccagtatcttgcactaaagttcatgtacaggtcatgtacaggcacttatttccactaaatgtttctgcaagttttaatatttcaggagaagatctatgtaagttatttttctgtaacttaagatttctgatgtagttcttggcttccaaagctttcaactgaaagaacattgctactattagagggaacacattttatctctgcctggttgaccttacatgttatggaagctcagcaggtacagtatttctagcatctcatggcgtcttcactttctcaacacagaggaaattgacttctctgataagtaaacttaaggcggaaaaagccttagtgggttcagtttcctctatttcttttcttcataaaacattcctccttcagaggtaggctttcccaactgtggttggccaaccgtgggccagattccctgaagggccagcactttctccctcctttggaagcaggctgatcaggaaaaggcgtggaatctccactgctttcctccaagcagtaaattttacagcagcatgctctgacccttagagcaaagtaggaaggctgtagtttttattgggattaacatcaaaatccccaacatctagatgattagccttcaaactatgagaaataaacaaatagtaaaaactggggaaatcaatagagcctgggttaaaaaaaatcttgcacagagtaaagactttaaatgttttagtcctttgccacatatcgggtgatgcaaattgtatggggtaatgccgattgatgtttaactttcaaggcttcatcccttgacaaatacgtaggttaaaaggtcgcagtaaggaggggtatcaaggacaagattcaaatggaggaaacagagagacttattgtgtccggaagttttggactttatcagggtgaatatttgttactattgctgttcttctcagctaggtctgccagaaaagtctttaagtagataaatcatatatctaactatcataactactacagagcacagatatgtgaggtataaggtgctaacttgaaatatggggtggcactccacattgtagtattattagggtgtccctaattatgtgcttttttttttgaaatgttgatttcagtagccatcagagcatactggggaatagtggagggaataacacaaccttgaatccatgtggttcgtcaacatgactcgagtaactacccacccaccacttccctctcccgtgcatgatgtttctgttaggtacttacatataagagagaaacatcatagcagatctcgtactgaatttagtgctctgtgcaagagagaatgatcttcaaaagtgaaatggtgattaaaatttttaccatactaagaaaaactgttctagaatttttccttacatgcctgtgtatttactgtaataaatataaagttgtaattctacataactagtattaagtgttgacactccagtgaagctaagcacagaagattttctattagcacttagtaacctttgagtttttgtaatagtctttggtaacattatgatgttcttgaaatagaactttactggatagaaattctaagggttgagatgtacctattttttaaagttggctattgcgggttttcagtgctttgatattgcatatgttttgatgtttatttggagcctttagagtagagatccagccattcgaaatttgacatttagttcatgcaaagctagctatctggaaagaacagtgacacccatagaagtcctagttcattgcaatccaggctcaaattgggattgaaactcagaacttttacaaatgaaactgaggaataaggagatagtagcaagagaggtcaatgtttgtaactcataaaggagaagttttgatttaagaatttactttctttgatactgagattttaacttgcaaagatttgcttctgaagctttgatttcaccttaggattttgtggcatcttttagctgttgttattatgttactaatgtgtcattatgcaattttcctagattttttttgtttaacaattatatgatgttaaaaaagttataatatcatttaatattattgtttaaccttcaataagcagattgcattatgtggcagaacatgagttgaaaaatacaaaagaaaatgatgtttcaggtttgaaatgaaatactttttgattaatagaataaatattctattcagatgcacttgagagtttttttccaggcaaattctaattgaattgacagaatcccactaaaatacagaagaacttactggttttggcagtgtggattaaggaatgtgagagcagaacaaattgcctcctatgccacagagagccaaaactctggctaatcataggcttaatgttcaatctcaacaggtaaattaagaaaatgaaaaagaaaaaaactgggaaatcttgaaaaaatatttttcaccattcttgatgcttctttttgatgtttaaacaagcccaataatatgcaactgctggcctctctttacccttttactcattctaccaaaaaagtgttggagttctttcactgaatgataaatttgggaagaatcaccagagcctgacttgtatgtcttccaagtagactgaccatgaagtgatagagatctctgctcttccaaggacaagacttccacatggtcaaacctgccttagtccataatatctgcaaaagggtagataaaacagatcttatcccaaagtgatgaccgccaactgagtccaagctataagttgtgtgttatgtatgtgtgtgaatgtgtgtgtgtttctcaagaaagtactgaaaaacttcaagatcaagtgaattagaaaatcataattaagtcaaggaaaaccagcaaggtaattatgacaagggcaacatttggaaaagcaagaggagttgggctattaccttaatgcctgtataaacaaaactgtgggcaacagattttcctcccagtttgattcttaagacctattatttaaattaaagtcattgcatttcttatagtgaaggaatgaagttaaattagtacttagatgggaaattatagcacttaaggattaagtgggaaacaaaaaccagtggcttaaattttcaccttggatttttagaataagtttaaaatgaaacgcaagcagcagaaagaaataaatgtgagtaaaataaaatagaaagcacaataagaagataaaatcaatgaaatcaaaagctgattattttaaaagatcaatacatttgataaactgcaaaccagattcatcaagacaaagacaaaaatcaccaatgtcagtaatgaaagagttaacagcgctgcagattttatagatgttaaaaggaaaataaaataacattatgaataatatatacaaataaattcagcatcttagataaaatgaacacattgcttaaaagtcacatgtaaccaaatctcattcaacaaataatagcttatagtttaaaatcttcccaca

SEQ ID NO: 1881533 - DNA, 4001 bp, Homo sapiens
tttccttagcccactttttgatgagattgtttgtttttttttcttactgatttgcttgagtttgttgtagattctgggtattagtcctttgtcagatgtatagattgtgaagattttctcccactctgtgggttgtctgtttactctgctgacagttccttttgccttgtgaaagcgctttagtttaattaagtctcagctatttatctttgtttatattgcatttgcttttgggttcttggtcatgaaatccttgcctaagccaacgtctagaaggatttttccgatgtttgcttctagaattgttatagtttcaggtcttaggtttaagtccttaatccattttgagttgatttttgcataaggggggagatgaggatccagtttcattctcctacatgtggctagccaattatcccagcatcatttgttgaaaagggtgtcctttccccactttatgtttttgtttgctttgtcaaagatcagttgactgtaagtatttgggattatttctgggttctctattctgttccattggtctatgtgccggttccctccctgattagcttaataactaacctcctgaattctttttcaggtaaatcagggatttcttcttggtttggatccagtgctggtgaatcagtgtgattttgggggggtgttgaagagcctcattttgtcatattaccagggttggttttctggttccttctcatttgagtaggctctctgagagaaggtctagggctgaaggctgtcgttcacattctttcgtcccccaggttgttcccttgatgtagtactctcttccttttcctatggatgtggcttcctgagagccaaactgcagtgatcgttgtctctcttctgggtctagccacccagtgggtctacccggctccgggctggtactggggtttgtctgcaacgtcctgtgatgtgacctatgggtctctcagccatggataccagcgcctgttctggtggaggtggcaatgatgggggtgcaatggactccgtgagggttcttagctttggtggtttaatgctctatttttgtgctgtttggcctcctgccgggagggggcgctttccagagagcatcagctgtggtagtgtggcgaggaaccggcggtgggcggggccctagaactccaagatgatatgccctttgtcttctgctaccagggtgggtagggaaggaccctcaggtgagggtggggtaggcacctctgagctcaggctctccttgggcggtccttgctgcggctgctgtgggggctgggggtgagattcccaggtcactggagttatgtacctaggaggattatgtctgcctctgctgagtcatgcaggttgtcagggaagtgggggaaagccggcagtcacagggctcacccagctcccacccaaaccaaagggccggtctcactcccaccgtgcaccccccaacagcccccagtccgtttccaggcggagagggatacaggcctgaaaacctgccccaggctacccgcctcccagctgcgagagaaaaaggcttggttcttcccccgcctgtggagtcagcaccccggattcgtgccctgccctagttctggccaggaggattctcacccagttcaaactgttacaacgctcagctagagatttccttctccctgtggagttttaccccctcctctcccgatggatccctgtggtgccagcaggaatgggctgctcggggacccagcgagctccgcgggcctttccgctgcttcctctacccctgtacctcactgggctccccagacggactcagctccaggtaaagttggaaattctcccgcaagcagaccttcagcttccccagtgggggtgtgtgtttgggagaggagggtctccctctcccacttctgcagttggggcactcacacttttgcgggggtctcccgggtcctgcaggagcagcccacttccttcagagggtctgcgggtcctctcgggactgctggtttcttcctgcagtccatctggagctaaaagtcacaatgcgagccccgcacgctgccctgtcgggagctgcaatgtagtcctgcctcccgtccgccatgatgatctgttctcctgctgtaaattcattccagatccagattctttctcagcggcccttggtgtgtgtcagaagccataatcggtgtgtgctacccacccctactatgcagggcagcttcatttccatgggttgcattgataattattggcttattattatatttttctatgtcactttacatttcttagtgtttcttacatgcttagcatatttctacacatttttttctaattcccaaatgagaagaaagcaaataccaacagtattttctttctttgatcgtatatccctctgttcctgtgtcaggaaaatgtgaagattcaaaagataattgaaagatgattttaaaaagtatttaacatttattttaaaagcactaaagtttgttagcaaaaggcttctgttaaatgttgggagaaaagaaagacttttggaatttcatggaaatattattcatgtgtatttaccaattggttatatgagacatgaagttttttcctaagagataaattctgatcttatacaaacctgagaatctatagggtaagaggtggagaggagagacgaacatcacatacacatctagcaataatataataatataaattagtaaaacattcttgagtacagttagcaatctgtattgaaagccttaaaatacaaatgtaaaggtgggcgatagacaccttctctttagtaatcagaaaaattaaggcaaagttgccatcagttgagatacccagtaattttttacttgcatgttcctcctggctttgtatataattattgcaaatatagcttatagcctaattcctttcctttatgttttaaaactcctagtgtttctttcatgctgcagtgccttccttcagttcaactaatgttcacagaaaatctgtagaatgagcaggtaaatcctggaacctcagaatgtcaggaagtagagcagagaaggaggggtacgggcaggtgcgcagctcggcctctctcagtgctcgggtgtgtggtacaggtgagtgaacacctgggcttgcttgtgcccatagacacattaaataccagacaattaaagtaggacaaaatcaacactttcctggaacaccgggggcaagatcaatcccaggcaaacagctgccttcgtggctgcccttttgatattctactttctcaaattattcttacattctttcatttattcatcaaatatgttttgctccctacaacatgccatgtactttgctaagattagggtatatagataaataagccatgactgcttctagcacaagaatatgtataaagaaagttgtagatctatatagaagaatagaagcaaaggggcagagtggcacagtgaccaagtgcggacttgcaggtgagttagagtttcagaactcctttgtgtcatttatgtgacttgggtaacttatttaacttccatgagcttcagtttcattatcgtaaaaggggataaaatgcctatgttaggaagttatagtggaaatgaagtcaaaggaaagagtgtggtaaaacagcgagcatgtatttgggacacgatagcagccaaaatattgcttaagcattacacatatgtaacgtatctcctgcttacctagttggttttctttttttttttttttgagacggagtcttgctctgtcaccaggctggagtgcggtggtgcgatcttggctcactgcaagctccgcctcccgggttcaagcgacttttctgcctcagcctccgagtagctgtgactacaggcgcgcgccaccacgcctggctaatttttgtatttttagtagagatgggatttcaccatgttggccaggatcatctcaatctcttgaccttgtcatccacccacctcggcctcccaaagtgctgggactacagacat

SEQ ID NO: 1881534 - DNA, 4001 bp, Homo sapiens
gttacttttctgagcctcagtttcaccgttcataaaataggcatgaccatgcttacctccaaacatttgataagaattcactgtgaagtacctggcatatatgaatagtagctcattcattcaacaaatgtttattgagtacctaccatgtgccagatgctttagcagtggggacacagtggtaaacaaatgatatctgccctcttggatatcatagttgttcaataaatagctgccattccaataggtatatgaaaaggtactcaacatcactagtcatcaggaaaatacaatcaaaactacaatgagatatcatctcacagctgttaggatgtctattatccaaaaaaaaaaaccaaaaaaaaaaaaaaacaaagataagtgttggctaagctgttgagaaactgaaatcctggcacactgtggtaggaatgtaaaatggtgcaattgctatagaaaacagtatggaggttcatgaaaaaatcaaaatagaagtactatatgatctaacaatcccatttgggggatttatccaaaagatttgaaatcaggacctcaaagagatatctgcactcccatgttaatttcagcattattcacagtagccaagaggtggaaaccacccaaatgttcattgctggatgaatggataaagagaatgtggcatactgcacatgcagtagaatattattcagctttaaaaaaattctaccatatgctacaacatggaagagcctggaggacattatgctaagtgaaataagccagtcacaaaaggacaaacactgcataattccacttacataagtatctaaatgtatctaaagtcaaacacatagaaacagagtagaatggtggttgctaggggatggggcagtataaatggaaaggtattattcaagggttataaagttttagttattcaagatgattaagttctggagatctgctgtacaaaattgtgactctggttaacaacactgtattgtacacttaaaaatttgttaagagatagatctcctgttacgtgttcttttttttaaaaaaaagaaagaaatattataaatctagatcatggtaatctagatcatgtttgtgtaactctgtaaccttactaaaatggattatacacttaaaagggtgagttttattatatataaattacatctcaataaagcagttttgcaaaaatagttgccattaatttaacagtcccatttctttcaagcctttgttcaatatcaccactcccctcccagcttcacttttttcatagccacattttgatatattatagtttatttatcttatgtaatcaattctaagtttcacatcttaacatacataaaatcaagatgcattctataatggcagcaatttattagcagcattctttctttctttagtggcacatagactagcagtgcatcttgtatcactgccatcttagagacaataaactgtgctgttgtgttattgtttcttgccttttttcccctctagaatgtttgcttcacactggtagggatctttattttgttcactgctgtattctaaatgtctagaatagtgcctagaatgtctagaatagtgcctagaatgtcacatatcattgataaacatttgtttaatgaataaatgaatgaatgaatgggtgtcatgcctagcatcaagaaacatactaaaacaaacgaactgaaattaaaagatgagttaataatagagcaacctactttcatcatttcctcttctgttttatcagcaggacactggggaaatagccgagttttgaagaatgtcagcagggagccaccagggatcatcctccccggtaagaagagacctccagagaccttcaggaagctggaaagaagcttccaatggtgagctcagccccagaagcttctgtccatgccatctcacttctgaagtgctaattcaccactttcactagagatgctgaaggtagccctgtcttgcctggaaagtgactggagtggtcccaccagtggccaattaatctcttttaaacactccctaatggtccaggaatcaatcccctacccccaaaagaaggctgagtcagttcgttttgtcctcgtgagtggtgaatgacctgctctcctgatctgcctggaggcccctgaggttaggttttgggtgcaagtggctcccttgacagtctggagaggctgtgcaggcattcattacccatggccccaggcagaacctacaccaggctacgtggatgagaatatgcaaattccttgttagacaagtcctgtgctctgtttcacattagctaatgttcaccaacccagtcaccaaccgtttatggttttccttcagtttcaaagaacaaatcttattattgtcctctggaagggattgaagagtcaaagagccaggaaaacccatttgagggacgagtaaaacttcccacagaagcaatatcccttccttgagcaactttgagttgctggactttgttcttcacatttttgtttctctttccattatttctcattagacgcagtgcccagggtccatggtactcttagggacccacaaaaatgtgtgagtttattttaaaatcaagaaggaaaacaacaaaactttagggttaaaaaattttgcattattgctcacatctaaaaaaatgaaattttcaaggtctaagaaaatttagactttgtctaaaataaaaattaaatacaatgttgaagaatttaaagttatatcaaaaatcatgtaaaaattgatatcacattatgaaggaaagggcccgtaaaactcatcttgtagccttgaggttaccagatgagaaaagtgatcttgtcagactgagaagcctggtggacccaggacattcagatccctggcaaacagctgagagaattgttaggggaagaggcaattgttaagggaaaatgctgggactaacatttcttgagtgtcactctatggtaggcttggtccaaggcattttagtgatattatctcatcaaagccctgcagcaactctgagaaatcatataaccatccagctttacagagagtttaaagaactgctaccagactgctctcccgccatctctctgtacatttctctttcttaaaaataaataaataaatacataaattcacatgctaataaatccttctcaaattaccttatccaaatgttgatttggattttttttaatgaagatttatttttttatttttttgagacggagtcttgagatcttggctcactgcagccccacctcttgggttcaagcgattctcctgcctcagcctcccaagtagctgaaactacagtcgtgcaccaccatgcctggctagattttctgtatttttagtagagacagggtttcttcatgttagctaggctggtctcgaactcttggcctcaagtgatctgcccacctcagcctcccaaagtgctgggattacaggtatttttttatctttaaattagaactagaaagacagacattgaccatcaaagacttgatttgggtttcagacaggtttggacagcgttctaggatgcacctggggtcttgaggcactcaattagctaaggcagcccgccttggagaatgggtggtttttacttattttttgaaacacatttttcaaatgtccaaaggtaatttaaagaaaaacaatttcacaatcatcaagttttgattgtgttggccctcatgcaaacacccacgctgtcctcagaatgtggcctaagggccattcaattaggaaacacagaagatgaagcttgcctactggaaacaaaatgtcacaaaatctctcctgcaatggtttggatatggttcgtttgttgccaccaaagctcatgttgagatttgatccctactgtggcagcgtcgggggttgggagctagtggaaggtatttgtgccatgggggtggatcccttatgaatggcttggtgctgttctcatgtttgtgagtgagttctcactctctcaagac

SEQ ID NO: 1881535 - DNA, 4001 bp, Homo sapiens
tgtatgagattaggttgtcaaaattaagaaagtgctggaatttcattgagtgtgctaaaaatgtaatttaagaattcttgtaaggaagatgatggaggaaagtgtagctaacaaagttaaatatctgcaactccattacataattactctccttttgtttatgtctgaaatttaaaaagtagatataaaaaattttttaaagtagatatagtgtaatcactttttaaaatagccttcttattgactatttatataagatgaccagcagaagagagagaaaggcaacttaaaaaataataataactcactggcatggctatccttttttattcattatcagaaaattaatttgatttagtctttttaaatagccagtcaccattcacgaaataaatcaacagaagtgtgtactggaattatttacttgcttgtttctgccaccacactggaatgtcatgaaaataggagctctgtctttgtcatcaatatggctcgtcacctagcacattgccttaagaatattgatataaatggaatgacttactctctgaaccaaagctacatcatcttcaacaaaatttttgcaaaattacaatcttcaattccaaaggcaggaaaataaaatgatcacacttccactgtcaacatcatttactaagttgaccacagtttgaagagccctataggagatactatgggatgacacaaaaagaacacaaaaaaggaaaacattttagatagaagtggtaaaagttttcagattataaaatattaccatgctaatatatatttcacaatgaaatgtattcattatatagcaaaaacgttaaaatacttgttattgattagaatagagatcagtctctgttagaaacctttaaaaggtgtacaaacactttgtaagagatgactcctgtcccatcctgctcagggatgaccagaactttcatcttagatagatacaccaccaggtttcatcagggacaccttaattattttagctgtctaggtaaaccaatctcccgatgggaggatatggagtagggcgaagagttatattttggaaaacaatccatgggaaattaagtcaagtagccaaaggtttaatttggaaatgcaaatatccatcaattaggttttcaattatgtggacaataaaagagttgagcagagcagtagagacaaacaaaattaaaaagagaaaaggcagagaaggcagggaggggcttattttcacacattataccaatttacattacacatcatattaaatttaagtaaggcgcttttcttcatccaaataatttcacccattttaaaccataaaatactgtcggcgaaatctcatctgggccatttgatgtaatctttctgcgtccctttcaggaaggaaggtgcgacaacacaatgaagacagcctgttgctttccttggtatgtttacagcaggaatcgggcagcgacttaactagacataagtttccccttcttcccatgggtctatttgccaaagccccctgcacctattagaattttctgaggttgggctggtggagagcagaaacccggaggctagattcaggagacctggtttcccatgccacttagtagcctgtgacattgagcacaatacttacttttcggcgcttccgtttcattatttgggaaatgggaacaatatatctgttttataagattgttgtgaagatgaaacaggcctgtgtgtgaaaggccttttctaaattgtaaagcgctccccagatgttagttattatctcctttaaagggcacagaatctgtttcaatattataggaggttgcaaaaaggctccttgacactttttgctcagaacttgaccctgagcttaatctcgccgtaaagtgaaagggttcttgcgcccccacagcagcccggggcagggtcaccctcgcgaccggggcggtcattgccgtattccgtcctgagctgccgctcccccacgatcctcccaccaatcccgggagggccgcgacgtcccttgccgcttgggtggcgccagctagagggcgcgggccggggcggaacccggtaccgcagctcgggaggtgggggtgggggcggggcctcgcgcggagggcgtggcctcggggcgtcccgggcagccggcgtgctgagcttgccagccagctagcgagcgacgggcgcgcgcggcccctgcgcactcggccgccgcctgcgcgcgttgcggccgcagctgcacctttgcctccgcggttccgcagccgagccccgggaggaggcgctcccctgcgtcgtccgcacttgcgccctttcccaccgcaacaggtcaggggagggcggaggtgacgagggcgcccgacccgggactagaggacggaagggtctggaaggtgagcgcagccctgcgccacccagggctgggggtcgatccgcccggcccccgacgccgccgccgcggacttctcggaagccgaggctctccccgcctctctgccggcttcccagcacgctgactcaagtcgctggcgttcccacttttccggtgggagccctcggggagaacgggctagggctcagagctctcaccgccctacttgcgatcccgcggcaggtagcgcgtagaaaaacaggggacggggacatgggaagagacccatgctcctccctcacgcgcagcccccaagtcagacgtttgcctgtgcaccccgcgttttgcggagagctgtcccgttgttgggacctgctacttgagttgcgtaatgagtcccagaagtttctcggggggagggggcggggaaaagtggggttcttctctcctgcaccccgggacccttccctgtgcctgtcgtggagagagatgagggcttcccgccgcgtctcgctgagagcaggagggaggcgtgtgtcggtggtccgtagcctccggggaggagttggagccaccttctgagacttaacttcagggacagagggagaggcgtctttagtatgggactggttaatttctcttgataatgcttttttccctcgggtgtcccatcctctgtggccgtcgcaaccccaccctccgacggtgcgagcgccggagccagcgaatgagaggggagagaaggtggagagtgtgaatcacacgttaccttagtgtaatggtagttgcattaatggagctgcgacgggcctgcgggcggttcgataccgtccggctagttttctcttcccggagcttctccaccaccagcacccgcaaattgttatgcagatcatcccgggaaggcacttggctttggaggtggagatgtgtccgaatctcccttgaaccagtctctgttagggggaaaggccttgcagccaagtgatttgttttaagggtggagccggagataattttaaacaccctcccccttggtgcacgttgcggggtgtgactcaccacggggaaatcagactgatttaaaaccttcagtgcaaacttgtaaattaaggcgaagacccagtgttccctgggacagttgcaaagtgagaagagctcagaaactgaagcacagaaacgttaggtaggagtctgagaggcgtggagaattttgcttgtgcaagattatttcagagcaaggtcgtgcggtgtgtgtagaaggtaggtggccgtgggttacctctctcagacctgcgtggtgttggcctctgggtggggataaaagtcacgaaaaagacctttggacccagagtctagttttttttctttggggccgaagaatacctaggcatggccctgtttcagtgtttacttcctctgtctaatgtatttccttagctcgcctttcatctttagtgggaaggattacttgagtggatattccggaagtagattcacaggagaatggaaaattctggatggtttgcttgctttaatttcaaggtgttgtctcttgtggatgttgggaagtattgtacttgaatatttgaagataaatatggagaaaagcagtggtgagaactaaaggaaa

SEQ ID NO: 1881536 - DNA, 4001 bp, Homo sapiens
agaccagaaacctaaagtcttgcctattattgttaaacaaggcactacaaaaatgcaagtgtctctttccagaaaatagacaatatatctgcaatagggaaaagaaaactctctgccaagtcttttttttttcccactagaaattgcttgctgcattccaagcagaagtattgacatacacaaaggcctggaatcaagaaaaagcatagtccctttaaggaactacgaatgttccttaaatgttggtgtgaaatttggcaggagagcaggaaataaggatagaggtatatacagaaggaagtaattcagagcctgagtggcctaaagagtttggattttatccatttgttctcccttgaatatttttaaatagaagaatggtatttatttatttatttatttatttatttatagcctaactcattcaaaaattattgaaggaaaataggaaatggcattgattgatgttacgttttggaaagatcactaacagggcattcctttttaagtattagattcaagggcctggcatcaaagaaatcagatgggaggctctttcagtaatcctgtaagaaattatgaaagcctgaactaatacagcagcagtggggagagagaggcacaagaccagagagatatttagggcttggtgacaaactgaatgcagggaccgagggagagggagaagttgtgactctcatgtttctggctagggtaagtatgtggagagtgtcaacacacagaggaaagagtccctataaggagaaaatattaataggagttttaggagttgcattcgattgtgagatatcctaatggagacagaaatccagtaggcagttacatgtccaagtctggagtttaggggagccatcctgattggagataataatctggtagtcatctttccataaatagacgttaaaagccaaagtgtgagtgagagagtggagtgaaaggacggaaagactttggacaatcttaccatatgtacccggaaaagagccaagaaaaagactgaaagacagaaaagagcagtgtgtctgacagagctattttaacaaaattcagcgtttacaacagagtttaagagtaaactggcaggccaggtgcggtggctcatgcccgtaatcccagcactttgggaggctgaggtgggtgaatcacttgaggttaggagttcaagaccagactggcatacatggtgagaccaaccccctgcccccactcccaatctctactaaaaatacaaaattgagccagcgtggtggcgtgtgcctgtgatcccaactactcaggaggctgaggcacgagaatcacttgaacctaggaggcggaggttgcagtgacccgagatcgcgccactgcactccagcctgggcgacagtgcgagactccgtctcaaacaaacaaagaaagagtaaaccgacaaatactacattctctctctctacactctggcccactcttaacacaaaaaactgtccaggatcaggagactttttgttctcctcatctcctccttccaaagttctctgcccacgttctactgtctccccaaaatcctacctacccttcaggaactgctggaatgggagcttgggaagtttcagcaaactcctctctcctcctttgtggcccctttattcccaaagctgtgtcctctccctatgacgagtcccttgaggggctgtatcttactccttgtgtctccaagcacacataatgtgtattaggggaggaagcattcgccagtggagcacaaagctgttgcaggtctcttactggttctcaggcgctttcagtgaaattcccgttccctcaccgtccacatctgtaatttgcaagtcttatctacgataactgctgtaaagttacacggggaagccctttcccgacaaaaaaaacgagttctgcaacaagtccgtcggattttagcaatgaaaccggcgccgtgcagcctcgccggcgagtgcaccctggaacgcacaacttagcggcacgcaccacagctcgagcaccgcccttccggttggagccattgcaagccccccccacgccccgcccccctcgctaggcgctcgccacgcccatgcctccgtcgctgcgcggcccaccccggatgtcagccccccgcgccgaccagaatccgtgaacatggcgaacgaggtagggcccgttgagcggagggccctgagtccaagggagggagtgcatggcatgggactaggctgctatcctcgggggcgcgcgaggctcggcgcccaagacgggatctggctcttggttctgaaactgggcccccagcgagcggctcagaggggcagaaagagaaggaagctttgtctcggctcttcagttgggaagcagctttctttgctgcttctgggacagtcggaacggggtgggggggtgggagagccggagagtggggggcaggggctggtcaggtcggtatcccagtggaaatggcttaggagcggccacgcattgcttcttacacgaaattaagtaactcgctctgggtcattcttgcagcttgcatacttggcagagctgcagccagatcccgtgcttctaactcctaggttgcttgtgttgcataattgagcctacgccttaattattgtgcctccaaggagtgtattttggaaagacccctacgtccctttcagaaacattttcgagcacttaaataccaagagatttatattccctctagtcctcacgtaacaaacacctctgcgaggtgttatccccatcttaccaaaaactgaggtttgaggttggttgtgcttggtcacaccaacgatggcgagctgggattccgacccaggtctgctcctctatgacaaattcataaaatacaaattagacagtaaagaaaggcagaaattacgaataacatactcagtctaaagttgctgattattttaatgttttgcaattttggacattttctagtaagacaaatggccttaaacatattggagtttgaaagaaataaactctaaacagtctttcagacttaaactggtagttgcttttccttattactgagtgtctttattcagagaaggtgaaagattataattgttactatagttcaaatgttgaagtagggccatttcccgcggatttagagtggggctttgttttgcttagaattgtcagtaaaaggaaaaggttaggctccattaagacattttttaaaggggagcaggccatcaaatttagtattcttgtttctttggattcctatgttgcataacttaattgttagtattctgaatctgacttgtggagttgaaatttatggcacattgaaatgaaaaaggttctaatgcagtgtctgattctttgtactatgagatttaatatctgcaatttaattttaaaaacgatcatttccacatttccaacctcaccaatttacagaggccatttccctcccccccccctcccccgccagttcagacggagtttcgctctttgtttcccaggctggagtgcgatagcgcgatcttgggtcactgcaacctttgcctcccgggttcaagcgattctcctgtctcagcctcccgagtagctgggattaccggcgcccgtcaccatgctcggtatttttgtatttttagtagagacggggtttcgccatagtggccaggctggtctccaactcctgacctcaggtgatccgcccatctcggcctcccaaagtgctgggattacaggcgtgagcccctgcacccggcctacagaggccattttttatatctctatgtagttcacctctcctttccctcaaccgtttgttctgttgctaccaataactactaacttattttgcaaagctatgctgtgccaaggattgtgttagggacttcatattctttttttttttttttttttttttttgagacgcagtcttgctctgtcacccaggctggagtgcagtggcgcgatctcggctcactacaagctccgcctcctgggttcac

SEQ ID NO: 1881537 - DNA, 4001 bp, Homo sapiens
tacaggtcaggaaatataaaagttgattattctgattttaagcattattgtttataaggatgctgtagtctctaataagacttcagcacttcctgaattctataccatttcaacttcaaatgagatttaaaatttttacatgtcacaccctggttatttgtcagtgtgcatggaagaagaaagaggaagggaaaataattctggaacttaattaattgtgaaaccagcctcagcccctggatgtggtcttgttgactgcagagataaggcagtttggggtcagttgtctattgtgctttcttttgccaatgatcgttctattcattcactcattcattgcattttttattcattcattcagaacaaatgaaagaacttttccttttggccatttacttctgttcccttttactcaaaggtagcaaaatacatgatgaaacttccttgaacagaattaaaacaagcctgagttttggaagatgtcaaaattaaattctagaaatacaggtaaatctgtaggatttttgggttccagtcattctgagaatagtggtgatttcccatatttaagaaatgttttgaaagacaggctttgaaagtaggctatgggctggtttgccagggtggtttatgttcaaaaatggaaataaccttctgacagagaaccagaatggactaaatacaagcacatggtaaaccaagttttggctgcttctctctccttgcaggtggatactgtgaaggtaggtgatggtgtgtatacagggcttctcctggcaatgagggagagggtgcggaagggcagccgacatcccctactctttctcacttacagaagtacccagagagagccaagctcatgggtcccttgtcgttgtgttgagggggcggctgtctaaggcccttttgtggctgtgttaagcagtttaaagagggtttgtaggcacttagagggaaagcatgaacccaaatttctattttaacatgtaagaagggacttaaatgccagaaaatatagtacagcactcagaatgttgtatcacccaagttgcagacaagcaaatctgaatgtagttaccactccattgtatccagtgctaggacatgtgtcttgccttccaaactcacccagtggtcctctgtagtcagaggaaggcagagagggcacacagcctcacatttcatgaggagagctaaagggcccatcttgctgtgaaaacagtcagtgttgcaagaggaatgatgcgtctggaggcatagctctgaggctgtctcctttcttcatcaggcaggggaggcagagaaaataaaagttaaaagactgagtagtgttgcaatgaaactaaatacctcgtgagaaggcaggtgtctttgttcctctcccaccatggacagctgggctgttccttctcttctgggtgctctcaacaccttactatcagctatcacccagcagataagaataaagtagccaaggagcaataggggttttgtttttcactgtttttgagattgtagaaattgatagcgcactgcactctcatcttgagatctgtgggctgagctcccagggttcttaacatgggccaagttagtctggatgcaaccttttgttattgtctaagtcactggcagatttaaaaatcacagcggttcacagccagatgaccagcctagggatgaaggcggggcagggggcggtcagtatctccactcacatgtcatctagtcacgatgcagaggttgaaacactgagttaaaggaagcttatcttcatatgaagaattagaggccacacctccctaagctaaatttagaagtgttagtatgtgaacaggaggtatacagtatctcaggtttcctggggcaccagccagataagacattccagataattctcttccatgcctaacttgtacctcaccagtcaggccagaggaggcactgcagaaggagctgtcctcttgtgtggctctgtccttcttttcaagtttgagggggttgtggaccatgtgaggctggacggctcacatgtcagccgccaggctcttagttacagacatggcaaacttccatcatttaagcagtggcacagatgttgtggagaaatcccagtgctctagctgtgtggcagagggaagggccaggtctgtgagaaaataaaattattctcagcctctctcccatattccagtaagtctagattgagtaaaacatctaatctaactgtgataaatagctattcaattgcctggcacatggattgcctgctttatagattttaccgagcatgtttcaaatccagagaccctctcttaccctggtaaatgtctacccaggctgcttccagcctgcctgcatgtgttcagggcagcaatttaatttttatgttatcataagctaaacctaatcaggaggcaaatgttctctgactaatttagctctgttttccagagcaagagataaataccttagagtgagaggcaatatagagttgtgggagccagcacaaaggaatcaggggcctagtatgagtcctggctctgctccttcttcactcagtgactttgagatagtttcctcactcctggattttaggtttctcattggaaatgaagctgcatgagcatagtggggaacaacaggagacctaaggactgagaagtgagcatttggaggcaagttgcttactatgtttcatcaagataccccttctaagacactgtattagtctgttctcacagggcaaataaagacatatccaagactgggtatttataaagaaaaagaggtttaatggactcacagttccacatggctagggaggcctcacaatcatggcagaaggcgaaggagcaaaggcatgtcctacatgatggtaagcaagagagtgtgtacaggggagctgccctttattaaaccatgagatcttgtgagatttattcactctcatgagaacagcacgggaaaaacctgaccctgtgattcaattacctctcacctggtccctctcacgacacatggggattatgggagttataattcaagatgagttttgagtggggatacagccaaatcatatcagatttttttttaagcttttgtttttgcttttaccactttaaaaatgagatgtgtttcacaatcaatggcatatcctattttattaacagcattttgtgtcactcttaagactacataaaataacaagtgtctgatagttgacactttttagatttgatgaaatacagtcatgtttttgtttctgagctgactttgtttatctgaaaataaagcatgagggtgaggcaagtcctcagatctccttcctctctgagattctgagtcttgctttgctgaattgcacactccatcacctacttgcactagtggggttaatgaggagctggcttaaccttttaataccttacctctgatcccaatcttttcccagcctagtctagactcttctttctagaagaaagttttcaaggtttctgagaagttcaaggtattgggacacattcttcctgcagcactgattagctggatggtgtctgctcctaccaaaaccagaggacatctttcacagccacaagcataataattttctgtgacacatattttattattcatatgtagctccttgaagttactggtagttagggtgtggctgtaagtctgcaaagatgagcaaggatattgacaacatgcacgccctgtctctgagcagggaaggggtaaaaacactgaaattcctgagaatgctcagtggagcagtgctgcccacatcaccttcccatgaaactacagggacagaaggagcatgagctgaaaacagggccacatggctctgggattgcctgagcatctgcaagattgtggtctactgttggggagccctgatttttgccctaaacattggatttgttttgtttttgcaatgcaaaaagaaaatacctgtgataatacttacctttcactcatattcattcacttag

SEQ ID NO: 1881538 - DNA, 4001 bp, Homo sapiens
attgttaaaacagccatactgtccaaagaaatttatatgttcaatgccattcctatcaagctaccaatgacattttttacagaattagaaaaactattctaaaattcatatggaaccagaaaagtgcccaaatagccaaagaaatcctaaggaaaaagtataaagctggaggtatcacactacctaacttcaaattttactacaaggccacagtaaccaaaacagtatgatactgatacaaaaacagacacatagaccaatggaacaggttagagaactccgaaataaagccagaaacctacaactgataatcaacaaagtcaatgaaaacaagcaatggggaaaggatgccctattttataaatggtgctaggataactggctggccatatgtagaaaatggaaactggaccccttccttacaccatatacacaaattaagatggattacatacttaaatgtaaaacctaaaactatgaaaaccctagaagaaaacctagcaagtaccctctggacataggccctggcaaaaatttcatgacaaagacttcaaaagcaattgcaacaaaaacaaatattgacaagtgggatctaattaaactaaagagcttctgcacaaaaaagggaattatcaacagagtaaacagacaacctacagaatgggagaaaatatttgcaaaccatacaccaaaggtctactatccagaatctataaggaacttaaataaattaacaagcaaaaaacaaacaaccccattaaaaaatgggcaaatgacgtgaacagacatttctccaaagaagacatacatgcagccaacaagcctatgaaaaaaagctcaatatcactaatcattacagaaatgcaaatcaaaaccacaatgagataccatctcacaccagtcagaatggctattattagaaagtcaaaaaataacagatgctggtgaggttgtggagcaaagggaatgcatacacactgctgttgggaacgtaaattagttcagccactgtggaaagcagtctggagatttctcagagaatttaagacagaactgccagcaatcccattactgggtatatacacaaaggaacataaataattttcccataaagacatgcatgcatatgttgatcacagcactattcacaatagcaaagacatggaatccacttagatgcctatcaatggtggactggataatgagcatgtggtacatattatataccacagaatactacgcagccataaaaaacagtgaaatcttgtccttttcagcaacatgaatagagctagaggccagtatcctaagcaatttaatgcaagaacagaaaataaatacttcacgttctcacttataagtggaagctaaacattgagtacacatggacagaaagaaggaaactaaatacctgggcctacttgagggtggagggtgagaggagggtgaggattgaaaaactacttgtcaagtactatgcttattatctgggtgatgaaataatctgtacaccaaacccccatcacatatagtttacccatgtaacaaacctgcgcatgtacccctgaacctaaaataaaagttggaaaggaaaaaaaaaaaaagaagagaatgctaatggatacgggaatatgaagcagccactgtccccagggctgggatacagtgcccagggaagggtccccagccacttcccaatccagggttgaaatccatacctcactgaagaaggaagaatccaagttcagtgaatggcagagatatcgctgtggtgtcatactgaccaaacttgctggaaacctgctctctggaacttgctggaaattcctgacactttttagggtgtcaggaaaggcgttcacagggagatgtcacattggagcattccacaaagtcacccaagaagaggtgaaagagtacgctgctggccactgggtgctgctggttgccagcaggacccaggtgctggagaaaccacaggcattccaggagcttgcatataaaaatggtcagaccaggaagcaaagcccgttcctcctatcatgtctctcatgcaccctctaccgacaaagattaacatggtgccatctggcaaagaaaaatatttaaagggcccatatccattttctcagagcatgcaatgaagagtgaatttgtagctgtgaggcaataaattgataccctatatgtccttcaagacgagaacatcacctattctttgctgagtttggttccagaaaagttcaatgttgtaataattatcttcaacaaaaatgcatagtttgttggtgtaaattcttccaagaagcatataaaagggtggtgaaaggattgtggagctttccagatccagagacccgctatgaaggatatcagctgcagccacgtgcctcatgaggatcagcacagagtaagagaagccatgctgatttatcctgcatctgctcccatcctctgaggacaccttgctgcccatcagattttacattcttgcctaactaatttgagaacataatctaagcttactctatgtgtatactgttgtctcctccaccgagctatgttctactgaaatgctacagcatgccatggaatgttgtgcaaccattacacatgttatttaaaaagagttcatgattaaatggaaaaatgcttgtgttataattataagtgaaaagggtaggatgcaatattataatatgtgaaacaaacaacactacatagaaataaagagcaaaaagaaatacccccaaatcaatcactatctttaggtggaatcagagtaattttcttcttcttcctattatttttctgtaatttatgtatttactatagtgaccacgtactggttatacctttgggacaaaacaatctatctaacaataacaacaacaacaataaatatatatatatacttttaatttatttatttacatttatgtgtgtatcttgaagtcttaaactgagccaaggtttgggaaccagaatttgacagagttccatatagagtatctgaaccagttctttatagtttacacaagctaaggcgactgcgacccaatagcagtttggccaattgagatagacaaattgtctaccctaatgagatagaaaacggcaatatatttaccaaaaaaaatgaattccattccctgaacttttagaattattgagatctatacacatatttgagtaggatataagagaatatcaaatataaagaattaataaaacaagcaggaaataaaatattagcaactttcttccttatcaatgagacaagccaatctccttatagttttaacagcagtttgggggaaccgtctaaacactgcactcttaatttaggcacatatttcctgaaaacttatatttacatttgccaaaacaaagcagtaatttccccccaaaccatggctattgctagaaccatgaacttctaaactcaacctccataattcctctgcagaaactggcagccacacctctcaatcctataataacgtgtaagaaaaaaagaaaccacataatatgaaagatattcaaatagcaaatagtaaggattataaaattacagactaagtatcagactctacactatctgtggactctgtttcccagcacatcgttttttaggagcagatgatctaaacagcccagctgaatgaaacctactggaaggcagtggatgacctcatgacatctaagcatcccttccagttctaggactccattatttagcagagatctgatgcacagggaacatgttagaaagaagcattcagtctgtaacagcattttaaatggaagaaaacttgagtctgtgaggaagaggaatgctaagttgatctcagttcgcctaggaatgtcctggttttagcactggaagttctccatctcaggaaacctcatcattatgggaaaaccagaatggctagtcatcttactgtttggatctgacaaagattagcttctttgggttcccgtgcaaattaaaagct

SEQ ID NO: 1881539 - DNA, 4001 bp, Homo sapiens
gaggttgaacctcatgaaattgccatttttgtaggtcgaaaatgttgcatattggaaatttcaaatggttcaacctaatttcttttttatggggaaagagagagagagagatatattaagtaatttcaccaaatcacagtttcaaacccaggttttatgactctcaaatcctttgtactgggctaccttccaaagaggctgttgttacttccctgttgatgctggagaagtcattcagtatgtctgcactatgattttcatacccccaagtgatctattaatacccacccacctacttgatagggttgtaattaggatcacaggaacttctatgtaaagctgttttggggaatgtgtcttagaaatgtagtatacttctgtttttcagtccaggaatgtgcccagaatatataacatcaactaaaatggaaaacatctagcttttctggatataaaatacgtctttatagtttcttccctaacatctcttaaatttcttataattgggaaaaattatgttttactgtagagaatgtctcagcttaggaatatgttgcttttagcatctgaaaagattaagacagtataaacactactcagtggatttttagggggtggttaagtgtgtttgttcaaagaaaagagaaagcctttattggaatcttcaggaaatttaaatactaaatttatgaaatccacaacacttagtatagtttttcttacatataataaatactcaacaaatagtaaatagaaagcaaaggagcgagaatgagaaatttaaaaaacactcatactataaactctaaaaataaatcctaataatgcctttttagttctgattttctgaagattatcctactaatagaagagtataatgatatttagaaactattaaaatgaataaagaaatttgttttatttgagtgtgtgtaatagggtctgagcatatatttcttttttctctcttaagtgtgcctagagcacatatgcaccgagaactctactagatgctaatgaaacaatggtgacaaaacaggctgtccccgatccagctcacagcgtactctggtactctctgcctggtgagttgatttcatgaaaatttcttttgagtggtttctttgagcagagcttaaagaggatgaaaggaggacagttgtcatgagtaataggtgaggaacatttacaggaacagaaaattgtctgaagactttagggacatgtcaacacttagctgagaaaatcatgatgcttgcatgcctaactccttctacctggaaatcggatgtgagcatgttagagatttcaggaagagtatggtgtttaggaacagaggcacttgccacacagcaaacgtcagccagcaggaataagcacatagtagcttcaggtgtgatcaccagccatagattctctgttccccaccccactaatactgggactttttacacacctatatttgcccatattttcagcagaatatcctgtagtatacgtaataactggtaagtttagcacaggtggtaagtgatatttacctgttaatcaccgaaattttttaaggaggcttctcctggcatgaaagagttggtattgtgtcccgaattggttggttcttggtctcactgacttcaaaaatgaagccgcggaccctcgcggtgagtgttaacagctcttaaggtggcacgtctggagtttgttccttctgatgttcggatgtgttcagagtttcttccttctggtgggttcgtggcctcgctggctcaggagtgaagctgcagaccttctcggtgagtgttacagctcttaaggcagcgcgtctggagttgttcgttcctccctggggctcgtggtcttgctggcttcaggagtcaagttgcaaaccttcagggtgagtgttacagctcataaaagcagtgtggacccgaagagtaagcagtagaaagagcgaaacaacagagcctccacagcatggaaggacaccggagcgggttgccactgctgtctcaggcagcctgcttttattttcttatctggcccccacccacatcctgctgattggtagagcctagtggtctgttttgacagggcgctgattggtgcgtttataatccctgagctagacacaaaggttctccacgtccccaccagagtagctagatacagagtgtccattggtgcattcacaaaccctgagctagacacagggtgctgattgatgtgtttacaaaccttgagctagatactgagtgccgattggtgtatttacaatccccgggctagacataaaggttctccacgtccccaccagactcaggagcccagttggcttcacccagtggatcccgcagcggggctgcagatggagctgcctgccagtcccgcgccgtgcgcccgcactcctcagcccttgggtggttgatgggactgggcgccgtggagcaggggatggcgctcctcgaggaggctcgggccgcacaggagcccactgagggagtgggaggctcaggcatggcgggctgcaggtcccgagccctgccccacgggaaggcagctgaggcccggcgagaaatcgagcgcagcgccggtgggctggcactgctgggggacccagtacaccctccacagccgctggcccgggtgctaagcccctcattgcccgggtccggcagggccggccggctgctccgagtgcagggccggccggctgctccgagtgcagggccggccggctgctccgagtgcagggccggccggctgctccgagtgcagggccggccggctgctccgagtgcagggccggccggctgctccgagtgcagggccggccggctgctccgagtgcagggccggccggctgctccgagtgcagggcccgccaagcccacgcccacccggaactccagctggcccgcaagcgccgggcgcagccccggttcccgctcgcgcctctccctccacacctccctgcaagctgagggagccggctctggccttggccagctcagaaaggggctcccacagtgcagcggtgggctgaagggggctcctcaagtgccgccaaagtgggagcccagacagaggaggcgcccagagcgagcgagggctgtgaggactgcctgcacgctgtcacctctcagtatctttataaaaggtgagcaattttctgctcagtgtatgaacttctactcattaagacaacagcacagttgaatactatattaataacgatgaatacagaagtgattattagcaagttctatatatctaattagaaggctttgggctataacaaactctgggaatacaagctcgagtacattacccaatatttgagagatgtctcagaacacatgaatgtgaggatcttgtgaaattgactggacattacattatgttgtgcagttagaaccagataatctatcaaggtgaaaaccagtgtctgggacataggccagtgtctgggacttggtccaggatattcctaggcaatggcaggcagcaagtcaatgtttttcatatgctatgtgtacatgctctgaatggattcaagtcctgattttgccatttttaaagatacccactaacaaaagctgggtgagactcagtatttaagtgagacctgaagtcatggttatagggctataaaaggctgtacagatcagtaacagtttttatttatgtgcacatgtgtgcctgcatacaaaacaaggaataacataacattgcatcatttaaatgaaaaaattaactatcatacccatgaaatatttacctcagatgtaacttcatgagggttcacatccttcaaaacagcatttgaaacaatttataattgagttttacaaagtatgagactagattcatttagcctgatttctctaggtagatattggtagtaaagcattgcacaaaagtgactacttcagtggaggatatcccacagaaggaaggattttaataggaactcactgggtgtgggaagccagtgacagaag

SEQ ID NO: 1881540 - DNA, 4001 bp, Homo sapiens
gcctctcctggctgcatctctgttatggagaaggtgaggggcatccagctatcatgactgggtgccctaaagcagggatgaaagtcaacatctttaacaatccatacagcacaggcaccacccaaacagcaagatcttcagctacagctggagcagggacctagggtccccattctacctgcatttaccttctagtggctgggagctctgtgaggtccctgatatgagaagggcagtgagtaggagcagacaggaggctccaggagcaggctccttaccaattagctcaggattttagtatgttgataacttaacatgtttgagctattcggttcaacccctttgtctaattctaactcactgggaaatccctggattggaatgcagtttcccatatgctttgatctacagggaacgaacaggcatgactggcttacataattgtgagatgactatatttttcaaggtaaacagtttctgctttatcagtctcttaggagcctggttacattgatcaatgtgaattcacccctatgagagaaatccactcttagcttgctgacaaagtcaattgcctcaattacaaaaaaaaaaaaaaaaaaaagattcccgaacttgccccatagaagcaagacagccaagcttagaagcagccagcccagccctttttcaaacttagaatcagtgatccaagggtcctttcagtatttttccacaggatctctggctgaatttccacagcatgtgaaaattcaactatacacaagacagcatgatgcagcgattttctttttttcttctctctctctctcttttttttttttttgcacattttattttagtagcacaactcttattttcaaatgatcttacgaaggacctcaagctgcagatattcatgtcttcacatcaggcgtctctacttgggtgtctgacaggcacttaaaatataagatgtccaaagagcattctggatgccctgcccccgctgcacatgctcctccctaatgtgccctcatctctcaggcctaacacctaaaatcattctattctcaggtcatctcttagcctcaaactcctgcttccagctacaaaacatatgtagaatcccatcccttccaagctagggcccacatagctgaaaccttgttttcagccagtatcccctcttacctggatgactgcaacgaacttataataggtcttcccacttttattactgcttcctatacttccctggatcggaatgcagtttcccatatgcttctacctacagggaaagaacaggtatggctggcttacataattgtcagatggagcaacatttgcttcacttaaaattgtttttagaagtctagactttagaatctctacttgttaatgacaatataacaatgaccaattactaccattttaaacgtattatttctctatttagtgaaataatacgtttaaaatgtagatcagatggtgactttcaccctgttcaaagtgctccaacatctcccatcactcttaaactgcaaactccttaccgtggtctaccaggctctctgccatctggtttcctggtagcccattggctgaactgccagctgctgtctccttgactcctgtggctccagacacactggacttattgttggttctcaaatgtgccaagcttgttctctgctttgcatttgctgtttcctctgcttagaacctctggtgcccttgactttgaatggctcacttcctcacaccaatcaagtctttgcctaaagtctctgcctttgctcagagaggccttcccttgccacctctttaaaatagcctgcctcactcctactctcgagctcctcagtcagcccccacccagcacacaccacatttcatagtggatgttgttgtgtgccactcagatcccctggcagaaccgaaaaacgcttgtcaccttagctgctgggagtgcaggctccaccaactcacacctgagacactttccaagcattgcaaagtgtcagaggtgtgtcatttcctctgtcagaggaagctgctccacccacatgtacacccacttcctggaggcagcttgcatccaaaggctggtcacatgggagtgcaaatgcccagtcctccaatcttaattaggacaacactgcttgttgtcccaagctgcaaagctcctcaggaggaagacagaaagcaacttttccatctgtccgacctgcgtccctcacccttcacacttgttgctcctgagatcacgccccaaaaacctcctgcaaatctctttgtcagagtctacttcctgcagaacctgacctgtgggcctctaccccaaattgtgggtttttaacttacttgtttatttcctgtctctccaacaaagacgtaagttctgtaacagcaaggaaaggtctatcttactcccctctctatcctggcccagacgcctagacagtgcctggaatacgtggaagttcaataaatattgaatgaataaatgaatgcaccccccaatctatataatagataatagggaaactgtcttcctgaaattgtttgtgtgtcaggggcactcctccctctgtcactcctctacccaccgctggagaagtacccagggcacctcagcagcaccttcaggcagagtcaattttagaatcaggaaagcaagattcatagccaggttccatcactagcaagcccttcccagtatctcctggagtcagtattgggccttgcaggctctttagcttgttcgactgcgacaatgagcgccacactccgctcctggaaaataagctgggagaatggaaaagctaattgaattggttcatctctctgaagccagtgataaatcttaggggtctgaagaaggccctaggggatctaatgcccccagtgagatctggggtggggaaattgacctcagactctgaacctcgaatcaagagtggttcatttttactacagagcctggaagggagactgcttgggacctgcccttgggtgactcctgctggcccctggggagccaagttttattccagtagaatgtccaggaagctgtgcaccctggtgacaactcactttcgcctatgcctttagagtaagtctccttcttgatttccaggattggaattccctggaatgttcaatgtgccatcattaccaggacataaagaatgtttctgggtcaagaaggtgccagagatggtttaatgcacatcctcattacctaattgttttctcctggtctcttctccaattgcttccgtgtctgatgaatttttctctgctttcatatgtgtttttgacagagacaggggagcaaggctatctgtgggctttagatcgcctgacttttcttttgagcatgatgagttggagttagataatgcagggagaccttccccctgaaccagggagggaaatgtggctgggaatgcccacagacgggtgatgcccctctgtcctcaaagtgtgttagacgagttctgctctcacctgcccctagacaagaggcagtccattagatacttcgcatctgcggtagactgaaccagcaccagctgtgagagtggctctgcagcttggatttcacttcctccagaaggcagccaggacaaatgctgctgctcattctccaggaggaggttccaggatgatccagccattgttcctcttcggtagcacaaaggcaaggttacccagagcggacccagcaaatatccaacagcctttgagacagtctggacacatccacagtggttgttggatggctcattacacactctctgaggagactggtctcgggtccctaagcagattgatgttggcagtggcccgggaggcaggaacatgcatgaaggacacagaggcgagaggaggcggagctggatggagtgcatctaaggcctggggccagccagagaagacacatctcctcctcagcaccactgaggccacacagccaggcttgtgaggagatgcctctgaggacctccgaaaca

SEQ ID NO: 1881541 - DNA, 4001 bp, Homo sapiens
gatgattcaagctctgactgagacaaggctggggtgatgggtgtccgcacattagtaggctctgggcctctcctggctgcatctctgttatggagaaggtgaggggcatccagctatcatgactgggtgccctaaagcagggatgaaagtcaacatctttaacaatccatacagcacaggcaccacccaaacagcaagatcttcagctacagctggagcagggacctagggtccccattctacctgcatttaccttctagtggctgggagctctgtgaggtccctgatatgagaagggcagtgagtaggagcagacaggaggctccaggagcaggctccttaccaattagctcaggattttagtatgttgataacttaacatgtttgagctattcggttcaacccctttgtctaattctaactcactgggaaatccctggattggaatgcagtttcccatatgctttgatctacagggaacgaacaggcatgactggcttacataattgtgagatgactatatttttcaaggtaaacagtttctgctttatcagtctcttaggagcctggttacattgatcaatgtgaattcacccctatgagagaaatccactcttagcttgctgacaaagtcaattgcctcaattacaaaaaaaaaaaaaaaaaaaagattcccgaacttgccccatagaagcaagacagccaagcttagaagcagccagcccagccctttttcaaacttagaatcagtgatccaagggtcctttcagtatttttccacaggatctctggctgaatttccacagcatgtgaaaattcaactatacacaagacagcatgatgcagcgattttctttttttcttctctctctctctcttttttttttttttgcacattttattttagtagcacaactcttattttcaaatgatcttacgaaggacctcaagctgcagatattcatgtcttcacatcaggcgtctctacttgggtgtctgacaggcacttaaaatataagatgtccaaagagcattctggatgccctgcccccgctgcacatgctcctccctaatgtgccctcatctctcaggcctaacacctaaaatcattctattctcaggtcatctcttagcctcaaactcctgcttccagctacaaaacatatgtagaatcccatcccttccaagctagggcccacatagctgaaaccttgttttcagccagtatcccctcttacctggatgactgcaacgaacttataataggtcttcccacttttattactgcttcctatacttccctggatcggaatgcagtttcccatatgcttctacctacagggaaagaacaggtatggctggcttacataattgtcagatggagcaacatttgcttcacttaaaattgtttttagaagtctagactttagaatctctacttgttaatgacaatataacaatgaccaattactaccattttaaacgtattatttctctatttagtgaaataatacgtttaaaatgtagatcagatggtgactttcaccctgttcaaagtgctccaacatctcccatcactcttaaactgcaaactccttaccgtggtctaccaggctctctgccatctggtttcctggtagcccattggctgaactgccagctgctgtctccttgactcctgtggctccagacacactggacttattgttggttctcaaatgtgccaagcttgttctctgctttgcatttgctgtttcctctgcttagaacctctggtgcccttgactttgaatggctcacttcctcacaccaatcaagtctttgcctaaagtctctgcctttgctcagagaggccttcccttgccacctctttaaaatagcctgcctcactcctactctcgagctcctcagtcagcccccacccagcacacaccacatttcatagtggatgttgttgtgtgccactcagatcccctggcagaaccgaaaaacgcttgtcaccttagctgctgggagtgcaggctccaccaactcacacctgagacactttccaagcattgcaaagtgtcagaggtgtgtcatttcctctgtcagaggaagctgctccacccacatgtacacccacttcctggaggcagcttgcatccaaaggctggtcacatgggagtgcaaatgcccagtcctccaatcttaattaggacaacactgcttgttgtcccaagctgcaaagctcctcaggaggaagacagaaagcaacttttccatctgtccgacctgcgtccctcacccttcacacttgttgctcctgagatcacgccccaaaaacctcctgcaaatctctttgtcagagtctacttcctgcagaacctgacctgtgggcctctaccccaaattgtgggtttttaacttacttgtttatttcctgtctctccaacaaagacgtaagttctgtaacagcaaggaaaggtctatcttactcccctctctatcctggcccagacgcctagacagtgcctggaatacgtggaagttcaataaatattgaatgaataaatgaatgcaccccccaatctatataatagataatagggaaactgtcttcctgaaattgtttgtgtgtcaggggcactcctccctctgtcactcctctacccaccgctggagaagtacccagggcacctcagcagcaccttcaggcagagtcaattttagaatcaggaaagcaagattcatagccaggttccatcactagcaagcccttcccagtatctcctggagtcagtattgggccttgcaggctctttagcttgttcgactgcgacaatgagcgccacactccgctcctggaaaataagctgggagaatggaaaagctaattgaattggttcatctctctgaagccagtgataaatcttaggggtctgaagaaggccctaggggatctaatgcccccagtgagatctggggtggggaaattgacctcagactctgaacctcgaatcaagagtggttcatttttactacagagcctggaagggagactgcttgggacctgcccttgggtgactcctgctggcccctggggagccaagttttattccagtagaatgtccaggaagctgtgcaccctggtgacaactcactttcgcctatgcctttagagtaagtctccttcttgatttccaggattggaattccctggaatgttcaatgtgccatcattaccaggacataaagaatgtttctgggtcaagaaggtgccagagatggtttaatgcacatcctcattacctaattgttttctcctggtctcttctccaattgcttccgtgtctgatgaatttttctctgctttcatatgtgtttttgacagagacaggggagcaaggctatctgtgggctttagatcgcctgacttttcttttgagcatgatgagttggagttagataatgcagggagaccttccccctgaaccagggagggaaatgtggctgggaatgcccacagacgggtgatgcccctctgtcctcaaagtgtgttagacgagttctgctctcacctgcccctagacaagaggcagtccattagatacttcgcatctgcggtagactgaaccagcaccagctgtgagagtggctctgcagcttggatttcacttcctccagaaggcagccaggacaaatgctgctgctcattctccaggaggaggttccaggatgatccagccattgttcctcttcggtagcacaaaggcaaggttacccagagcggacccagcaaatatccaacagcctttgagacagtctggacacatccacagtggttgttggatggctcattacacactctctgaggagactggtctcgggtccctaagcagattgatgttggcagtggcccgggaggcaggaacatgcatgaaggacacagaggcgagaggaggcggagctggatggagtgcatctaaggcctggggccagccagagaagacacatctcct

SEQ ID NO: 1881542 - DNA, 4001 bp, Homo sapiens
agaaaagagggaggaggaggaggagaaagaggaggaggggtgagaaatctattttagtgtttatactggagaaaaagccccagtgaaccctggaaatttacaggattctaaggatatttccacagttctaagatagagatgctcccttaggtgcctgggagtaagggtcatgtatcatggtaaatttcataagtatttgtttgcaattccataactataacaagttaatagtcatcttcatcttttgacataaacaaaattcatttttcattgtttctgtattcttttacaagtaaatataatggtagtgatgacaaggaggatgtaggccaagtacaacctctttctttaaagttttcatggatctctgctagtaataatatattaatatttataaagcagattctgtctttaaaaaaagccataattttatttgaaaaaataacttctcatttaacattcaaatgaataccaagagtgctcacaaaggcctcaactgactttaatgagaacagaagtttttaatgtcatataaaataaatgacaataatcacagaataatttttactattaacatccagcgaaactggagcaaacataatgcctttgtgaagaaacaaacatttaaatcccttttgttataatacacaaactaaaatttacttattttgacaaaatacaaatgtggcaattggtcaactattttttccacttgagttgattactgtagcatcaacataaaaagcgagagagcttccaaccagagcctggaggtgagctgaggcccagtgcaacctacatcattccactccctttttatggatagtggaaaaactaggcaccaaattcagattattaatttgaacagattaattgattcaaggtataatacaatgctcctttttagagtgagatgtgacagggaagaaatatttgttgttgcagggagctatttctttttagtagttgtttttccctgaaaaaaaaattgtcacactaatggtaaacataaatgtcctcagatgtttactgtgggaaggcttgtacctaatttcctaaaaattatgataaaaactagtacaaggcatcagcattcattactgacagaaaactttaaaaaaaaatctgttttctatctcaagggccttggacttacaaccaaattaaaataacttctatcactttcactttctaatattcccaatgaatgtaaaaagtatacaaaaataatctaggaactgagtctcttaaacaaagatgttattaaatatatagatacaaattttttcacatcataaaaagccttgcttggatgcaaagagccatctcaaaagcagtatgcaaaaaatgaaaaatgttgcacatcttttgtgataatgagccaagcaaaataaaaattcagctcctccatagatacatttttttttagcagacagaaagggaacattgtctttataggaaatgtttttagcagaatactatagattctataaaacccattaaagggttattggtgtccaggacaacaaatggcttctggtaagaaaataaagggctactctttctaaatactaacataactacaaagattaagacaaaataagtaaaggaaaatatgttccccttaaaaattgaatgtgagtggtctgcaaggtccgaagaaggacacaatgagcactcttgttgtttatctttcaggctgagcccagttgggtacaatgaggggtggcagaaagagcacagtcttgccttgaaagctggcctggactctagtcagtccctccctgcaatttcccagggccacttactgaccctttctcagcctctgttttcatatctaaaacctagaaatgatgaaaacctaccttggaaggcagtagagaaaactagatgagacctcggtaatgtttctagtatggttctgagaatctctccaataaattttagtttccgatatgtagttcgctgggttaaatacagagaatggtaactagttgtaatgcttttaaaaatagagacttatctttgtcagtggctttttcagggcacttcacttggatctcatgccaaggcctagacaatctttgttctgttctctttatgacatcaccacctcaacagttatatttgtaggcaattgctctcatccaaaacatattatcttcatctttgtttctgactttttttgatagctggacttctcaattatttcttctttcattatgcaatgtgctccatgttttactagattccaagcagatgacagttgtttttttatgcaccacgaaggaaaggttgatttcagtggtgatggaaaaccaaatggttgtggaatcttttataaaatccaaagaaaataaataaagaatagaggcaagagcaccacgtgttgggtaaaagcctgtgctttgagatacacagatcaaattttaaatgtgaactcccctaactactaatgtggtgaccagggcaaagccattagacctctgtacaccaaggacccccgtaaaatatggaaaatagccccatctcaatcttacaagagcagctgtaagggttagacaagattgggtacataaagtccttagcataagacctgacacataatctgcctgtgggaaatcatacctatcattattatcactcagattaaatataagatttttaaaaattagtacttaatcttgcatgtcttatctatgacatggcaaaactgcaagccaggatgatgtcaacaaagaagcactttatttttctccagtgactaaaaagcttctttatgagattttgtgcatcaaaatattctttgtctttcatgatatttcataaatattgaaaacagagatggagcaggtaaacagatggccatacacctcaattcttcccatctccctgccttcagacatttactaagtcatcagcatttttctaggctgggtattgtttgtgtacagtgtgaagaggaaagtacacccgttggttctacctccaacatagatgccaaatctctcttctgcgtctttcattcttattgccactcccaggatgaagccttatcataattatcaggactattgactccctaaccagtctcccctcttccacttttgcctgcccttcaacctattatctcccagcagccagagcaatatactaaaaatgtttacctgatttggatactcctatagaggcccttcaggataatattccaacccctcactttgccctgtggacagctgtgtgaccaccctcatatctcacataatttccccaggcatttttctccagtcacatcagccttccctgagcccctccctccaaaggatcaagctatacccaccttaagcctgttgtcttctcagcctagaagtttcaggcccctggtctagaaatgctgctgcttctcatcccagagctcaggtttaaatgttatcattaaatgttacctcagagaggctctcttggatgacacctctctaaccctgtaacatctttttctccacatggcagcctatctctcttcctttcagaaacactaattataatctgcaatatcccatcttattttatcatctgtcattaagccccaggcaagagggaccctgcctgtcacattctcaattatgttctctacaagggtactgcacataacaggacctccaggaatacctgctgagtaaatgaaaaatcaaagcatttgcagaagcagaagaaaaattattttatattttcttatagtaaggattagtgaaatgtaatttgttagtaaaaatgcattttatgataatcaggagagcatgtcgtgtatacatacttggtattagacacaagcaacaaatcactgaacagaaagagatgccgcttctgcttcctccaaactcttctgagttgtcctgagctatggattagcagggttcattaagaaccttccaatgatgtggttttctcattgtaggtgtctatcacaaaaaaaaaagtgctttcctgcacacatcaaatac

SEQ ID NO: 1881543 - DNA, 4001 bp, Homo sapiens
gatgccatctctatcacacatttaacattgtattaaaatagtctttaatgtgggttatatatgcttcttacctagccacaccctaagcaatcagacctgtgaaatgatgattttggtgtgctggtgtgtgtatgttataattattacattagaatatctatatcaccagaaaatcatctatcacctataggatgtatatcacacttggaaaaatgttgcattacttcattaaattccccccaatgacccaatgaagaaagtgatattattctccccattttctagatgaggaaactgaggctcagagaggttaaatatcttcctcaagaattttcgccagagctgggatttgaaccaaggtctgcttgacttagaaggcagtggtccttgctttctcccgaggagaagggagcagagatacctaaagatgcctgactcccaatcccatgggaacatgccccctgcgggctcacttcctctcctctttgtcttcaatttctaagaatgtcttcttttcactaaaacaaaacactccagaatgcattctgcatgaataaagactgccaactccatggcagaaataacataccttttgggaatgtttatcacttctaaaatgatgataaagaaattcaacagtttgtatttctggacgaactaggggagaagaggaaataaagtatctacagagtatcacaacacacctacaggaagctgagcaaagtagactaatcacactgggcccggaggacggctggtaacagaaacctcaacgtttatctgaagtgactgctcatccccgggcaccacggtgacaggtgtgatagaaagataaaaccctagactctgctgctcacctgccgttgggccttggtcaagccacttctctctgagcttcaactgccccatctgtaagaggataacaattccggcctcagggggtcatcatagcaacaaatgaggaacctgtaaattagtgcgaaaacaccccacttactactactgtttttaaatgattgtgagagtaaaaagggccttcgtgttcagaacccaatcagcttagagtgaattgtagcacttggcaaatactgccttttctgcttggaaacttcacttaaaaagaaaaaaaaaatgaggtcaaagagcgattcctaaagcaaaagaaaattgctaaactttagactattcctgaccccaaagtcctccttcagaccatgtttcccctttttcactcatatctagcccaacatgcataaatccttgcttctaccagagggccacacagaggaatggacagacaggaagagtctttgcccaattagtttcacttcctccctggcaccccatggtcacagccctggagaattgttttctgcggcgctgagggctacattttcgttttaaccagcgcaaggtaggcaagagacttaagtcagagagcttgatgatgtaatgaatttgccagctgccaacgacactaggacctcatcacatttctttgttttcctttctaaccccaaatctagcaggcatccctgttctcattaacaaagcctcctattagcaccattgctccctaactaccatcggacctcacagggagaagttctgtatcgagaacagtagagcaaaaagacaggaggaaagcaagtccccaacatcatgcagcccacatactagctctggatggcttacgtacgatgaaatctccaagatgccttccaaaaaccagatgaccctgtcctttctggaactaccgccgtcccttgtaactctgtaagcttcatttccaacctcatcctgctctaactcgagcacaaacataagtctgtagaaccacagtggccttgggggcatcattctctttgccttgtcaacatttctattttatatccctccctgctcctgtctagaggttggtactcagtctcctgagactcatcttatagatagagcttgatggaccacggggagagggcatcactcctgctacagtctgaatgcacacacctggggcccagctgcccaaccttccaccgctgaagttcaaacagttgcatcttagacaactcctccacttctaatcagcccagcatagagggagtttggaggtgtcagacacccatcaatggctgagagagaaagaaatatagtgaaagacctgttagcagttctgttgtgcccaacagaactctcatttgtcttatgtctaaaaagctggccattgactttcaacaggatttcactgatgctattagaaaatattttaccactaaatgaaaataaagataaactgcctttctgaagatgcaaaaggtaagagataatacataaaaatgcaagttgatcaaatttcacttgatgtttgatgaccctcagtgtcccagaacattgctttgggaattattttctcctttgatcttgcagaacagtgtgaatggacatagaggccatttgtataaaagaggaacctaaggacgtaggggaaaacaaaagaatctgtcagggatgggaaaagcacacccatttaaatatgcagaaaccttaatgccagtgtctggctagctattaagcagtaattccttctctatcccttatcatatctaccagttactctgcaagattcttcagtgtaaagagcactgtaaaatgtatttttcagatttatctcgtctttttgccagatcagcccaccccatgcatatctgccagctgcctcttacacaatccctcagagcccacggagctgcactgtgggccctcagatgatctgatgcaggtatagaacccctcccccacattcttttcttgctagcttgcctccattacaaaccatcttcctcactcagatattttcaatcctggtagtttttgcttgtttgtttgagacagggtttcacgctgtcacccaggctggagtgcagtggtgcaatcatagctcactgcagccttgacctcctgggctcaagtgattctccttcctcagcctcccaaagtgctgggtttacaggcgtgagccactgcacctgacttccccagcagttttgaccgtgatctcatttgcctctttctcctgattaggccagcattagagcatccaagaggctgcataatatggaataaacataggtcattagatttaaatcaaaattctggctttttacttcctagcgatgcaagctttgttgagttccttaacttttcttagcacttctgctttttaaaaaaagttgctataatactaaatcgtaggatttttgagataactaaatgagaaaatgtgcataagacttgcagcaccttaagtgctcagtaaatagcaactctttttttcccgcttctatttcccaaaatagtcctggctgggaagactcattgtcacaggctacactaaatagtttggtattattattactcagatttcattcaatactttcattcatcattctaaggaacacaataacatgtcatttttggcatctgcctctggggaagtaatagcgtcattttttcatagatcattttcataactggccctttgccctcacataataccacagggtgggctcagaccgaaactgtcaagatcctcaatggtttcgcacttagcaccagcctccgttggtcccttggaaaccggaacagtaccaaccaagaagtttctacttcgcttctactcagatggcactgccgagaaaaggtgggagggctgcctgctcaagtgtggcctttaaagacaaagtggagaagaaaaagaggtgagaatgtggtgcagtagtctgtgaacctgagatatgcagcggtgggaaatagcggcccctaaggagccatttgtataaaccagttcacagctacatgcaatgtgccacctgcaaacagagcctctgagacatagaaagggttttccaatattgcttttaccatagaaaggattatggctcatcttggttctcggtgaaatttggtttgatgctgcctgcacagttccagagtttcttggt

SEQ ID NO: 1881544 - DNA, 4001 bp, Homo sapiens
gcgtgactcgctgccaaatgagaggtctgaaccagaagttcagagaagggaaagaaggttgtgcctccagggtggactgatccataggaggcagagaccaaaaacgaggctctcacttgacggactggaccagcaagatggagtgcatggtggaggcgtgggggtgcatcttggtagaaaaaaagcctttgggatttgggactggagtttctgttctgtcatttattagtgagagatctcaggcatttttaaaaaatcttctttgcacctcagtttcctcatgggtgaaaggaataatattatctaccccactgggctccacatatcattcagaccacaagcatctgtggagtctacttatactaagcccttttgataagccctggagtacaagatgaaaagagaagggcctgccctcaagagctgccagagaaggaggggcagtcactgttggtccctctcttcatttaccttccaggggtctgtctttttgtttgtttgtttgtttgtttgttttgttttgttttttgtgtgtgtgagagatggagtctcactctgtcatccaggctggagtgcagtggcacgatctcggctcactgcaagcttcgcctcctggattcaagcaattctactgcctcagcctccggagtagctgggactggaactacaggcgcccgccaccaagcccggctaatttttttttttttttttttttttttttttttttttgtatttttagtagagacaggggtttcaccgtgttagccaggatggtctcgatctcctgacctcgtaatctgcccgcctcggcctcccaaagtgctgggattacagacaggcgtgagccaccgtgcccggcccagaggtctgtcattttaaagcagcagtggtcagaaccatgagccacatacatggaatgcaggacattggttcagaagtttgaagacagaacaagctcttcaccatccacaacggaaggttcctgccttcctgtcccgcgttctgtgaggaaatgcgtctgtccctctggagctcctgattttcaaggcttctcccctgagctttgatgaagtctgggggagccagcgtcaaaggcagcacactctagtcacctgcgatcgttacccaaagagcctgctgttgacctcacgtcacttcatttttttaattgcaaaagacaaccactagggggcctaggagcgagacgctgagctccgattccatttatcaggcaaatagcctttccttcttgctgaaaaacgcagtcaaggtcaacaaaacacacaccgtgggctgagaacaataccttctgcaccttctgcaaacgcttagtgaagaacgcatctcccttgaggctaaaaaatattcttaactcagaccatcctccacagcccatcaggctgggccaagcgtttcttagccctgattccatttttcagtgtttccttctgattaaaagccctttggcacagcaggattgtctataataatggtaaatgactcacatgatgatgaggcaatcttttcacatcctgagctacaatccgtcttgtaaagccttgcaacggcctcaattacagccctggattctcagcagaggcacagagtgggggtttttgcttgattctctctcccctctcagtttcccacaccttatgcagaggcttgaatgtctaatgtactgtacattagacattcctatagcatcctatagcatcctatagcaatcctcattaaaatcaatcactcatttgaaaaaaaaaaaagcaagcaaagaaaaaggaaggaagaaagaaagaaaagaaaagaaaagatggaggaaaaaagaaagaaaaaaaatgatcaggcccctaggggcctctgaggtcacagtaactcaagtccccatgaccaaaactgggtggcaaagcttatttttccttagcaggagtctgcttttgcaaaggttcgtctcttacattttctttcagacactcacgcacactccagcaacaatggaaatgaacataatttcccaagcaggttgcctagaaaccactcctgtgtttctgaaactaatttaaacatgaaaattcagctcctgactcatgccaggaatgcacgtcataattttctcagtattttactttctttttctttcacattacaaaataatgcatgcttactgcagaaaaaaagtgaaaagaatatgaaaatacaaaggttcagaaaataaagaatctcctgtaatctcactaccagaggcaacttctgttgtcatttgggaatattttcttctaggctttttatttttctatgcatttttaacatcatggagattaacacagattttacatcaagattaatagtgaatttaattagcatattgtcagtatttctccatctggtgaaattttcagaaacttgatttttaaaagaccgcattatattacagttcattttcccaatattaatcattctctaaatgctagatgtttaggttatttctaatttttcaccattataatgtcacaatgatcaacttaatacaaaatagttattatatctttatttctccaggataacatcataaaaggagtttcaaagaggataaacatttcaaaactttttaaatattgaacaaatacatgtttatgtttttttttattaaacagtacattaaaaacaaatttccttctccactctctacaggtagcccctgtttctgtgaatacacagcacatgtgtatgatttgtctatttgacactgtacattgttctatcacttgcttttttgacttattgtatctcagacatctttccatatcaattcaaattgatccattctttttagaatttgcagaatattccattagatgatgtattatcacttatttgccctagacaaaacctcttaatgcactggacacatatgcagtgagctggggtccctagcaatgggtctgaatctatactgttccatccacaccacacctttactggaagggaacagatgatggcaaaggtaactgccttatctggctggaattagtgttatattctaacccagaggtctccaaacttttctgatctctccatttactgattcaaattttgagcatgctcccctatttatgtattttttaaatttatagattacatacatatatatgactttataaaatagagtcacgtgctacaaaacatttcagtcaacgcgaagtggccacatatactgtgatcccatatactgtgtaaccattgtgttataactgcctacaatattcagtaagatcacatactgtacaagttgatagcctaggagcaaaggctataccatttaggtttgcgtaagtacactttatgatgtccacatgatgatgaaatcacctaacaatgcatttctcacaaaatgtccacatcgttaagtgacatgactaaattattgttcatctcacaggacagacaccaaaaaggatatcttagtgaatatccattttgaattaaagatgaaataaatatattaaattatttatttatataataacaattgtatacaatataataaaagaattttgctctttttgacaagcacaatgtgactgaatatgcttcattatattttaaaatattggtttaacatcttgtattacagttactctgaggtctgattttaaattcagcatattttaattgtcaatgtaaggttgtcgtcgcaggaagagactcctcacaaatatacatagatctaaacaaagaagagtattgttcaccaatcttacaatctcaccaaccaaaaatgcagtattttggaaattcaccttcacttacagtattcagtttatctttgatttgtggttactttgtagaaatcttttaaagctaagtatccattttatgcactttagtttaattaaaattaaataatatgttccctgaatccacttacccaggcccatatccaaaagcggactctcaatctcccacttcaaatctgcatttccctccacttcatcccagtt

SEQ ID NO: 1881545 - DNA, 4001 bp, Homo sapiens
ccttcttactcctcttgccttgccttgctttgcactctctctctctctctgtctctgtgtgtgtgtgtctcgtcccctattgacaaagcataaggagaagcaactgacaacgctgaaatgaaattagccaagtcgcagtttcaacatcacaaattctagtatagatgggtacagtttgggagctgaaatgcaataacttaattggctgccataggaaaaaaaaaacaaccatgcaaaaatagagcagctgagagaggcaagtggaagtggaaaatacaggaaaaaatagtgattcaaaagcagaataaaataatcattctataggtttaaaaaaataattaaacatgattttctaaacaaaccagacaacatgaaagagtaattaccactgaaatctaaatgaatggcatggaaaatcaagtaacataaataccaaaaagaaaaggacaaaatgtaaattgaagtaatgaccaaaaaaaatgtaagaaatgtagaacaaagatccaagagagctaaagcgagtaataggaattccagaagtaaaatgaacaaatggaggattaattgaataaatacagaagaatatttatttgagctgaagacctcaatccacggtttaagttttcactgacttccaggatacactgagagtaaaacctgggtataaaagtgctcaagctaaaatgagaaatcttacaagtctccaggcatacagaaaaagtaccatcaagagaaaaataattggcctggcatccaaatgcatgtccaaaacaacagccagaagctagcagagagtaaaagtctgttagctaattatggagaaaaaaaaactgattaataaaaatcaaattattgagaagtaaatacaaactcaattaccatgataaagatggaatgaatatatacaattttcaacaccaagcaagtaaacaaaatagagggttgttgaacatgaaactattttagccaatgtggattttcacagactggttggaatcccatttctcctgataagataagcaataagagaaaatttaagaaggaggaaaatgtacacacttcacactggaaaggctagtgtatatatccttagtgtcttcaatatactgactgtcacaacatttttaaagaaaattctgaaatctaagtaaattaataagtttatctgatgcagaaaaaatcattttaagaaaagcagaactcagaaactaacaaaaatgtaggcaaacatttacatataaaaaatggaaaacagaatgcatagagagcccatatttgtatgcgaaactatctataaaggccatttacagagagcactctcaaacttaacacatcaacattaacctctaaataagcaaaatttaatgggcataaaatgaaacttagcaagtatggttcattcaaggtcttttagggaaaaaaatggatcaactgcatcatctattagttccactcaatttacaaacaaagtggaaagcagaaattgtaactgccaacccatcctaaaaaacaaatctctggaataaaaatgtatcatttttatataggacaatgatcttgaatctagatcaaatgtctttctatcaatgaaaatataaatatagaaagcatgggcaacacagaagaattagccaagccatttttaagaatgtgcctaggacttatatttctacaaattcaagacctccaccccctgggccttgcaatgagttgatgctgaataaatgctgatgatagtagtgaatactgtcagaggcatgtgaaccagagcaactttatcttaaataggagctgggtaaaatgaggctgagacctactgggctgcattcccagacagttaaggcattctaagtcacagaatgagataggaggtcaacacaagatacaggtcataaaaaccttgctgatcaactagattgcagtaaagaagctggctaaaacccaccaaaaccaagaaggtgacgagagtgacctctgctcatcctcactgctactatcccaccagcagaatgacagtttacaaatgccatggcaacatcaggaagttatcctgtatggtctaaaagggggagacgtgaataatccaccctttgtttagtatatcatcaataaataattataaaaattggcaaccagcagcccttggctgctctgtctatggaatagacactctttcattcctttactttcttaataaatttgctttcactttactctatggactactctgaattatttcttgtgcaagatccaataaccctcttttgcagtctgcattgggacccctttcctgtaacatctttttggcaaccatgaagggactatagtgcagaagcccctgacccaaatgctaactttgggtaagtggtgggatccagtaacatctttctggcaaaccctgaagggacaatactgaggagacctctcttcccacacgaaatagactgcagcactgattggatgactttgggtaagtggggtgcacatatctgggtaaaggatgagattgggttagaggcccaacttaggggagttagaatctctcctagcacagagagagttaaaggctcctctcaataaaaggcaaggacacttgactgaccttgggttagaggcccaacttaggaggactagagtcccttctaagatttagggggttagagacccttctcagtaaagtgcctcttggctaagaatgggtttggcaccacagtatgttaactgctattctctttggattaagctgccttgcagtcgttgctgacggtaatgggtaacatgattaggcatttacaggatcatgggacatggggagctttttcctgccccaaaagaggaaacttgacagctgatgggactgcttgaagaaaatctcttcacgacagcagccgcctgaatttttcagtgtcgctgcaacatggttgggtcattctctggcctccctgagcattttgccttccccaccctgccacaggcaatgattttctctttctcctttccgttttttatcttttttattactcagggcagccatcttgcccagagaccacatgttgaaactcctggttggaagttggattaatgatgatgtggggaagtttgagccttggcagttttcaattgggtgctaagcagagtggttaatgtctatgtcttgccacatgtattttactctggccagaatggaaagaggtaattttcctttgtgctgtggcttggcccccaaggctgtggcgcagcaagccaggtcactagggccgctcagggaaagggaacccagaagcctggcatgacagcaaagggtaagaatttcttaccagtcagacttctggtctctatctctctctttctctgtctctctccatgtgtgtgtgtgtgtgtgtgtgtgtgtgtgtgtgtgtgtgtgtgtgtgtgaaaaggatgaggtttccctctggtcaatcatgtccttgggagcttgaccttgtaaccatgtgatcatgctttcccttttcgcagtggtggcctgggtttagggtccaattcctggcatagggaatgaatgagtcctttatcttctgtctatgtatttatatgtattatgtgtgtgtaatataaaagagctttgtttaattggtttaataataataagtgctgaaatcaaatattttgtcagaaaagtaaaaagtggaatgacttttagttcatgtgagttaagtagcctttgggaaataaaaacagttttaaagattattagtaaagtaaagacatttggtctaaattaggcaggtcaaatattaagtttactaaatgctttaaggtcataaactgcttctttgtcttttgaaaattgttcaattctaccttggagacattagattctagataaggcctggggacataatggagttagccatgccccctagctgtgctggagtcagccatatctgttcttctgcctggtgtgtcctaggctaggctccacacctagtacatgattaaaatctggaatttaccaagct

SEQ ID NO: 1881546 - DNA, 4001 bp, Homo sapiens
gttaatgtacaggcaattctgcaatatctatgtttaagacattaaaagcatggtttctaatactagactacttaggattgaatcttggcttcactacttcctagctgtatgatcaagggcaaattgcttaatctctctgtgcctcagtgttctcagttgtaaaacggggataataaacacggttactgtgagtaccaaattagttaatacataacgtaaaacactttaaacagtgcctgacatctaataaatgctatctaaatattataatagaaatttatggttaaaatagaagaattaactaagttgaaggactgtacaataagccatcaatatgtttctcaatcccagacagaccccagaatgaatttttgcaatctacctgtcagtatatatgcacatgtatcttattggaaaactcagcaaaatcataagatttaggtcctggccctcaactattttccttaacaaaatctactttagggagatgctgtgaaggtaaaaattagcatgtcccagggaaagctcattgcacactacaaaggactatgacaataacaggctttagatttattttctacattggctctagcattttagaagggtacttttactactcaagccactttcctgcaactctcccccgaatttccctccttcacagtggccaacctcaaagcgttttcaatgtaagtgcctttcctgttagtgagacttccctatgaaaataaatagtttaaaggttgttggagcctaaaactcactaagcctggagagagatgtgactgtcatctgagttacacgtggttacaacttctgtttctcagattatagattaacttgctttcttatttttcttgttctatacaatggctagagagaattaaacgaagttaaggacaaaaacttcctgccttcttaatgatccttatagattaacttctgctttgttgccccggtttgcttagaccagatgacagaaaatcctttatgaaaaatgttaaatgtacacttcccaaaaagaaacactgtctataatcaaattgttgtaactattctctaaccttgtatgagaaaatgctgtaatcctgctaaaaaacctctcagtttctgcctatataagtgaaatcttaaatctctacttcggaacgctgactccttccttggagtcggtgtttctaggtaggctatcctcaaacttcgcgcttttgattattttacattgacacctcctgtcatccgcaagctcaaaggcaaggctaataaaagatggcagagagccaattagggacagagccatgtaatcctcatacccaggtgagtttagggcagtcttgcagaagcagaagcaaattgtggggtcacgaaaccctccggacccgcccgcctccaccaccacgcgcccctatgaccttcgacccctccctagccccagagcacgccgggagttgtagttcccaaaggcctgttcgggccagcgcaggcgcttggggtttccctcccacccaacccccgcactttaccggataaggaagcggcccgtgctgccacgcagtcgccggaacgcgggcgggggcttctgggagttgtagtctgttgggggcgtgcgcagtcggtaaggagacgtagctttccgtggggtgtaccactgcagttggttcccggcgggagacgcagggtcagtctgtgactcttcccctaccacgctcccgcagaggctgaggaggcggtttcgacttctcctccggctttctgtcttcggcactgtgtgcttcttgctccgcggtttatttctgtacctagtcctccctcccctcttcggtccatctccaaagcccgggcttggcggggactcgccctccggtaaaggcagggccgcgacctcctaaaacccggtcgccgccctgcaggaaccttcctcactcggcccctcacaccgggtttccgcactgaccctccttcgcctcggtcctcgctgcgctcacctccttccactcttttttttttttttctcctttgcagggatggaagcttcctggcgccaggtggccggtggccgaggccgatcccggggacgggccactgccgccccctcaggaaatggagtccatctccgcggcgccggaggagggcgagagaaggggtcggtgggcgcagttccttctggcaccagtcccggaggagtcgcgaccacggcggctgcagggagcaggcacagccccgcaggatcccaagccctgcagactaccgcagccagcggtgagaatggctcccgcccgcgtgctcacctggatgcctcctaaggcagttactagtcaggaccgcctccgccctcgccttctttctttcactgcttttcccctcgttcgggagtttgttatcgggcccacttctccagcctttcgggtggctgctcttttcggcactctaggtagatttccatcgcacctctttcatcttaattttaggtggtattacctttgttacttccctccactcttgcctacttgaatctccagaccatcagttgtaaattgtggcccggtgttctgatttggtctataatgttgtttggttaacacagagttttaaatgtggattgattgtcagcggttgtttgtcgtttttaaaaatctggttaacaaccttgtggctttagttatctttgtgcatggcaacagtcagctcggctgagtcacagaaatcccatttagattggacttgggcattccatctcacattctctctcatttctggagccaggtgtcatttgtcatctttacctttgcctttgtttcttgacttgtcttattccttgtaagcacttgagcttttgataccttccttgactgtagttcctatttacaaattccatgtccttctgtggacatatctggtgttgcctccgatatatcaatacttttcatccaagaccatgttttcgtggagccagggaggacttacacacaattgtgcatggggccgagggaataatccctgaaatcattttatttttgtgtttggaatgcatttcaggatacatttttttggggggtgtggagcagaattgagtatcttgaatgatttttctcctaggctaatttgaaaggtaggtggtattctcttagcatgcagttaatggccgtgatgataaggtatacaatatggagacgtgtgaacaggtttggtaaactttttttttttttttttttttttgagacagagtctcgctggtcgcccaggctggagtgcagtggcgcaatctcggctcactgcaagctctgcctcctgggttcaggccgttctccggcctcagcctcccgagtagctgggactacaggcgcctgccaccacgcctggctaatgttttgttttttgttctttggttttttttttttagtagagacggggtttcaccgtgttagccaggatggtctccatctcgtgggtagaaggaaaacaagcattctgtccgggcgcggtggctcaagcctgtaatcccagcactttgggaggccgaggcgggcagatcatgaggtcaggagatggagaccatcctggctaacagggtgaaaccccgtctctactaaaaatacaaaaaattagccgggcggggtggcaggcgcctgtagtcccagctactcgggaggctgaggaaggagaatggcgtgagcccgggaggcggagcttgcagtagccgagattgccccactgcactccagcctgggcgacagagcaagactccgtctcaaaaaaaaaaaaaaaagaaagaaaagaaaaagaaaacaagcattctctacctggacagttgagatttggctgtaagaaataatacgtgagaaggttgtcttgtcagcttctctttactttgagatgatgttaggtgaatacatttatcaggttatgaatgttctcattatctctgtccagttcagcctgttttcttatgtatcttttaagtgctaatttcccgtatattaatgacatttatcatctctttt

SEQ ID NO: 1881547 - DNA, 4001 bp, Homo sapiens
tatgtgtagccagttttcccagcaccatttgttgaagacatatctttcctccattgtatattcttggcatccttgtcaactatgtatgtatgagtttatttctgggatctctcttctgtttggccatatggctgttttcatatgagtaccatactgttttgattagtgtagctttgtaatatattttgaaatcatgacgtatgatacctctagcttttttttttcttgctcgtaattgctttggtgatttgtttcctaatctgtttttacttgaggatccagtctcatcctagacttggtgagaaatgtctcaagactttttccacaggcagctttctgtgactctagagccatgtgatgcaatggagtagctcttagccaattgtggttgtttaaatttaatcaacattaaatcaaattaaaaatttatttcttcagtctccttgggcacattttaagtgctcagttattttataaagctggtggcaactgtattgggcagcacagatacatgatctccttcgttgcaggctgttctctcaggcagttctagagctttcttttgcttgagtgatgatataagattttaggatgataaaaattttcctaggccaaggcacagtggctcactgggattactggaggctgagccagatggatcacctgaggtcaggagttcgagaccagcttggccaacatggcaaaacaccatctctactaaaaatacaaaaaaattaccagggcgtgatggcacctgcctgtagtcccagctacttgggaggctgaggcaagagaattgcttaaatccgggaggcagaggctgcagtgagccgagatcatcccagtgcactccggcctgggtgatagagcgagactccatctcaaaaaaaaaaaaaaaaagaaaagaaaagaaagaaagaaagaaaagaaaagaaaaagttttcctgtaaagcacctctatttgcttctttttcttttaagaagtggtttcctatagcagaatcacttccgtttgttgaggtctcttacgtggcctaggcatttgttgaatagtaaatggccagattgatgtataaatcactgacaagtgagtattagtcacataatcctctgagttctccccttcagccttgatgattttgcttatgtattgttcttttccctccctatgagctttatggccgatgattttcctggttttacagcagaaactaatacaacagaaggaggctcttctccctccatatgtactcctacatgttgtaccattttttacaagaatgaaagcactataatactaagtacaatgtttgggggaaagatccaccaagtgtttaatttaatcaggcttaaaaactaatactccacctcactacgtaggaccccttcttgaactcatcctcatttgacaaactatatattttacttccatggccttcctggtgtgtgtttctgtgtgttctcttattataagaacatcagtcatattggatttaggcttcaccctaatccagtatgaccttgtcctaactaacttcaactgcaaagaccctatatgcaaaggaaggacacattttgaggttctcggtgaacatatattttggagacactattcaacccattacagatgcatagataggtcagtcttttccctagctggatttcttaccccatgaagtatattctgttcctgaggctttactaaatctgctttagtgcaagcacaatctgtaatgtttattattctcatggacagacgatcatcatgcaggttgggagattatgttctgctaatgagcgctttctacctgggtgtggaacacatgggatgactcaccttgggactgctgaatcagctgttcttccccaagcctgtcactgtccccagttctgtcttcagtctccaccctttctcttcactcataaagagccacagtcatcctggagcagtggctagtctgtttgcctctttcttgagccttctgcattggcgtttggtctgctctgagctctgctgaagggtgcccattaattatgccttcccttctgcctgctggcagttgtcccgatcagctcaccttacagcagctgtttgcatattctcctgcaatacatttctacatgtccaaaccatcagagctggtggtgacaaatgcagtgtcaatgcttaatcaggctggttgaggatccaaggttgtcctgtaggtgatccatcttgtcattaatgtcagtgctgaaactctgtaagaggctcaagatgacatctgtggagaagggccagtcggccaacaggctggcttaggagcagggcagaaaatatagaggcgagttgcgaagaccattttggtgtctccagcttgtgcttccttagcccagggtcccttcaacctgttaacctttaggttgacagcacttgaagagtactttttgtttgtagcactttgggggagttttaaagtcctatgcagctatgaaagtaggtgtcagtgtctctgaagccacaaaagtgtcattctgctgaagtgtcatagatagagattgacagtaccaggaaatcttaatctgagactccaagaacctcctgaatggtgaaaaatctttttatgcatagttctgtttgaatttttctggtaatagcaccacaacttcccaagaagtgaaagccatagctagacctaaatagctttaatgtatgagaattcaactatacaggctggacaaaaagaatacattcatctccttatttaacaaacatttatgtgacaggtatattattaggcacttaggagacatctatgaacaaaacagggattcatgcacttgtgaagcttggtttctaactaagcaataaaccctaaaccatgagtgcagggaggagagatgaatgtttaattaatatgagtcattctattcagtgtcctggagtaagagcaaaagatgagagaaaggaatctgccattagtttcagaacctggtgccttttatgtgtatcctttttgcagttccacgtgtgatcctgggtttaaagattgtgccattttattccctaacctcaagccaattaattaatctggtactcaaccgatgagcctgttccagctctgaaacaaaaaaaaaacaaacaccatgtgggatttattgttggaagttacattggtctccaatgtgacactctcttaaggcttttcagggattagtttgacagtacatgattttcatcttcatgtgcctattttagagccttattctgggagcaagatgctacttctctgtagtgtggtttggaaatcaaagctatattgttttatttactatttctctgtcatcctttaaaacagttttgtccaagtcaagcatcatcagaaaggggagttcaataagaagttggtattaggttgctgagattttacagaagtcagttaaccttttagatcctggtttacttgtgtaaaatgaggtagttggactatttactctttcagggcctttttcaatctaaaggctataatttttatgtggcagcagaaaatgagcaggacactgtcccattttactttattgtttctctcttccctttctgatagctgacaagtggtgtgttttttccttcctgacaccagatgcatggtatctttcctgacaccactgctgcaactctctgacaccaactgggtgtccaataattcaactcaattctgacactatctacctggagttagtgccagatcccacaagactgcccccactttagatgacagttgcaagttctgggccacctgcacttctgactgattggccatgaatcaggggttcccataactccctccctcttcaggtttgataatttgccctgatggctcacagaactcaggacaacacttaactcacattcactggtttatgataaaggatacgaatgaacagccagatgaagaggtgcctaggccaaggtccagaaggtccagaaggtccagaagggtcctgccccagtagaaatataa

SEQ ID NO: 1881548 - DNA, 4001 bp, Homo sapiens
gtcaggagatcgagaccatcctggctaacacggtgaaaacccgtctctactaaaaatacaaaaaaaaaaaaattagccaggcgtggtggcaggtgcctgtagtcccagctacttgggaggctgtggcaggtgaatggtgtgaacccaggaagcagagctcgcagtgagccgagatcgcgccactgcactccagtctgggagacagagcgagactcagccaaaaaaaaaaaaaaaaaaaaaaaaaagatacacaggaaggggttggggatatttaggtgagaagttaattagctgagtttggcacaggcagttttgggtgtttatgagatatgtgagtcgagatatatggtgaattatttaacagaagttttctgtacattgctgagaatagccaagttagtttctgctcatttttatttataccattttgcaagcttgtgtgagtatcttcaacagcgctcagtagcttgggtgtaagagctagtatggctgatgacttggtgatgatggagcatgctgggataatgacactggttccagcaattctaattttcaagtggggaagaagagcttgtgccacagaagtcagcaactgtggtcccaagaataacagtctccagaaacatccttcaactgtgcaattaaaattgagggtggccgataaacaggacccagaagaggaaagcccatggaaggaaagagacagatcagcaaagttgtattgctctcaccagggctttttctcaaggcaaaattcctgttgtgacatagacatctttattccatttttttctttttctcacctttcctttctgtttttttagtcaagattctgagaaggaaaaagcactatattttaagctagaaaagacatgatacaggaaatcaggtgcttacagccttattgatagggatgatgcagcaggtcttctcaaatgatgctcatgcaacacagaaatgatttttgggggcagataccacctccgagcctgcccttgtagctatgctggagccactccaacactctctggacacccaagaagatggagaatagtcacctgaagattcaatacaaggaataggatgtcatatcaagaaatgacaattgccagcattgcatttcaacacccaggaagctagagaaggaatactagaacaacattgtggggaaacctagtgtttccataacattgcttgccaaaatcatgagccaagaaccactggagaatggccccctgtttacacctaccttccaaatctcatgtaagtgcatttatttggcagaacctaatatgcatttaatggctaacacggtgaaaacccgtctctactaaaaatacaaaaaaaaaaaaaaaaaattagccgggcgtggtggcgggcacctggagtcccacctactcgggaggctgaggcaggagaatggcgtgaacacaggaggcggagcttgcagtgagccgagatcacgccacggcactccagcctgggcgacagagcaagactcagtctcaaaaaaaaaaaaaaaaaaaaaaaaaaaaaaaaagatacacacgagggagatagggatatttaggtgagaagtgcatttaaaacctagatgaaagggggtcttggaaatgtaatttttgccttttcaatcaatcactcaacggagaggagggcagagtagagtttaggtgagtcaattcagagaacccacatcctggggatgccaacaaagaggaaaatgtgtttttattttttttattttttcagaaatgatgtgtaccctcctcctcgccctattcagtggatctatgccaagaaatgattaggaagttacatttctggccctcagatgagaagttactaagcctttagtttctcttacttaaatttttatttgaggtttcaccttttctcatactttccttgagccttgtgtcacacctgatggacttttcccaagccaagatcactttcaaatcagacatcctattgagtggcaggtactgttcaaggcactaaacacacaaaaatgaagaaaggaattgaaaagcctggtctttaggaacattatattataataggaatgataaacaacgaataaaatgattaaataaactacaagctattttaggaggtggccagagctgtatttagtccaaggctatttgtcccccactactgaggcaagatccttctgagtaattttattaatgccccatgtctcatgaggttttccagtctggctggtgaaagcagacactatgcactgtttctccagttcctctcagttatttccccagccttgggtggtctcctcacaagcatgagccaaatgtactctgctgaacactttgggaaactctccagcgccttggtctcccttgactctcaacttgggaagtctactagctctccttgggttcctccttccttttgtctcacattcacaggataactgtgttgtattttatgatgtccattgttttgtaatgcactatttcatgtattttctctgctttgggggttgttttaggcaggagagtaaatctagtcccttttactacattatggctgaaagcaaatgttctgatgacagcccctatatgtcccagttggtatgtttactaattttatgaaatggtaggacaagatacatgaatattaaactctgactctatcactagagagccacattgatacttaaatgttgatgactataaattttatgagggatggtgtgatggttaattttacttatcaacatgactaggctgtggtacccagttgtttggtcaaacatcaatctagacattgctgcgaaggtgtttttagatatgattaatatgcaaatcaatagattatcctccataatatgagtgggcttatcccatcagttgaaggccttaagaaaaaagactaaagttccctaaaaaggaaaaaattctgcttccagactgtattcagcctcaagatcaatatcaactcttccctgggtcaccagcctgctggcttgccctgcagattgcagacttagcagctccaacaatcttgtgtgtcaatttgttaaactctttcaagatattagattatatatataatcttcaattggttgtttttctgaagaatcctgactaacatagttgtatatatgtctgtctttttcacagcaaacccaagggaactggaatagctcttaaataattcaaaaccgtgctatcttgagttctttgcagcacttctttatttagaataccaagacatatataatccagtttgtctctggaaatagtctactaatgacagaatatattgaattggtcaaaacttaaggaaatcaaaagtttgctcctctgctggctattgctgacacacaaggcccagaataagaattttaaggttgattctattgtctttggtatgttctatatctgaaatgtctattaccttaatcctagtgtcgttctctccccgtgcaccatatcttgcacactattacccaaactcatccctcacagtattaacagccacagggattgtggtgaatcagaataatccccaggacttttctgacagagatactaaggaaaaccgtcttttgctttgcagcatggctagaagaatgtgtaactaggactacttgtggccatcttcctcacttgcagcaggagagaatgaaagccacacaggaagagtgaaagaaagagccagatattctctgccagggaagaatctcaatttctagcctcaagtctttgctctctttagattttctttcttgtgaactgctgcaatatccttcacaataatgggagccaataaattcatttttgcctactctattagaattgggttgggggtgactggaactaatagtgattggacatgtttgcaccttcttgttattggagattcccataacaagaactagaggtgtagcagcatcagagtgattggactgtaccactgcagggagaacacatgttctaacatggtggagagatttaatgtgtgattca

SEQ ID NO: 1881549 - DNA, 4001 bp, Homo sapiens
cacatggaatttgattctattgcagaattcattctataaacatttgttgcataacttttaaatctgaattgctatacaaaacgcagttctgtgtatagtgcctcaaggtaaagatgattgttacacaatctgcccttcttttctgccaccagaagaagcagaattcactctctacaattttattaacgtgtctttttgtccctattttctcaaagttagaatttaaacaaaagattccaaaaataaaatcatggaaaaaaggtttttcatgagatggatggagatgactgcaatactataaagctattgcaatagctttaattattcatcaaatggaaagtttcactaccaaggctgccaaagactacagcatcttcatagtgtatttgcctccaagctgtacttcagtgcacagaaagaagccacaaataaatagcaacatgactaaagggtgttaaatgtcaaatttaattcactcaacaatttctgaatttctagaaaaagagtttaagagctaagcaataggcactttttgtaagtctgaaggtaatctgtttcatgtttgcaaaacaagtacacttccccatgcaattcaaacattgaaagaaaaatttaaatatttagaaagcatgttctgtacagatttaaaccagcttttagagtactgtacatctcaatttgaaaattatttttatgttttatccagggatatataattaacagatgccattcttcattataatatctaaatatttttaaattgttggcaatgttgggatttaatgtaacatacatatgtgagatgacttagaatagatgaaatataggcgattaaatcactgaagtaacaataacagatcaaaagatatgtaacaaggaagagattcatgtaatctttaaaatgagttttccactgacaatataatagagattgcaatttatggagttttaaagtaagagtatttttaaatctctttactgaattactcaacgcaagtctttacaaatgcaaaagcataatgccaattacaacttaatgtacatatatcaatgaagagttaaagtagtataggcctggtcacctaattttttaacttagtacagagatttagctacctgagtcaatgtttctcagacatcattaaacataagtattacccagaaatttgtctagctccaaatacactatattttgatactatattttggtactatattttgatttagtgaggaccaggaagctatttaaactaattctccaggaaattctgaggaagttgttcaaaggaggagtcttctagactatccctctaataaatatgttatatttcatgatctaagatgccaccaattataatatggatccttaagtatttctaaaaaagaaaactaaatagtgtcaattatacagtctaagtataggatgaattttaattttagggaaattaaaatatgttcatcttgagattgttgaaataccatattacttctctctactaagtttgttttgacatcagttgaatagcagattaaacattaaactctctaataaatgtctgattcaatcaaatttattttatttacattctatactctgtgccaagagttttgataggcatctgttcttactatcttttgctgaattaaaagcaacaacaacaacaacaaaaccccaaaacactaccccaaaacaggatctttaagcagtaatttattattattttactttgttctgtgaattgattgggcttagctgggcaattctcacttgagatgtctcacacagttacagtcaaatgctggctggagctacacactgtcaaattaaggctcaaataaggctggacttccaaggttgctcatttacagtgctggtggttgacactggctattggcttaaaagtcagctgaggattttaactggagtacctaccttggcctctctttgtggcttgggcttcatagcaggctgttagtttcctgagagggagaattccaagagcaaatgtttcaagaggctcaatctgaagttcttctgacccagcccctggtcattatgaccatagtatcacctccactgcattctgtgggtcaaaagtgagtcacaattagtttacagtcaaggagaggagactgcatagggtgtgactatcaggaaccatggctcactggagcaccatctttggagtctagctaacacagcatcttggtatgtaatctaatttagtcttaattaaaacttctagaagatattgtgttagccaaatggagctggttcttttgataactctcagaaaatgacccatttcaagaatagtgagctctttacataatgagttagcttaatccctgacaattttttttttaaagtttgccctttattctttctttcttttccttcttgttgcccaggctggagtgcaatggcatgatcttggctcactgcaacctctgcctcctggattctccttgtctaccatgaccaaacttcaggcttcattcattctcctgcctcagcctcccaagtagctgggattacaggcgcccgccaccacgcccggctaattttttgtatttttagtacagatggagtttcaccatgttggccaggctggtctcgaactcctgacctcaggtgatctgcctgcctcggaaggttgccctttctattgtcacctgcttaaaggcaagcttttgcgttttcagcctgattgatcagtgaaacatcttgaatgtaaaaaagtcattttgagctccccataattcctccaccttcacgccacatactccttttttttttattggtctctccccctcctcccttcccagacagctagaaccaagcagggaaaaatcaagggtcattttaaaattaaattatcatgcttcatttggaaaccacaaaaagcacctacatggcatatcaatcaacttttgatgagctactgtgtaccaataatgtgaaaagtactttatgtgtcctgtctaatcaaatctccacaacaaatcagtgaagcagatactatcatcctcatttttatgaagaaactaaggcaaagaaagagaagcaagggatttttcaaaaacctaaaaaaattgttagaaaattattattattattattattattattattattattatttggagacagagtcccactgtgttgcccaggctgaagtgcaatggcattatctcggctcactgcaacctccatctcctgggttcaagcaattctcctgcctcagcctcccaagtagctgggattacaggcacacactaccacacctaatttttgaatttttgatagaggtggggtttcaccatcttggccaggctggtctcgaactcctgacctcaggtgatctgctcacctcagcctcccaaagttctgggattacaggcatgagccatcacattgggcttatcatagagaattatatccagtggtgtctacatgaatacatatgtgcatctatctcacagtgtatgtttgagctttgactcagttgatgctgaactgttctttctcctagcaattgatcaatatttccagttactttctaaggcagttcttgatttatgataacgtaatttaaagctgttatttgtcgcctcaatgactcccttcatgctggcacctgccctgcttatttttaaacttttacctagtttttgcctgtatttgggtacccgtccccaacttgtatattcaagccctaagcctaatgacttccccattctagctcttcctcctttccatgttgactcaattacattgaaattacccagtgaggatccttcctgcctgccacaagttgcccgacccatgacactccataaaggcattggctcatgggtccttgctctgatttctccttgtctaccatgaccaaacttcaggcttttgggtgactggtgtggattacaggccatgcagtgcctccctgtctgggacctttaacctcatacgcttcaccctttaatctcatatgcctctc

SEQ ID NO: 1881550 - DNA, 4001 bp, Homo sapiens
aagtagttaatacaacggctgacaattgaaatgaaaaaccagacccagatgaaaaaatgcaaaccagtaaacttgcctagtcccattattttactcaattgtaggaaatacatggaaaaaaagttgttcattatggatccttttttctaacgtaggaagaaggcaccactacatctttctcattttttttactcaaatgtttgtgttttctcatagaacttacaattttaatttatctttcaatatatgttgcccgtacagtctagttagattcatagttgcaatgtttcatgtggtatatttgctccctatggaatagaacataacattaatctctagatgtgtcactagagagatttgtatatatccacaaaaatctacagttgcaacaagaaaaattatccagtgaaaattttgtgatatgaatgtctttcaactttttaaaaagtaaagagaaaatgatgaacaaatatgagttggaaatcagaatgaacaaatcgtgaaaatatagtgtaccccttcaaaaagtttgaaaattaagagaaattggtagaacagctgtattatcatttacaaaaatgtttctctacctatagaacaaacaattactttgtcctctaattttcaaataacttacagaacatttatttcctactgtcattggaatggcaggctagcaggctgagttcatagcccaattggttcctcacatcaaaagattccctttattatttccttattttctctttaattctggcactccttcatgattgaacttacagatgttcttttgtctgctaatcttcgagtaagcctgtgctctctataactttcagtctcaatttccttctaccatcagccttttgtctaaacattcttattctggtttgtttccctgaactcttgacatcaatctctgttccttcaatattatgtttcttctactggaagcaacagatttcccagatttcacccattttccattttactcttctcaatctctgtgtctgagttaattgcttccttaggtttctatgtaggattgtctctccatcagtaactttcctatatcgcccatgttaacgtacctatatcgtttactgaaaaatttctcctttaaaaaaaaatcaatgtgtttgtttactttcttaaaatgccctcttaaactgcaaggtcaaagaaggtaagtatgatattcggatattatatatctaccacttaatacagaaaatattccagcacttgtataggtagtataagacataattttagaactctaaaataaaaactcacaaattgaagttaaatatccatttcccactgttatctccttttccttttaacacactgatatcatttggatctgtgtccccacccaaatctcaagtcaaactataagtcccactgttggaggtggggcgtgttgggaggcaattggatcatctagcggtttctcttaaatggtttagcaccatctccttggtgctgttcttgcgatagtgagtgagttattgtgagtctggttgttaaaagtgtatagcacctccccacttctcactcttcttcctgcttccagccatgtgaagtgctggctcccccgtcaccttctgccatgattgtaagcttactgaggcccacacccaggcagccccagaacctgctgggttctgctctctgcgactaccaagccaccggtgaagagagcagcccacggacacacaggcagacctgtcctcgacatcccaagagcgccacttttggggagactcacccgcacactgtccgcgcacgcctgaggctgggatcccgcgctgtctccccggagatctgtctgaggtttcttcctcctgatggaccctccgcgaatcccggcctccggagaccttcctgttaactgccctggccaggactggtctcagccccgactctgaccaagctcacacagggtgcctgcttagccaagtctcaaggacccatccccgggcaacggtggcggtcactgtgaccacagcggcggctcgggcctcgcgcatgctcactggcgaggccgactcacccgccccacgcccccttactccgcagagtcaggctgcagaccctttaaaaaatggcggcgacatggcggctgcggggactggggtggcggtgctggaggttgcggcggggactgcggcgcagcccgaggcagagggtgggaagaggactaccagaggggcctgcgggagactcagggtcggacccataggagtcctgtcgtcaggacctccttgatcggtctcctgcttctgttcccggtgaaggaggaccttcggggtgctggctgggctgcgcggacacctcttgggatccgatgatggctcccaccggctgatcgggaatggggttacaatgcagtgaggcggaaagggtctcgccggggcacggaaagatccccaaggccgcaaggcgtgctgtcgtctgcaacggcactgacccatgagcccactgcctccctccttcctgggtggagcaggggcctgccttcatctccaaggcccgggggctccggcatcccgacgcagcttccggcgacatcggcaaagacagaggcgagtccgagctggagcccgtgtgaccaaacgtggcactgacgtcccccaagagcacatgcagagagcgtgtgtctttgaggccgtagggggcgacgacgagacggacagtgatgtccaggcgtgcgcccgggggccactggagacctgccccacaaagcagaggaaaagccaagcgcacctgcaaacctgcgagacagggcctgtgcgcgagtccaggccacattcagggaggcccgccagaggagcccagagctttggaccaagtacaccccacccccacgccgctaccgcttaggtacccctgacgcaacctcccctgcacccagccaaaacccagtcccgttggctccctgacatccgtggcagccaaaagattcagtgccagaaggcgctttccccaggagcggagggaccggttggccctcaaggatcagacaggaagtgcaggtgggatgcaacaccgcctttcctggaaggccaatgtggggaacggtgggcttgcctccccctcttcctggaccgagcgcgcagccatcacttgggccatggagaccaagagagcttccctgtcccacacaggtatggaagcccagagctccaggatcaccacacctgcccaatcatccagaaagaggtgtggagagggaaacgatcatgacacggacgcccacggggtttctccctgatggactgggaagtcttctttgttgaagacgttgagccagaataagaagccgccaggcttctcagagacggggcagacacagcaagagggaggacagagcagaggccagagtccaggcaggatacggggccatgccaccaccacgggcatccggagaggagtgtcagacgggtgactcggccaggaaggccagcctttgagtgacagagatgcttgccccatccccttgccggcttccttctccgtccctgcgtcgatctgtggctccatttctccatgagggagagggcgagaggcgtgagaaccatcttcttgaaggtctgcgggcaccctcctgcgggtggacaatgagcgcctgggaggccgttgtccttgcttggggagcggtcgtctggatctagcctagcaaagaggctgctccggatggggaggggacgaaaacccctgcggttccgaagcagatgccggcgttgcccaggccctcacagacccccaaaccggaaccgccgggaaaccgactgctaaccggccacacgaccgaggcagagacgcggggagaggctgaccagaagaaaggccgacctgcaagaaacccaccctccggcacacgaggcacatgtgtcccgaggcacaagcacacacagacggacagagatagaaagagagggcgacggaaagagcgaggggggggggagagagagagagagacaagagatagacagaag

SEQ ID NO: 1881551 - DNA, 4001 bp, Homo sapiens
ctcccacatgcaaacacgcgcgcactcgcgcgcacacacacaagtgtttccatacgtacaaatgaacgcattagaaaattaccgtcattttttaaaaggctccaggattctgacgagtcagcttgaagagctcaaaacatttcatttcaattctgcagatctgaagaaaaagaaaggggggaggggtggaagtacagatgcaataccgtattaatattcagatacactataatctccttttcattgatccacaggtccctttatacactgccgctccattctcagccgcagacgtgatgctaaaatcattttaactgcagcggttttcgcttggctttggccagtcttcaatttactgcagctggaaaaggattagccatttttgctggaatcctttccttctaagcgctcaaaggcaggacccatcttcatgaaagagccaagtgcgggggccggggggacccggcgttgcggggagttggggcgcggaaatcagggcagtagacgtgcattcgcgggactctcagaagcacgtctcaggctactatcacgcccatggacactagccctccttaactccttgccaggaggaaatggcaacgtatctccaggtcggaaaacgactctacttttcccgcaggttgtggtggtgtattcttgggtcattcattaccagaaagcagcaaaggaccttcctatctctttgcataaaaaggagattgaataggggcttctttcgtgaataaacaaccaattccttgctagtggcccattaattaaaaatatatatttatagatctttccttagagaactggcattctatccactctccagcattaaagagttcgcgctgtgttttaacttcacaagaactagctatgtggatgtgccgcgttgcccctgcgcctccggaaggggcactcacagctggtcaagcgcgtccttcggaactcggggaggctccgttggggcttacacagagctaagccctgggccagggaggatggatgcaagtaccgtgcatgtgcaaacgtgttcgcagatacccgcagcggtgcacactcgggcccctcgtgtgcacgggccctgcccaccaccccgcccgcgttcgccgccgccccactgtcctcatcccgcgggctgaccccaggattggcagaaatcagtggtctaatctagcatggtgggtaaagggatcgatctccaattgccaaaaaaaaaatagaaaatagccggtgttcccagccgctgcgtggcacttggccgcacaaggcgcagggatatcagaggcgctttgcagcgcttggcggtgctgtgtgccggatgccccagagcccggcgttaggatggcgggcttgtaggaagcggctcaaatcaactcctcagtcactgatgaacgcgctcacggctcgaagctaggtcctcgagtgagttaatctacttggtaagtattttgtgaatatgtattttgggaggaaagaagcacgtcgaacgcgtctgcccgtctgtaagcgctgtcatccccacatcctttagcgtgaattcctccgctttttaggagtcacctccaccccctactccgtatgcttcgcgcctttcctcacggccccgtcagaccccctcacctttagattgacacatgccatataatactcacttttaaaatgccctgccagtctctgctagggtcccttaattaggtaacccttgccaattagtgggccctgcgctactttttcccttctcgatgatttatttccatgatgcgtattagggaaaataccttaaaggaaaaagaatgttagcatcattggaaatcccgctcctaggagaggatatcgcagctgttgctattatgttttcgcatttgctgatgcaaacaggggaacctctctattccctccccattacctgcggctggggactgggaactttccgcggcattgtccccagccagcgcctcgggacctgcggggctgttctcgctctcacactcacactcaccccggccgctcgggcgagagttctgtcccgccccgcccggctgccgcgtgacgtgtctgtttggcggccagtttggccaatcatcggcagctcggtgggtggtgctcctgggcgattggttggcagaatgagggcgctgcgcaaaaacggagaagccgagcgctcggagctcagaaactgccagcccagaccacaggctcagaggctgaagcaggaggaaggaaggactggaaggaaaaagagacaggttagagggaaagaggcttgggaagaaaacagcagaaaagaaactgctcattacacttacagagaggcaagtaacggtggagatgaggacagagggaaccaagactctgaaagacaaaaaatacaaatagagcgaaagaggaaaaaaatgtcaagaagaacatccatccggagaaatgaagagaatgaaagttttaagctgcagagccgttctgtgcttttccggcacaaaattatatcgctgattttaagcccttttgcatttgccagccgttgacattaagaggcatgtttaacggtgccaacagcatctccttttccttctcctcttcctcttcttcttcttcctcctcctcctcctctttttcctcctcctcgttctcctcccatcagcaagaagacaaaccgaggacagtcttgaaatatcgaaatttcctctttgggatttgccagcgccaagactgtcggaataaaggacgctgactattgtattattgttattttattaattagtcagtggaaagattacagatgaggaaaggggacgcctgtcacccttcctgtgctaagatttaaaaaaaaatgaggctggattgcgggaagctctaaaatgaagcaaaaggagtaagatttttaaagacagaaagccacaggagcccccacgtagcgcacttttatttgtattttttcagatttttttttgtttcgtggtggtgggggaggtgattgggtggctgactggctgcgggaagctacttcctttccttttggagatgattgtgctattattgtttgccttgctctggatggtggaaggagtcttttcccagcttcactacacggtacaggaggagcaggaacatggcactttcgtggggaatatcgctgaagatctgggtctggacattacaaaactttcggctcgcgggtttcagacggtgcccaactcaaggaccccttacttagacctcaacctggagacaggggtgctgtacgtgaacgagaaaatagaccgcgaacaaatctgcaaacagagcccctcctgtgtcctgcacctggaggtctttctggagaaccccctggagctgttccaggtggagatcgaggtgctggacattaatgacaaccccccctctttcccggagccagacctgacggtggaaatctctgagagcgccacgccaggcactcgcttccccttggagagcgcattcgacccagacgtgggcaccaactccttgcgcgactacgagatcacccccaacagctacttctccctggacgtgcagacccagggggatggcaaccgattcgctgagctggtgctggagaagccactggaccgagagcagcaagcggtgcaccgctacgtgctgaccgcggtggacggaggaggtgggggaggagtaggagaaggagggggaggtggcgggggagcaggcctgcccccccagcagcagcgcaccggcacggccctactcaccatccgagtgctggactccaatgacaatgtgcccgctttcgaccaacccgtctacactgtgtccctaccagagaactctcccccaggcactctcgtgatccagctcaacgccaccgacccggacgagggccagaacggtgaggtcgtgtactccttcagcagccacatttcgccccgggcgcgggagcttttcggactctcgccgcgcactggcagactggaggtaagcggcgagttggactatgaagagagcccagtgtaccaagt

SEQ ID NO: 1881552 - DNA, 4001 bp, Homo sapiens
tgaggatgtgtgttcaggagctgactattcccctttcccacttccacagtttgcagtttgggctcccacagcatttggggtgtctcctgagacctgcaggagcaatccgcttctttctgagggtctgtgggttctctcagtgttcctgatttattcctgcagtcaaagttcatgatacaagcctccacacgctgctttgtctgtccaagtgggagctgcaatccagtcctgcctcccatccaccatgatctctggaatacatctgaaatgttctatgtcttgatttgagtgacagtttcacacatatactcatgtatgtgtgtgtatatgtgtgtatatatatatatgagttacacacttacagtttgtgagtgttacattttaataaaaataaatcttagaaatgactacatatttgttccttttcttttatcaatatacttcctctagtattcatatagagaaccagggctaaattcatctttacaaaggtaaatcgcagaatgaattgatatcctagacattgaaaagaacaaatgtgagattaaaatttcaaacagttttgaaaactactacattgtgtattcttgcactatctctgcctttcttgatatcagaccattgctcatgctgttttctctgcttaaaatgttcttacttctcccgtgacttgtctactcatcctttaggtctcattgcttgctctggaaaacctttccagaacctcaaccctgagttaggtacccctcttatgtacccttataacaccctttgcttactactatcatccacttgacactccataatgcaattgccttcttaatttatttgtttccaaattaagctgtcagttcctgaagggaaacttgagttactgaaggttgtgtcttccacacttggcacagtgcccggtaggtgctcacaaatcattggttgaattattatttggatgtagaacaagctggacctatcaattctcagcagaaagattatgtatgatacctgattccagcagtatagcacgatggacttagaggcaactgggaacagttttccactgtctacatcaccattgtagtgatgagagtttctcacttctggggtttcttcaacgcacatcacatctcattataattttaaagaaaggaaactgaaaactgggttaaagaaatctcatcactagaaggtgttgaagaagactcctaaataaattagatttccaaacccaaatgccaaaagcttagaaagagtataaatgaatgcgatggattgtgtttttgctcccaattattagggcccttcctgtaagtgttttatatatcctcaccattgacctatgacttgcaggacttccatttggaagaattatatttacttgtcccattgaggtcagcttggccactgatttactttggctaatagaatgtgagaaaaaaaccataacacagtctgagaggaagcattaaaagccattccttatctggcctttttcccccagtttgcaacaagaacagcatattccaaatgggggtggctccttcagtctggatcctggaacttgtcaccgtcatagaccaaatgtaatgtgagcaggaaatgaaccagtgttgctgcaagacactgagattttgaggccttaccacagtagaacctaatctaagaaatggaagcaagcatcaagtggagcacttaccagactcaagaaagcctatttgtcccaagagacagccagtccttagctctcatgaattgtcacaatgtagaactgcacgctaactcttgccagatcttcctgtaagaggagccaaattttaaattaaatcaattcctgatttttaattaaaatataccttctttttaaatgttggcgctaaatccatacgtttaaaaaacacttagggcaaatcaaatcaagtaataactcataatctcttttccattccatagtttgctcatacataaaataagaatgcgctggcccggcgtcgctgggctttcctcaaggggtccccgagcagcgtcgcagagcgggccgacttccgggaaggaagtgaccagcgactgagcggcggccggcgcgtttagcgccctgaacatgcggcagtccctgcgggcgaccccaggctccggacaggcagcggcggaggcggcggctccggagggaaggaggcggcggcgccggcggaggtggcggcggaggtggcggcggagacggccggcgcccggcgcggagccctagcgaggcagttcagcgcggcctcgggcctggtcgagaaggatgctgtcccgacagaaaaccaaaaacgaagtgtccaagccggccgaggtgcaggggaagtacgtgaagaaggagacgtcgcctctgcttcggaatcttatgccttcattcatccagcatggtccaaaaattccaggacgaactgatatctgtcttccagattcaagccctaatgccttttcaacttctggagatggagtagtttcaagaaaccagagtttccttagaactccaattcaaagaacacctcataaaataatgagaagagaaagcaacagattatctgcaccttcttatcttgccagaagtctagcagatgtccctagagagtatggttcttctcagtcatttgtaacggaagttagttttgctgttgaaaatggagactctggttcccgatattattattcagacaattttgttgatggtcagagaaagcggccacttggagatcgtgcacatgaagactacagatattatgaatacaaccatgatctcttccaaagaatgccacagaatcaggggaggcatgcttcaggtagcttaacattataaataatatagtagtttatatttattgacatgtcaattaaaaagatgttcttttctagattttcttgggacacggacaaatactactagcgaaatatttttccactttgctcgtcctgcttaagcctgtgtgcaaatagttgttaatctacactgaatggaagagtccttgtgaccatttattttattaactcatgttatataaacttggtacttatctcaaggctgtctagtctcttaatgctgtgacccttgaaaacctagagaatttaatgtctccagttgggctgaatttaggtttaggtttggtagaataatgggaagggtaaatcttcagagacacttgactgagtcctcagagacacttgacgaacttgggaaaggaaagaagaataggaacaactgggcatggtcagtgataccctgagcaatcacattacttcgctagatcctgcactttttctctgaacaaaaagtagttcaagaattatttcctgagttgatcaaaaagacttatagtcatatggttaattatgtgttgagcatgtctttttattatttttgtaacagacaaaaaatattaccatataatttaagaaaagaaggtactttccatatctcctgagttggagatacttctgaaaggagcagaagagatgggagaaatgtacagttctactttattcctgaagtcctggttttaccagataaaattaagtgagaggaaaattaaactttcttgtccgattgtttttttctaccaagttatagactttaaattttggcaggataaaaataaaatgtgagacagatttactttttggctcacataacttcaaataagacgacttaaaaatggtttggagcattagtattttgactgtagaaaaaaattattcatttagtattaactgtttatgtgtctagcgttttccttgggtctgttggtctctgctttctggtaccttatttgtctagtatcttatttgtggaaacaaaaccaatctatacacaatagtcacagaacaattgttacactttgtgatactaactgtaagtgcaacagggaatcagaagagagatgagtataggctggaatacttaaagagatgattggaggacttggagtgggccttgagcttggcctttagattaacaggggccagaagaa

SEQ ID NO: 1881553 - DNA, 4001 bp, Homo sapiens
tatacttcttgtaaatgtaccactctgctttgggaaagaaatttcaggcagtgtcatttcgcccacatatcagttcttaacaactttggtatgccactcacttagtcaaaacatagcccaggcaaatgagaattttgtaaaaagtgttgctcacatgccataccacttttgaacaacaggctctcgatcactgttgttatttgaagttgaccattccatacagtgaactaaaactaaactgttctttaattcgaaatttaataaagactactgagaggattaaagagacgacctgaactacacaatgaagtgaaaatgctctacacatagtttattaaggaggtaacatatcatggagaactcacataatacaaaatgtagtactaataaaaatgttcaatttcttggccaaaggaacagcagaactctcttaagtaactctggctaagtaaataatccctttttggttctatcctggtcatcaattgctatgtcacaccaactcccaccctgcacccaaaaaaataaaatcttaaatgctagtggcttaagataacagccaccacttacttggtgcagagtagcaatctgggcagggctcaaaggggaaggctcttctcttttacatgtggcatcagatcatttggacactgggtgattccctcccatcatggcacagtcacatggctggtgatttgatgatggttgtcagctggagctcagtgaaagctctagggccaggggcctcagtttctctcagctttagtctcctcttgtgggcatctctataggcttcttcttggccttctcacatcaaggtatcagggcttactgagaaaaagtcctaagagagcaaggttgaacagaattttttataacctagccttggaagttacaaagcattacttctactgtattctattgagcaaagcagtcataaaggtctgcctgggtcctaggggaggtgggtgctagggacagggatcccactacttgatggaaggatggtcaatgccattgtaaatggagcatgggggatgaagtatactgtggtgtccatccttggaaaatataatgtaccataggtcctggcctgatttctcttcttgcattatcccaattctcctaactctatttggtgtttcctacaccatgattttctcacacttatctgctgtgggttgctgcttacttgtatctgagtctttgttattatttataaatgatcctgattctctgcttatgtaccaagcctttattcaacagtgttccttaggagctttattttatccaaaaaaattttttaaagatttctaccattaattgcttagtattctgagaattccttatttatttttgttgatcccaaaactctacttaatctctctcttccttaggcatttggtactctctggctatttttttctgaattctgtatcttttctcacttatgataacaacaaagaaagtcatatccttctcctattttgatgaaaagaaagtaagaaaattgagatacttgctgattagggcttgagaagaaaatgagtatttcccttcatgtcatatgggagcatgacattttctctgacattctgtcagctggcctttacccacatacttacaggtacccccacaggggagttttccttttacagaagattaggcatcattaccttttccctaaattgaaccttaaaagattggactggcagccacctggcagctccatggctcatcttcttctgctaccctccatgaattttctgtgtagccgtggaaaccactggggtcctcttttacactgtggtgtatcacggaaaattgggaggagtatggttactaccatctttcccccgagtacacctcaccctgtccctttaagggctgctgacatgggcctttctactacagaaagctcaaggccagactccatgtctacgtatacttcccaaacttcagagacacagttcttcttcctcctggtggaagaaggatactgaaaaggataaagttctacacttcggactctcaatgctcttccagaacccactctttatgactgtactcagcattagtgatggcacaaaagagaagctttgtgttctactgctcagcgcacattcggccaggttcctcttgcagggcctgtcaatctttatgggattctcttagaggtttcccccttttcattaaaaggggagaaaccgtactttcatttcatacccaaactcaactctctccccaaatcttaatgcctctctccccagtcagccttcctcttgctttgatcgggatgatgccaccaagtggaaggagttgttggatacacattttctaaacaggttcttccccgtaatccctgctaggaagatgatggggtccccgaacatagaacatgaggtacattggttcttggttttggatcataacagcaactttagaaatacatatcctatttgacgtcttattacatgtataaaatttctcacacacactactaatctatacatttgccattaaggatctgggttgcaaaatgatactggaaagtcccaggcaatgtgaatctttaaatgctcacttgcatctcttacaaatataaaacttgattccttaactaattccacaaatgaaccctttgttacataagctgcttctgtggttgtacctggctcccctgaggtggacatgtcctcattcagtgtgttgttccttcccttccctggaaatgactcctgaaaaaaatagattgcacttcagagagagtaggaaaagcctctctcatacacctaggaactaccaactctcttctttgtagctaccaactccatagtctttcatcctcatcttttttcacacaaaaagagaaaaatagagaatctcctacagcagatgaagggtcatacgaagttgcaattttcttaacactcacctagcaacaggcccagtgaattctttccaccatatttctcttgagtattataacatagacataacagtgtggataaagatataaatgtagatatatgaaaaaatacatcaggaagctcactgctgtgtaaactctatagagtttttcctataatactgattccattttccttcttttttatctttcctacttttttaagaaaaagtcattgttttgttattgtcacaaaaatttctttagttttcttttcagagaaaactaactgaatgggtcgaattcatccaatatatgactctgaagccagacagtcctagatttgaattctgtacaaccttggggttttatgtacccaataaggtagcagagtttatgaaaaatgtatttgcatggaagtggtttttacaactatcaacttcacttctaagagctctgcatggaacgtataatagggaagtaaaaagtatagtggagaagatgtaattcattcattcagcaaataatgatcaagtgcattctaaatgccagacatacgttgaaggctgaggtaacaacagtaagtaaaagagacaaaaatccttctgagggcgatcgcattctcatgggaggaggtaataaatgaattaaagaagaaaaatattgaatgtgttagaagttcataagtgctaaagggataaaaaggaagcatagtcatcaccaatccataattcagtgatagtgggctgttgtgtaccctagtgagatttgcttttctcctctgtgaaagagggtttgtgtagatgatcattagctggcttttggtactgacatcctgggggactttcctttcactcttttctggtctagtttgttggtgctgagtttagaatggcctccatatagggagtactccagatccattcactaagggagggaaagatttaggtcagacttgtgtctggacaactgatgtgattcataaatttgcagtaattgcttttaatctactcctttttcttctttggtcctacaattcgactggataatcaagcaactatatattaactttaccctacagaccttagaccac

SEQ ID NO: 1881554 - DNA, 4001 bp, Homo sapiens
actatgatcatgccactgcattctagcctgggtaatagaatgtgaccctgtctctaaaataaataaatgaataaataaataaaggaatttatctgacattcttaaaaaaaacacaagaaacaaacttaattacttaatttaaactattgattgtagttaactactgctacatttagaaacaactgctgtgtgccccaaatgttgtggtaatgttagcttgccagaagaattcagaaaaagaaaaggtaatgataagctcagctgcatcagataatgaaggttacttaaacaaatgtgtattaatttaaatattagaaacagtgttaggtgccagggaaataaaaagtaaagacaaaatatctgtcaggtcctctgtcaagtgctttccaagttctgtgttattttatataaccctcagaagaattgtatatattcacaagaaggtaaatattgatgatctatgtatcatgtaaaaatgacaattgttaccattttggtatatgtgaattcggaatatttttacatatgcaagtatatttgcgaaaaacttccagtattgctttagaagtgttagtgaatatccttttttaaataaagtttgcatatgctctgtggtggattctgtgaaatggttcacttaaccatttcaaacaccaaatggcatgctttcctttttataggctttttttacagggcctagtaaattaaaagctacatttcccagatccctttgcagttagccttctagatttgcttgacatttctcttatcagatttatgcaagcagggtcttttatggaatgacttactgaaatcccaggccatttttgtgggatacccattttcctttcacagataatggcaaaggcagtgtggctctgaagccagaggccagaaggtaggggaaaagtcttcccctatggttaattctgataatgcaggggcagcaaatcctttgatgtcccagttctatgatggacctttaaaagctatttctaacagctcactacacaaaccttttcttcaatcctatcagctattttctacatcccttaataaatctcttttacttaaatagtgcagattctatagtctggcacaaagatctttgatcaatgtgtcagttcattctagaactaagagcaactagggattgggtatggaaatgtaaagtaccaaggtatgatcagagattgataatactttgttcttttggtaagattctgggaagcaaattcatctgcaagactgatgcagacagtgacaaccaggaggtacaagatgttaagcccaaagggtagagaaaacatgtgtgtggtttaggcacatataaaaaccagacggtgcaatctagcttgcaaacataattctaagaagtttttaacttagatgtagtaatgcttcatacagtcacttattcagacttaagtgttgaacatcaactatatgccattgttttcagcactggagatacactactgaacaaaattaaaaaatcgtttcttcctgagtcttagattgcaggtcctaggaaatcttaccataccacacgatagtccctgttttccggaaagtaacgaaaatcacctaaaaagatcaggtagcttttcttgtaaatcctgagaccatgagaggtctcttttaaaaaaattgtacaaatgtatggggatacacgtgtagtttcgttacaggcacagatttcatagtggtcaagttggggcttttagggggtacccatcactcaaataatgtaaattgtgcccattaactaatttctcatcatcctcctcctcccatcttctaacccttttgagtgttcattacctgtcaatcattccattctctacatccatgtgtacacattttttagtccctacttaggagtgagaatatgtgatatttgactttctttgcttggcttgtttcatttaagatatgacctccagttccatccacctcttaatcttgtgcctaaaactctttccaggggtttagaatcctggggattaagtcataattgtcatgatgtaatttgcatgaattcataaagggaaagggctctgtgtcacctgttggccctatttggggttcataaacattttattctctcagggatatgaagcagcaatgactttaataggatgacttagaacacaaaggagtctaacttatggtttaccctagaaggtaccattacgttttatttttttctttatatggcaatctttctaatttgccatacaaattgctatcctttcatggacagcgtagaacattattatctattataatttttaataaattgtgttttaagtttctttaaaactcttggtatggaggatatatgtaaattatatacagtgttaatatacaatattaatatatgaaatgcaatattatagattgtatgacatatcatgtttaatatattatgtaagtaatatataattaatgcaattgtaatatgaagctatagatgtggttttttaattacttgtttaaatgtaaaatgtagaaatgctgttttgttacatgaatatattgcatagtggtgaaatctaggcttttggtgtagccattacccaaatagtccaaatagtctacattgtacccattaagtaacttttttttttttttttccctgagacagagtcttgctctgtcacccaggctggagtgcactggtgcaatctcggcccactgcaatctctgcctcccaggttccaacaattctcctgcctcagcttcccaaatagctgggattacaggcacccgccaccacacctacctaatttttgtattttttaggagaaacgggtttcaccatattggccaggctggtcttgaacttatgacctcgtgatccacccgcctcggcctcccaaagtgctgggattacaggtgtgagccatcgtgcccagccataacttcttatctcttacccagcaaactcctacctttcaaaatctccaatgtctattatttcacactctatgtccattatttagctcccactttaagtgagaacatgctgcatttgactttctgtttctaagttgtttcccttaagataatgacctccaattccatccatgttgctgtagaagacatgatttcattctttcatactaaggctgggtagtattctattggttatgatttatttgtgtgtgtatttgtgtttttgttgtgtgtgttataaaggatttaaaggagagctaatatttataaatctcttaccatgtttcataaacctattgtttatttcttcagcttattaaatattgaaaaatatctttgggaaggaggtataattttacatataaggcaaatgagtcttggagattaaatacttggccaagattgtgctgttaataaacgcttgaagctaaatgtaactaattgtactgcttttacttgagattgtcattcttaaaattatccctatgaatcctatttcaatgcaatacagttaaacctttctattttgggatagacctatatataaaaaaatgcttatttgcagttgcctagtagtagccagtatagactatactgtatccattgcaagatgggaagttctgtcttctcaacatttgaataaataggttaataatttagatgccaggattcaattgaaaaatgtatttatcacagcaaataaaaatgtaaacaacttgaacaatataaaatgggagacagacttaaactttttctaaaatacaagcaataaaattgctatttgatttaaagaaaagattaattttactcacttttatagcaatttaaaacatttaaaaagtaaaattaaaacatgaaaggacctttcatgaagtgactaataatgcaataattatttggttcaatcagcacaaggtacatgatatttgctgaaaaatcataaatatttgaaatacttttatctttgcttgtttttgttgttttctgttttttcttttaattaaataataagtaacttttttctgttttttttcttttag

SEQ ID NO: 1881555 - DNA, 4001 bp, Homo sapiens
attgtcagaacgcatatcgtgtttctcagaattatctgtatcatgttggaagtttttatacggaagtgtgtgttgacacaaatgattaaggccaggattcctacaattgacaggaaaatgacctataaataatgacctctgatggacttgtcatgcagtcattaagtgaaatattctagtaccagtttcctctctttggtatcccagtttccggcttctgtgaagtacttttcctttgcgaagatcactcattttacctgagaccatcagattttctctgggctttatgaaatgataatttcatttactgtcttagcagatagcaatatcaattgagtttcacagcctttttggggcacaattttggttacacgaaaattttttctgaagaacctcttatttctattgttatctaaaatgcaaagtaaactgcttgaaatattgaaagtttaggattttttcaagtttaagataaaagttaatttttaaagtcattaagcaactagtttgcctattattttatataatgtattgtcgatttttcattaaatttatacatttcaatataattccttgggaaatggtattcagaaacttgcaaatgagatattatatttcaattatctcaccatatatgtatatcataaatgaaatgtaaatttctagaaaactaattttattaaccaaactgaggacagtgaatgaaatcacagttcacttttaattttcatagggcccattcaggttttcttctctttagtcatttctccttctaaccccaaaacaccctatgaaccagtggtctattttttttccttcttctttccctttttcccttccttccttcatgtctgtgggtaagagattgcagaggaaaagtaataagtgataagccctgtcttctaaacccacaagcaagatgcatggatttaagcacttaaaggaaaagaaaaataaagaatttgaaactatgtcacaatatcaccatattatattacatcagtaaataacatcattgaagcaaacatataattgagcctgagaaacacttacaggaatcaaaagctgagggctgcaccaccaaagagagaatcagtaccctataaattctacatttcatgacttatgttgctcattctaaatgctaatcttgggataacatttttttaggagcactttttttaaaatttaattttaattttaattcatttattttttgaggcagaatttcgctcttgtcccccaggctggagtgcagtggcacgatctcagctaactgcaacctccgcatccagggttcaaacaattctcctgcctcagcctcctgagtagctgggattacagacatgtgccaccatgcccagctaatttttttatatttttactagacggggtttcaccatgttcgtcaggctggtttcaaagtcctgacctcaggtgatcctctggtctaggcctcccaaaatgctgggattacagcctggccttaggagcacttttaaaatgaccacttttaaaactcccacataaacaatctcacattagaagatatgtaagaaagaaataatatattgatcctgtaacaaggtatagaaattcaaaatgaaaaggaccttagaattatttcatttaaacttctgattttagagccaatgaaagtgaacttgagagaacttggagccaatgcgacttgcctacatccacagggtcaaaaataaaactggtctctaatcaacgagaatctgataaaacatgctgtatgttctgaaacccaattctaatcatgagccttggattaattaaagtccctggaacttgcaatttctgttctctccctctgcctcctcatacattctctttggatggcatgtgtaccaatcaacattgctgtgtggtttacactagaggctggagactatgagaagaggaataagacccaacacctacctttataaaagactcacaatcggccgggcgcggtggctcacgcctgtaatcccagcactttgggaggccgaggcgggcggatcacgaggtcaggagatcaagaacatcctggctaacacagtgaaaccctgtctctactaaaaatacaaaaaaaattagccgggcctagtggcaggcgcctgtagtcccagctactcgggaggctgacgcatgagaatggcatgaaccagggaggcggagcttgcagtgagctgagatcacgccactgcactccagcctgcgcggcagggcgagactctgtctcaaaaaaaaaaaaataaataaaaataaaaattaataaaaataaaaaaaggactcacaatcatgaaggagagataaaacatgcacacataaaataaaataaaaggagaaattcaatacttgacagtgaagtctgatgccatccagaagagtcttaattggagtctcttgagctaatatctttgccccttgaaccactttgatcaaggcttcatgaataacctttctagagcacctctgtgactctactcttttcctacttgaaatcaatgggtggccgtatcagaaaaaaaatctagtcagcacttaatacaatacgaactctccttccacccttcctccagatcttttcctagggctaggtctcattagccctaaaatggaagtgatctccagccaaacggcacagcccactattgcctgacacactatattttaaaaatttgcctcttttctcctgtttgtgacatgctatgtggtatgccttctcttcattcttgtctatcaaaattctaccatcattcatagcccagcttgagggctgcctttgtcataacgcctttcttgcccaatcaggagtaatcttcccatgcccagaacagctttggaaataaggctatattggtttgtaggcacttaacacatttgccccctaactatacttccattttttttttctagtatagtgtatgttcattgagaactaggaatatcaacctcagataaataataaaatttggaaaaatggcagtacagctttctaatagaaaatctcaggaactaatttttaaaatgctagttaagaaggaatttaacatttacttggcctaacttgtctctcaataaagaaagaaacaaaaagagctgaatattttatgagagagtaggtttcatttttaaacaattataattgaagaaaatctttgatgcattagaataagccaagatttcttaggacaatgaaagcacaaaccatataaaaatttttttagttggacttaattaaaagtaaaaagtttggctctacaaaaggcactactaagaaaatgaaaagtcaagtcatagaaaaaataattcacaatacgtatatttgataaaggcattgaatttagaatatagaaagaaatctcataattcaacaataaaaaggcaaaaaaaagaggaaaatatttgaacaaatacctcacaaaaagacatacaaatagctaataagattagaaacagatgctgaacttcattagccatcagggaaatgcaaattaaaaccaccacaagatactactacatatctactagactagctaaacttgtaaaaacttgacagcatcatctgtattgaatacacacagcaaatagtactctcatacactattagtggggtgtaaaatagtaagccactttggaaaacaggttaggcaatttcttatagttaaatatgtatttttaaaaatggacccagtagctcacttctaggtatttgctcaagaaaatatgaaaacatatactcacaacaagatttatacatgaatgcttatagcaaacttactcaacctggaaacagctgaaatgttcttaggtaaatgataaattgtgaaataccacgtaacgaagtactactcaacaataaaaaaaattactactatacatgcaacaggatgaatgaatctccaaattgtactgagtgtaagaagccagactgaaagaaatccacagtgcatgagtccattccatagtggcagaaatggttcccacgt

SEQ ID NO: 1881556 - DNA, 4001 bp, Homo sapiens
agaggaaaggaagagaaggttaaggttggaggagacgaaaatcaagagtgcttaaagaagaatgaagaggacaaagaagatagggatttagtgaacagaccaatggatctgacatcaaggtaaggattatatactgtttctataattccattcatcaagcaacttattttagacattaaatcttcagggtaagtgtttccaccaaaattgcatacaaatgtgatgaaagtgcattttcccatatttttcatcagattctcagaaggctcgacaaacttaaaggttgataaactatagtgtggagggttaagaaagctgaaaaacttctgaccctccttccatgcagaggtggaatctatttctctctcttgaatctaaactggtggactacgctttgacaatagagagcatcagagattattccactccagttccagactcagcctgtaggagaactagtgtctctttcttgatcttccagagccctgagctacttatcctgaaaccattgtatgtgagaagcccaggccacattggagaggccctggaaatgctgtatggaaagaaagagaggccagggagcaccatggcaccagatatgggggtggagaagccatcttgagtgtatcccacagcttctactgctgccaacctgagcaaagatgaatcacccagcctggcccttccagaattcctgacccacaaaatcatgaatgaaataaaattgttgcatgaaatcataaaattcagatgttagctattttagatcaagagatatcacaacacactgggattttttattaaaaattcttaagcattttacatacaactcaaaaattttagacatgctattataaactaacacataattctaagccaaaactattcataatgtgttcctcctttctgtccatcatgttgtttactaatgaagcacttaacagttttgggggaggggtaagaaaagttaccaaaagaaaaatataaacaagcaaacaaaaaacagaactcatcattttcaaacaccttttcttcaatgcaaatgatatttagtttttactgttcttaaactttacatcatgcctaatttctttccagtcctctaacttctctatatggtctgctcactgttttttgttgttcttgccttttaatacctaatgacactaattagttcacagctgtcataaaatgcttttgttctcaaagaactcacagataaggtttctttcttgaataatctgtagacgctttactgtttataaaacagttctcattttatttttgctaaagattggtctaagtaatttatatacacaagagaattgaaaaatcatgatttttttacttgttcaagtttagatcctattacttttctgagttcatatgacattttcctttctcataattttgagacaaaagaaaatgttagctatataaggttcaacctgattaaagtgaagatattctctaaaatgttctatcttcccacttacctggaataaagacttgggaagtctcaaaacttaggggtcaatcttaagtaactgcaattttaaactccaatcagttaaaaaattaaatgatcttgttccatgtaataatcaaaagcccatatttatttttacattaatttaacatttatttagttagagtctgctggaagcaaaaacctttgacatcttctggcatcttctttctttcctaccaattttttccttagcctactcatcttagcttctacatcctgtaattattttaggaagagggtggtagaggggaaaaacttagagaagtcaagttcttacctcacccgtattgttcaatttgctttacgctttcttgaatttgagaggtttctccagctcactctttccctgtgttagaaacaaatgctgggtgctgcaaagaaaaccagaacttaggcagaaaatttctcagcaacgcacatctacttctgcaaaagggtgctgcctgtgtcagtcacaatcacaagagcacacctagccaggtagggcaggggtttttatccctaacacagttcctgttctgagtcctttccccattggctggagtcagaccacacagtctaagctgacccgattggctagtatttgaaattgagtaaggccaattaggggagaaggcagaggctgtcccttaccaactaggtgggaaggcttgtttacagagtaagaggtttgctagttacagattaagcagagaaacaagtgctcattacagactaagcaggaagggctgtgcacagagcaagaaaaaccaaggaagcttagaagaggaacttactatttctggcacctggtacatgtaggggttcttaagaaattccttcatttctgcagaccccttaataaggatcattcactctcttctggtttgtgtgtctgcagggccctaaaatccaagatttcacctctagctccttccactgggctcccatttcccctccaggactctcattaagttaagatctaggataactcgaccctgcacctctcagcataagatagataagagtagagatagagattttgtttaaaaccccatattgccacctcctctccctatagctgaatttcttcttttacttgaccacgatgatttggatacataattagataataatacagcataattctgttccaaaatctatagacttgtgctcatataacccaactacctttttctttctcactggtgttcacctttcccaaaatgttttctctgcaataatagttactgttataaaatgttgcctgataatattttctaatctgtattaagcagtgttgtgagtccccagagttaatatcaactcaaagttattctttatttatttacattttttttcatagaggcagggtctcactacattgtccatactcctgggttcaagcaatcctcttgcctcagcctctcaaagtgctaggatgacgggcatgagccactgtacccagccacaaaactattctttaaaggtggttataagtggtccttcaatcataatcatagtatttttaaacttttaactttagtgtatagtttcatttagctggctttgacataaaggtatagttataatgaaagatatctgctaatctcacctttcctggaaccagtgccttacacacagatcctactaccagctctagagagaaaattctggaaaaaatcatctgtcttgttagttcctagtgatagcacctgagggacacgagtatcaaaactatgttctatctttcttactcaatctttgttttttaaattatagaaataaaagtaaatattatgatcatttgcagtcatttggtatttctcttctcagtatcagaaaaggtgatttatttttagtacctgaaacatcacacctatattagcagtgtgtaatttcttgttttccttttttgttcctcacagatttttctaacccaagctataacaatcctcaatggaaaacacattatcatttaatttcttctttgaacttgttattactcttctttataaagaaatttacaagaaaattttaaataagaaatagctctttttcaaatgccaggatttgagtctctttatatctcatttcttaatttaatttgacatcttttcaccactaaattctgaaaatatagaaactacttgattatcatgccccgtgcgtacaagtcaaaaggtggtgatcactcatgtaattgttccttttgagtgtgaatttgactgggctattgagtgcccagattacacgtttttctgttttggtctataacagtgttttcagatgagattagtatttgaactgattaactcagtaaagtaaagttaactccacaatgtgggtggtcatttttcagtctattgagagcctgaatagaacaaaatgcagggaaattaagaattctttcccttactacctaccaggttgtgctgtgacattggtcttctcatgcctttggacttggagtataccatcagttataagg

SEQ ID NO: 1881557 - DNA, 4001 bp, Homo sapiens
tgagtattggatgaccgctgctcttcttcccctgcctcgcaagggttaatcagccttcctgcggggcggcagggcggctaggaaggaggcagcagggcgtcctggcggcaggcggctttcattactttgatgggatacatgtgctcggctttatctccggccctttctccgtaattcagagcttgaacgtctcagctgtcggccgatctgcagacaattgctcggggtaatactatccggaaaaagctgataaaatgcagatgtgacgaggcctctgaaatttgcggtttgctaagtggtttgctgcgatgcttgcccctggccagggtggcttcccttcgaggctgggaaccaggggggtgggagttgcattttttttttttaagtgaaaggttgaatagaggaagtgagtgtagattttttccctctaattaggaagatgggcaaatagaaagtagaggggaaggggacaataccggaggacgtggcagttcaggcctccccttgggtccccatctaaccagcctcttcgggggggcacctccagaaatgggcaccctgggattcctctgtgcagcctggtgcagggggtggtgcagggggtgcttggaaggaggccactcactgactgtgtgaccctgggccagtcactcaatctcttcctcaatgactcaaccaaaagaccaaatgactcacaatctcagttacttaccaggtgcgctgcacccagcaggatgcctgaacacagtaggtgctcgatgaatgacgcagcagtttcctttacctcacttgggaccccacatgaccctagagagtaaagctgcatgacactgatgtaaacacaatgagtcccagttgggtggtaggcaaggggcctgccaggctgttagtcccaaaaatcatgacttcccaggccaaagtcaccgggctggatcccctgaggaaacaagcatcactgtgttttcctgggccaaagaagcattggggcagagctcctccactttactgtgtgcccgaatcaccagggatcattccaaatgcagattcccattcaggagggccgggcagcctatgaacatgcatctctcacaaggtcccagagatgctgaggcctcaagcggggtgaagaccccgagtcatcaggctggggaggaggctttgggcatacctaggccttgccctttcagtcccaggagaaccctgctgaccagagaggacaggcggcatggttggtgttgctcaggacgttggggacagagccagactggaagggtgactgcaccctgagcttggtgcttttcccacagggcctctggtgaccaaccttccatagccagccctggtttcagacccgtgggtgaatccacatgacagcatcccagagagctcgcctcatcacgcccttcccaacttgcttttacgacaaaggaaaactattaatagatgaattgatgctgttacgtgctgccattgaggccacataacacagttctcaaaacagccacgggcctgacccgcacctatctatggacctcatgccccagtctgtgtgcaaacatctcaaataatcaataagccgtgaagacagcttgtgaaaacatggcttcagtttcagggatgccttttcgctctcttatatgtttacgctaaggtaaaagtagccagcacattgagcttctcctgccgtccttacctctcatcctcgaaaatatccctgggaggtgacttgatcacgcccattttcagatgagggaaactgaggcccagaaggttaagtcacttgctctaaggctcctcgctggcaggatcagagctggagttcaaacccaaacgtgtttaggagtatccagctccaaagcacacacagctgggttggtgccacgctgtctccggacaaacaggaccccagggtcggtgcgaggacgcagagtgctaaggcagccgaatgcaaaatttagggcagggcctgggtttttcccttgtaaaggccagtctgcaattagaggggccttttgcagttcttgcctttcaaagaaagagggcgtctctccccctgctggggtgtgggcagagctggtagcaattttcccacaatgtgtaaattagtcaatctccgagtctgtaaacgggggcctttgaagcgatcttaatgaagcactccattagggcttagtgatggctgcctccagcattactggaccccgcgccttttgatgtcttggggccacgggttggaggctcaacttatctaaatgtcccggcaggcttaaaaaaaaaaaaaaaaaaggcaaaaagctcccttagagaagctgaaaaatttttaatgaaaaaagttagtcctggcctgactgatgttggcacttcaaagccagtgcagactaaattgctgtagactgcttaattcaaaagtgctccctcgcgggtgacagtccaatggtgacaaaatacaattggcaacaggagacgggcaagatcaaaggctggctattgtaatagttttgttccatgaagaattgctcattgtcaggagtttttaagccttttttttctctctccctctttctctctctttttttttttttttttttttggccccagagccatcccgggattctctggttcagaatcagtgtacataaatacttgtaattacatccttctgacaatacatttcagttcgcagaggttgcggctgccttcccgtctctctcaaggttcatggagctgatggttggttggattgtaaaaatcatttctgtgtttttgttagaaaagatctttcgaggcacttggagggcgaattagagctgggatgtgctcatcttcttgaggactattttaggatttgcttcagattaaactgctgcctgcagaggcccttgaggggtgatggggtggagggagcatcagatgactggtcgtggggttctggctcttctttatgactttacctggtttctcctggcctcaatttccccagttataacctggggctcatttactcacaccacaagtatttattgagctctgacctgggtgaatgcatgccttgccagggtcatttgtaaggccgttgggagaaagtgggcatgaaagccctctgcgatctggacactgcctccttcactccgctccgtggtttggaggggctgtttccgggatctgtgggtactgggatctgtgggttacctggcttctttgaccaccatcattccctaggaacacagaacccagaatgagatattctggtgagctcttcacaagcctctacttggagggagggaagagatgaaaggaaagcgtctccccaggcctagaatccagtcctcacttctcttcccgcagtgtggctccaccaactcacttttctcccagaacctcagttcccttccgtgtatcatgggaatcatactccctgccctggcaaatctcctgttttttacctgactttacacaaggctcagacaagggaaaagatgccaacgcactttgtaaatgaccagaaagccagaagcatcccaaagttggtccatgctattttctgacccaagccggaggaggctggggctgtgtggggctgggtcgagggtggggatgactggagaccattaagaagcaggaatgctctggctccttttattgcttcaaatattagtcaccaggaagctgccccgcgaagcctatgaggcctcgtatcatttacttgtcttgaattaattaagaagactcgtatggggacaattaggggaccctcaggctgatgatatctcatcttgttgggatggaatttgcttctgcatcccatttgcctccctgcatgcccccagatatcagcaggttcattttttcccaaagtatctcaggtatatgttagggctggatttgtggttctacaggcacgtggacagacagacagccccgtgagagatgagctgagggtctatctagttgacaggtgtctgtttgctttactccatgtcttgctttcctactttcctttc

SEQ ID NO: 1881558 - DNA, 4001 bp, Homo sapiens
ctctcctcaaggactgctaagtcaggaaatggggtatgcagggtctggaagttggaagctggccgcatcccccaaatgagcaggtccaagacacttattcatacatcaggaaaaccagggtccagagatggtgagtgactcaaacaaggtccatcccttcatgaactagaggaagccatggctcagaaccacaagccccagctctctgcccacttccttttcctcttcaccattttacatttgataggaaatttgttatttctcatgtttgagcccgctttgtctccacagccctcatcctccctatgagcatgatagaaaaaaattattctctatttcctaggagagaaatccaaggcttggagccacttggatggtcacccagggccatcagcatctactagccaggaggaggctgggacattcgggaggcaatggagagaaggaaatagaaggaagagggctggggctcccagcagtctaattacagggtcccaaggcccagcagtctttcagggagaaaaatcggtcggacttggacaaatcagctgcacagtgttaaccttccagagactgaactctctccccatttccaggaatctaatctttgatgtatctttgaataactttaaaaaaaataaatcctgaataatcttagatgattgtaaggatctgggtatatcaccacctctccccacatcccctgcttgcctcacttccacacctccctgcagatgtacttgcaataggggactcaaagcggaaagctgtcaaaggatttcattaactgaaatatgacggtaacttctcaggtctttctggtcattgtggctcacacctgtaatcccagcacttgggaggccaaggtgggtgtatcacctgaggtcaggagttcgagaccagcctgggcaacatgatgaaatcccgtctctactaaaaatacatggtggtgcatgcctgtattcacagctatctgggaggctgaggcaggataatcacctgaacccagaacactgaggctgcagtgagctaaaatcccaccattgcactctagcctgggcaacaagagcaaaactccatctcaaaaaaaaaaaacaatttctcaggtctcttcccaattccatctctctctcctaccacgtgactacagggtaattggagcattcataaagctcctgaatgcacccaaggagaccatgttcaatgttcttgatagtttgaggttttcagccggcaactgagcaggttggctttgggtcttctcagagtcctggggtcctcaaatagaaagcaaggcctgacaaggtctgggacaaagattgggggtgtgggagaacatggaagctttgctctcctaattgccaagccagcgttttccgcacctcctgttagtccttcatttagttttacaaaaagtgtgggaggatgcccccacaagcttgccccagtggctgtctgctgtgcaggagctcctaagtgggaggaaattggaagtgagcacagagcaatggggtgggccactgtggggtgcagatgtccacctctccatggggcacagaggaagacacagctgagtccacctgggtggggaggtgaggttaggaaggttacacagaggaggtgagttgagctgaggactgtcacttacctgtgtggatggaagaccacaatctcatcctgccatctcctgccacaagaaaaagtgccaggtgaagaagatggggaaaggtgttcaaggctagggggatgtgagggtgatctggctgtgacatctgtcaccccattgatcgccaaagttgattcggctgatctggctggctaggcaggtgtccccttcctccctcaccactccatatgcgtccttcccaaagctgcactcacgacaatccccgatagaggaggactggtcttcagccaagggtatatgagtagctttgcacccctgctagggcctccaaacaagctctcaaggtgttgaaggctgagggaatctagtgagcaaagacaaagaggcacatgcttgttggggcatagaatgttctagagtgctagaaattggaacattctagggctctagagcttaaaatattaagaaaagcttggtgagggaggagacaaagaggatgggaaaaagcaggtggaccctcaagagaacgtggatgcccgccaactgtagctggtgtgaatgtgtgaatggggtggcagacggggaagggtgggggagaagaaagggacacaggagagactgaggcacccaggatggccaaggtgtgtggggcagctggtatgtaccagcactgttctgggtattctctatatacactctcacccagtcctcccagggtcccccaatgtcccctttaatagatggggaccctggggcatggggaagatcatgaatgcacccaggatgccacggctcagagctgacaactgagctaaagaggggccagatgccctgcaggctgtcacctcaggcccaccctgcccttcagcccggcccagttttgacccagcccagaatgaacacgctccttacttgcttcccaaactctcatcaacatctgacaacaacaacagcaagaggagggcccagaggatctgctgcatgctgcgggcgtcgccaagttcttaatgttacccagctgtgcagaggttggccgggggcctggcctgggcaaccagcggcgccatgattcacatggactgaacagtaccgagtgagtcactggcgtcccacagccaagccagccactggactgtgagctgcatgtgggcacagagcgtgctctctggatgcctggcctgcagtgggttcttggtgctattgttgctgggctccctcagcctgttctattgcatctgcttactttgaccactgggcctttctgccctccaagagcttcccactctgggtgtgcttggtgtgtcctctctggacagctctgagtggcaagtggcaggcacaactgtatccaggaactcaaggttgcttccaaggaagtgaagtcaggcaaagccacccaggaagttggatcctcaagataatttgtttacccagaactctgggacaccagggcctagctaatgaagccatcctctttagtaagatgggctccaaggtaaccaggtaaagggaacctagcccccacctccctacccccacacacccgacagcctctcctttactgcactagcctgctggcccctgggatgttttgcacatcacttaaagtggggctccagttgcctttcccggggttcccgtctgcacagggaggcagggagagatgcaccaggggagaaaagaggaaaataatcccagtccaggcactaaaccaagatggcccctgctcagccaaaaagagccactctgcagatccgcgctccagggcatggacctatcatggcccagccctcagtccctggctctgcagcctgctgggctcagaggcctaaggaagcctgaggaggtcctggggcattgagaccccaagaatagctcagaatggtgaagctggcacttgcactgactgttacagggtaataggagtttgcttttgtgggggtgggggcgggggtgtggggagggcatatgcagaggctggtgggtaggcagcagcgaccattctgttgggcaggtaaggacagagggcatctagactctgggacagggtggaagctcagtagccttaggcacagggcgataccgtgtacagtttcagcagcaaggcatgaaggtcttctgcagcatgggccaccaggcaggaagaagcccaactaggtgggccaaggagagggaggtgtgatatggctgcagacccagatcccagggagtgcctagagagagccctttgtgcaatccctgccctcttcctccttgtctggtagcagcccccgtctctctgctcacagaggtgcgtgtgagacctcctggctgcctggtgcctcatctcttagaccacagtcttgggcccaagggggagctcgtaccccagggg

SEQ ID NO: 1881559 - DNA, 4001 bp, Homo sapiens
ttataggagcatcacataatcacattaccgtctagttcttacagctctgtgatgcaggtaacatcacaatccccattctccagggaaggggacgaggctctgagaagtctgatgaccaaaccaaggtcacgaagccagtaagtaactaagaaaccctatacataaagccagttttgttgattccaactcaatacataaatgtaatttttttcctaccaagtcagatagaatctggtaaaagagaagcttcttttacaggatctgtatttcacaaatttttgcttttggtctataataataacaataatattactcagcacttgaaaatttacacctgaaatttccatctgcaatatatttgataaaaatgtgcgggagtgggtgctttcattttaagtgggttgagaattagccctgttaataatttcttggcccggcacggtggctcatacctgtaatcccagcactttggaaggctgaggcgggcggatcaccaggtcagaagttcaagaccagcctgaccaacacagtgaaaccccgtctctactaaaaatgcaaacattatctgggcacagaggcgtgtacctgtaatcccagctacttgggaggctggggaaggagaatcgcttgaacccgggaggcagaggttgcagtgagccaagatcgcgccactgcactccagcctgagcgacaaggcaagactgtctcaaaaaaaaaaaaaaaaaaaatttcttgaagctactgaacctttcctttcatgatttctccaatttatgcattttaatactaagataatgtttgcaatgcatttggggaaaaagactttagcgcttggcagattgcagagaatgtcagttaccatattctcctttgggctggggaaaagcccctaaggaaaacaataaagtatgggacagtctcgggattataaatattcagttgctggctttttctttaaaagcaaaatgtatgaaatttataaccataagtaagctctaggtttacttagagaaactcaatgtgtatggcctgtcttaactattttccttaaagtcattttggtatttgatatttaaagtgaacggcaaatgtgttcctaggaatagaatacatttaaatactatttcctagataccttttgtccttgtattcacctggctttaagaattacttacaaaattacacaatttgattaaaaattaatatgactgctgtagtccaccaaagtggaaaaaactcataaataatgcacatggcaaactgtctaaggaataaccactaagttaaatttatggtaaattattaacaacctaggtagcatatgtgattgctactttgcccaagtttggaatgtttcttttatgaatttggaagcagtttccttcacataatctgaggtgagaaaccaaaacctatggtagcaaattggaggttgtaaatgtaccaatttatggtagtaaattgagcaaggtgatgtgcgtagcaagtggtagtgctgactggaaagattgctcaggttttcttcttgagaagaggaggaagttgtcaccatttgtgttgcttggacctccacttaaagagctaaaaattcaccttctgaacaacccaaaaatcccccttatttcaatattccgcccataatgtttatagagagatggcatatattccttcactagacatatcatgctaaatgaaaatgcacttttagtaagaaggctgtttatttcttaggtctgtgctccagcctctggcactcctgctccacaactctgtgcaggccactctgtcaaacacttcactatggaaatggctctccccagtggatgattggtataccatacttggatctgtgtggtgaactttccccttatggagagtacccatgattctagtgagaatcctaagctgctcccttcttaaaaggcatttctttttatatttaacttatttgtgcctgtgtcttgtttacctgccaaagacagacatccttgtctctctgtgcaagtatcagtgtgcacatctcattttttcccaactccctactcagtaacccaaagtcagccacaatgggagtatttacaccacagaaattagctcacactaccaattagaatattttgttttccagagagccaattgttaaacatgtcccagtatgctagtgttagaagttatatatgcttgtgttagaagttatatatccccacccctgacacctagaactcttcattctacttactctttactaatctggaaccaggatgagattatagctgaagtagtttggactatttatgttcattggtaatagagttattattaatatgaaaaaggtagactgtacaatatagtgaaagtagaattggatacggagttaaaatacttcgctattatttaaatttctgtttccaagcaaacttggacaagccatttaactttctccacatcaataaaatggaaagtataaagcttagcccaactacatcagaggattattatatgacttaaaagaagtctgacatctatgaaaacattttgaaaagtaaaattttaatatgaaaaacgttttgaaaatttgaatatcaaattgcattctttttttgacacttcaacattttcaagaatttcacatatcttatcatgactctgatatgaagacagatattattattgcaattcacatactgccagcaagggacaagatcttctaagttcttaatgctttttctgtggggtatgtgcccagtggtaacagccactcactcaactgctgatgcttcttgccctgtctctgtattcgtcaacatgttaaccacgccaaatatttaacagtgtcctagaaataaagaaaactgtatgaagccatcccaagtagagcatatgtaccttcaagttcataacattttctacatagtgtttttagtgttaaagaaaattagatgataatgtaaccagacaacatgtctttcagctaaagctcgtgatttttaaaaaaaaatcaaaaccaggatataaagtatacaaatattttaaggtatccaaatttgaggaaaaaaattacaaattaacttcagaggtataaggtatatccataaagaatgtcatgagagctcagactaagaagtaatgtgacaaaatatagaaattaaaataacagtgattttcttgtcatgaaggaaagtttagaaaaattgtaataaaaatcacacttagccaggaaaaaataacaaaaacactcaattccatggatttaatttatttcattttttctgaggaagaatgtcaaatagcttgaaaataagcccataatgaaactttttaaaaagtaacttcttattcttttgtcttggggcactaccaatttaaccccaaattctataccttccagaaaaaaaattcttattctgatatttaaaagactgactctttgtctcaattcatttaaccaagattttagtacctcttatatttatcacactggatcaggcccagtggggaatataaaagttaagaaagaagccatttctgtatcatgtcaatttgtaattgagtggtagattttaatgtgcctaataaacatacaacaataaaaaacaaataaggcaatattcttatgatggccataaagtgctatgacaactcaaagagtgaaatcacttccagttgcaaaaacaatggaattgactccttttcagaagaggtcacctgagcacatcacattatagtggattactctcatgtacttccttagacggaaaagtgaccaaatgcacttgagataacatttcccaattaaaacaagagaaaatattatttgcatatctctcaactaacctgaaaatttaactaaccaaaccatagcattccccaaaccttctggttaacttaattctactggaatattctttaagtacataagtgaatcattgatgtttattatattaatatgttcttgagaagggcctggcactatccctggtgcatatcagaactctaagaga

SEQ ID NO: 1881560 - DNA, 4001 bp, Homo sapiens
agaagaagagcaagaaaggagcttgaacatcatcagggtgctaacaagatatcacctgggctctccttcttccaggacacccagacatgatttcacacaatttttcacatgcaatggaagtcttcgtctcccccaacagccaaaattttctgggtttttttcaagtatttttcccctgtctccgtgcttctgttagtactgaattagtttgggtcatgaattatttctctattccatatagcattttaggggtaattctcatctcctaccttagttctttggaaaaatccatttaacacaacatttgcatgtataggagacactacagaatatctatgaggattaatgaggattttaattataaacattaataaaagcaacttccaactgaatattacatagtcctagtactaagtattttggctctccgtgccacccccaaactttttcaccttctactgtactcaggctccacacattcttctagttttaggaatgcagaatttctcagagcatgtcaggaaaaatattactcctaaacttagctttgagtccactgtgcttatctagatcaaataaggatcttcttctcaacagatataaggggttgtaatataactggagagactctttatcaaagataatcaaaattataaacagtataaatgttcctaattaggccaaaacgttgagagactatattcctaacttaagataaaaattgggttgaaaatattgtcaaaagttagaattaggtgtagaagggttagagataggcttagagtttcttgacaaatgtttaacaatcttgcgttctgctttaaagaggtctggatttggttaatgaatgataaacagtcatttcctcatctgtgaaaaaaattattcattctgctaatatttgtcatgcttctatgatgtgccacgtaatgttctaagcttgtagatatatcagtgaacaagagagataaaatacgtactctgatagaagttagaggtttatagggataataatggtacttatttcataaggttgttgtgaggattaaattataaaatgtatgaagcccccttagaacactgcctggaatgttgtagaagtttcaatgattataattgaggcagcgttccttccgcgggggcactagctgcggggagtctgttccttcagagccctgattcagcgatggatgaataaacgtacactgacacacagatattctgctctgccagtcccgctgagggtcccagtcgcttacaggcttcctgctgagccctgtaaacagttgccactgggccctgatcagctagcgaggctctcgccatttattcagtgactaattaacaaaagttgtgagtaaacaccactagaaggtaaggatcaaaggccaggttccgaggcctaaagcaaacatcatttgcaggtaataaacttctgccgacccccgagtaggaggcagtaaagtacccgcggtaggacaaaggtcagtcttaagccaatataagtaagcatgttagtaagagcaacttcccacattcctttgtacttgcaccctaatctttctggctcctgcaaggagagcttggctgccttcagccaagcaatctgaagctatgcaaactctcagatcttccaagagagtttttggctattactataactatcttaatatttttcccaccagcctgattgaaccccaacctataatcacaattattataagatgattatactctgatgagaacacttgatcaaagtacagtgatgaagaataggaaagttcttgacacatagggatgaaaataatggaagcttatcatgatccatccaattcaacacatattgattgagagcctatcatatatcagatagtgttctaggagcttgaaatacagaaatgatcaaaaagaaggaactcagaagttgtcagaacatgtttcttacctggtgtatgaggtccctattctctctctaatagtccctgcttctgtgagcttaaccaccatttcaagtgatcaaatgtcaggtcatcttcattaatgattattgttaaggatctctgtgaaaatagattaactttcaggaatcaaatataagtgactctcaaaggcgaaagacatcccactggcattcagattaaaaacttaataaactggaaaactataaaatgtgtaaatgaggttaaaagtatttaaataacaatgaatatttttctaccttaatattaaagttaataaaattgatagtaaaattcttttctctcagttgtcattttgtgtcaacacaatttatgacttgacccaagctccttgtgtgcccatagaaaaacctggccactctactgttttaagaaataacgctgtagtcatccagaagtcttacctctctaaattcatctgcagaaagtcatatactttacaccacacaactttctcccattctagtctcattttttcaagagctgccaaatctaaaggaaggataattactcacaaactataaacgaattcagtaaataatcatagaaaaatgctcagattcactaatgagcaaataaattcaaattaaaacaatgaggcatgagatatgtatttaatctaataaattagccaaacaaatcctgtttttataaagataattcccaatactatcaagaaagcaggaaaattggtaatcccatattgctgatgtcagtgttaattggcctttaaggaataaatctaacaaagtgtgtcacatgctattaattttttcatatgttttgaacaagtaactcaatttgttgtgttgtatcctaattttgaacagaagcatatgcatgaagatgttattaacaccattatgtgtattaataagaacagaaataatttaaatgtcaaacaataagaaaactcttaattctagcacattatttaagcattaaaatgtttttaaatatttttctttttaatatttaaattattttaatattaaaaatatttttcttctttttattgtttttttattgaggtaaaaaataccatctttgctattgttttcttttttctttttgagacagagtctcgctgtatcacccaggctggagtgcagtggcgggatctcagctcactgcaacctccgcctcctgggttcaagcgattctcctgcctcagcctcccgactagctgggactataggcacctgccaccacgcctggctaattttttgtatctttagtagagatggggtttcactgtgttggccaggatggtcttgatttcctgaccttggcctcccaaagtgctgggattacaggcgtcagccaccaagcccggcccaatctttactatttttatgtgtacaattcagtggtaataaatacatttatatccttcttccttttctcttatattactccattttaccttcctggcctccgataaccaccagtctactgtcaatcttcatgagatccactttttttagttctcacataggagtgagaatatgcaatgtttgcctttttgtgtttggcttatttcacttaccataataggctccagttccatccacattgctgaaaaagacaggatttcatgctttgttatggctgaattatatttcattgtatatgtacatatacaatgaaatatatatgtacatatacaatgaaatatatatgtgtgtatatatattacattttctttatccattcatctactgatgggcacttaggttgattccatattttggctattgtgaatagtgatttgggtattgtgaatatcataatatttgggttttatgaatagtgctgcaataaacatggaagtgcaaatatctctttgatatactgattacctttctctcagatatatacaccgtagtagaattgctagacaatatgaaagttctacttgtaggtttttgaggagattccataatgtcctccaagtggctatactaatttacattcccacttagcgtatgaaggttgccctttctccacatccttgccaac

SEQ ID NO: 1881561 - DNA, 4001 bp, Homo sapiens
taacgtgccattcctctccagctcccgagccccactcccacccttgccgttgaaactgtgaaaaagccgccaaagtttgggcacccagcctggcagtcggaagacagtgagataaagaatgcgatagtaagtccttaagtgcttcctagagataaggtcccggaatcctggaaaaattcagtctggcctccctacttcagcaagtcgcctcctgcttctgtcagccccctccccacacacacctggagggagaggcggtggccacaggggtagctggggcagaccctccgctcctccactcccggtggccaggggtcctaaggccacgcggctggctttcttctctgggaatcaggagatgataatgagaaaatccctcaaccattggcgcgacgaaactcaaaaatggacagccctcccttattcataaatattacttcaaatatgttaaagacgttaagtaatttttagtctctttagaatttccaacgctatagtttattatgacagataaggtttgatttgtgctagtcgcgtgccaggacactgaaggtgaaaagaaggaaaacaagaaagagtttctaaaagaatacacgtaacatttaagataactacatacaaagtgctcacttaatttctcttaaaacagttacaatgaataaattacatttccaacttaataaaatttaattctcttagtcgtttgtacaattgatggcctttggttataaaattttactttttggagaaatattgcccctctgtcaaattatagcacatgacaaataatatagcaaataataggtttgacttttaaacatacacagttatttgaaacaaaatgtttttaactttctggcagcataggcaaaacagtaaaagcacagttatattttaggaattatcttaatacattcccctctatgatatcagaacttactcctgattgaaccaaggaagaacagctaactcttcggataaaacaattttttctccttcattcccaggcatggtttggaaagcaataaatgcatatttgcaagaagtcatgaaaaatcaagattaaaaatactgtataatcttcctggtaaaacatatatacattttatatctgaccatatgaaactgtcatctataagtattacattttaatgaagcataactcctcatgatatatttatttcataacaaatggcaaaggtaatattacttatcttcaagtattttttcttttaaaagctcctcccaccaaatgagagacctctatttaaacagcaacttctattgaaatatatgatctgaaggaattcgctatttgaaagtcttttgacagctttacagattatatctgttgagttttttctctctctcttatttccacaatttacatgtgtgaatatatgggtaaccctcactaacttttcaacatcagtcacgcacattaggtagaaaaaattaattttgaaactattctttgtttttaaaatgatatatgtcattactgttaggtgagtaagctaagtgtgtttttttggaaggggaaggtaggttaatcacaatgatagagcaaatataaatagtattatgttgttggtgttaaaaggcaaaacctcttagtctgtgaagatcacctacttaccttctctccattaaaaaaagagttgaactttttggctccctgtataatgtgtgttctccatagattttatactaaatattaatattaagattatagagctaacctttttctaatgtcaaagagcttttgaacaatacaggcacaagagagaaaagacacctacctcatacattcacatcccaaatttcctatctccaatgcaacaggaataatctttttattccattaaaatggtcactaaccttataataataaaggcatgttttaatctcttacctgaaggagtcttatcaatgtaacaagaactgaaattgtgactggtccttgttgtcgtttacagtacagagatctgtactgtattgcctttgtggagggctgaagtaacaacatatgactactgcctcctgagacccttatgaaaataagatatatagctggttcaaataaatgttttaggccttgacccaggaatataattgagaaaaacaaattatttcacatacactaaaacataattaaaatgttattctaagctttgcttttgtgtgttatgttgtatgtgcatactaatgttatcctcaatcataaagctatgtaagaaatgattgtacttttaaaaatgttacgtaaacatcttttttcctaaaagtggcaaaaattaccttagaaagcagttacagtgcaactttcacttttaaaggttttcaagattgaatattttaattcataacatatttctcattgttaaaattctttggcttcctcatatctggcatttaaaatttttcagttgttttgtagactatgtatgtaaggttgcatttttcactgtcaacataaagttattgtttgctttggatttaatatgtatttggatatgtatgcatatttgtttaaaactatgaactctggggagggttttaattctatgcaacataagtcagttttatataatgaatatatacaacttcagctaataaaaagtaagattttaatcttgacaatatattcctaaaatgcattaagatattgtcaatctaaaatgagcttgatttgagaacaaaaagaataagttcttttaatgaactagtggtatattgttatatgtatatatgttttgctgattttagcaagaaaatggaaaataatccataagaaaatggaaaataatcctcctgcaaaagaaacctgaagtggattacctaataaattgttttcagcctgaattttaaggtatcacgacatagtcatgtttgttttttaaaatatcattttcaaaaatcaaagacattaatggtattctctatttcaaaactatgatcattattctgctttttgccaccaatatttatgctaggagaaacatgtttaagagtcatcaacaccttgggctcattgaccatacgaatgagtcacatggtcaaaatgaataaaatgttatttagaaaaaggaaaaatatatatatatatttatacatatgcataggtattctttttaaatgaataaaagggcttcataatttgggacagcagaaaaagggagtagcaagcatcacagcccaaagcaagaatgaaagtagcaatggtgtctagacaaaggagcaaggatatttgcttttacagttagttttatttgggatatcttggaagaaagaagggtaggctctcaatggctaaattaaattatctggatgatttgtctacacagagcaataatgacatctctttttgttgttgtttgcttttgttttgttttttgtttgtttgtttggagacagagtctcactctgttgaccagactggagttgcccgggctggagtgcagtggcatgatctcggctcactgcagcctccacttcacggattcaagagattctcctgcctcagccttctgagtagctgggattaaaggtgcccaccaccacaccagctaattttggtgtttctagtagagacaggggtttcaccattttggccaggctggtcttgaactcctgacttcaagtgatccgcctgccttggcctcccaaaatgcagagattagaggcctgagccaccgcgcccggctcctcttcctgatgtgctatgtagatacatctctaacaggaaactatagatcccccagcatttgcttttgaaataattcaaaactttcatttcagttaggaaacacattttgccaacatcatattgtctatcttttccattacattccccataacaatagtttttaaatgaagtatgcctcaacttaatgtttattattaatgtaacaactatttgttgactgtttactacaattctcggagcaccaatgactaaaacaaacaaaataaccttcccttggtagagttggggaact

SEQ ID NO: 1881562 - DNA, 4001 bp, Homo sapiens
aaacattaaaactaaaattaccatttgatccagaaatcctacttctgagtgcatatctaaaggaattgaaattagtttgttgaagagatatctgcacttccatgttcactgcaacattattcacagtagtcaagatatggaaacaacctctgtgtccattggtggatgaatggataaagaaatcagttgtgacaccatgactcatggtaatatatatacacgcaggaaagttatttagccttaaaaaaagaagaaaacctgaacatttgtgacatcatgaatggacctgaaggacattatgttaagagaaataagccagtcaacagaaggataaatactatatgatctcacgtatatgtggagtctaaaacagtcaaactcacagaaacagagtaaagggttggttatcagaggataggggaggagtaaactggggaaggattggacaaaaggtctaaagtttcagttatacaagacaaaaaatttttgaatatctcctgcacagcaaagggcctatgattaacaatgctgtattgtatactttaaaatttgttaagaagataaatcttacgttaaatgctcttaccacagaaagaaaaaacaaaacaatcaaaagagtgggagaaaactttgggaggtcatggataggattatagcattgattgtgttgacggtttcaaaggtgtattcttatctccgaacacattaagatgtatacgttaaatatctacagctttttgaacatcgatcatctcttaataaatatttttttaaataaataagcaaaataaattttctgtggattttacaataaattactcatttaaatattctgaaaagttaaaactgtctacaaaatgtacaaaaaataaatacaatttcacatttaaaaaaatgaggctcaggagattaccaacgggatagtattcagagtctcgtgagttataaaagggagtatgaattcaatttgttgcattggaaataaagggctttgggaatagaagtagcatcgtttgatttactttaaaaaacttaatatttacaatggaactttaattagattagcaggagaaacaattaggaagctgttgctgagattcatgtacaaaattgtgtagcctagacaagcaaatgtaaataaattattggatattctccctctattcaaaatagagggtcaccaaatcaactaataacatttcatgattattctagtgttctcagtaggtcaatccttatgcagaaggtaagttcactaggctcatattcagtgacaatatgtaagcctgccatagggctaattattctctactagatttatattaaataagcaactttctgattgattcctaaattaaaactttatttcaaccttagggagtgttaattcaaagatgtcaatattctaattatttcaaaagtaacattacttttggtaagtgtttaaactggcattttgatctgtatatcaacttttgatgagatggttagaatgattcaatgctactgaatccaatcaactctcagtaaactagcactaattctatactacattgacttaaagagtatatggggcttttattaaatagcaaagcatctcaacaatatgtgtaaaatatcccaggttttagatcattggtagtaacaactgaggaaatgtaaaaaagctaactaaataaaagaggcacctttatcattatactgaaattgatctttctgttgcttaggcaatgtacacatattttgaaaaaatagaataaatgtgccttaaaaatagctccatggtagtgaacaaaagaaaactagacaatgaaccaaaagccccagattgaaatttgataccttctgcttactggatatgagggcttgtaaccgtcacttaaccacactggtctacaattgctttctcttgaaaagtaagtattaagcatgatgaagatcgatatcccattaagctccgaagtcccatgtcctatataatgtgaagtagaatccattagtgcaagaaagcaataataaaggccacgaaaggtaaagctgagatgtggccatgtcacaatccagcacagttgtatatgaatgggctgatcatctaatcgtcagccacagaaggttccccctaccccaaaaacacattcactcgcctacccattcaatcagtactattactctgaaaagagtacgatttacaagacagctaccaaaaatatgtagatgcataatattctgtttgaccttatagaaattaaaacaaacaatataaatatccctcaacaaaaatacactagaaaattaaacatcaaacgttaactgaaagaaacagagcaccacaatcactcaattttaaatatacctaattagtctagttcccaatgcactgtaacaacttccttcatttactaatagagaaaatacatattgtgtttccaatgtgataattaatgcacccaacgaatactgagtatctattatatgctaagtgttgtgctaaatagtggccattgtcctcactctagtgaaaaagtcaaacaaataaatgaggaggatgataacaaagagtgacaagtaatttgaagacaataattatggtgttatgaaaaatgagtattacgaggattccagccattctttcatatgaactttatatttaaaaaggattagatccatactaatttcatatccgtactaattttataaagtatatttctatgttttatgttaactacaagttgaaatagttaaaattatcctggcttttaagccattgtgtaatttaattttccagattactctaaagagagttttaatattatctattaatttactgacttaaacatacattgtctccatcaagccagagaataaatctgcaagatcatttaatctaattttctcaataaatatactttaaatatatatatatatataaagatattttttaaagaggataccttttctcaaagtacccagtcagtggttaagcagagcaaggaatccacgtattcttgaaataaagttttgaagttttttaatgcgtacgtttttaaacaattattactgctattcaaagaatcgccaactaaaaagcttttgtgcttagtgagatttcaaaagattcatcgtgaataattaagttgataaaaatggtatgaatcttctccaggtacaaatattcctgggcagaatcaatggtgtcccttatgaaacttctggcagtttatgatttaaatcagaaaaccactatgtgaaaagagacaagtataataaaaacatctagaaataaatccaggaaactctttattgtcactgaatgtaaataaaacttttttactaaagtgtagagagagagatttttcatatgagagggttggaaggtggtgacttatgctttccagttaaacagagaatttcaggaataaccaacgtgtcaagatgaggaatcatttttgacatgtcattagactaagttaagagatgaaagtagggatttcagaataaatatctgaggaagttttggggaaaatctaagattcaaggaatgaacatttgatcatggctgatagtaaataagagccactataaagatcaaagaagttttaatttttaaaaaacttctattactttgaaatacataaacaacacaacacacacacacacacacacacacacacacacacacttttcttttccagtcttccatccaaaacccaaagtaaataaatgtgggaggggaggaaaacagggacagagaaggagagggggaaaagaatagagaaagagaaggacagaaagctgacatgacggagaaaagatggaccttatagtaccatgtgatctagctgttcttctcacttaaacttactgtgaagatgtaaaacgggaaagaccaaaaaaaaaaaaaatggtgggaagccttgcgtctctagcagccatctctttagacttcacaccttcatctttttagaacccttactattacttaaggaaacccaacttaaatc

SEQ ID NO: 1881563 - DNA, 4001 bp, Homo sapiens
gagcttaatactttctacacatttgacttaactttttattggcatggcagtttcaatccaatgcataaccagaagaaataaacacgatatgttactagcagtaaacagagggattaaacatatgagcttaaaattttttagcacatatgagttggaaattaaagagactgaaatatatttttataatgagatcaaattacttaaaccagagtcaataactgttatactgtaaacaaatacaatcatttatttgtagctttataaattcttttatgtcaatgctaattttactgatgactgtttagggcttatgaggactgctcaggttatatgattaataactaaatatgaccacaggttgtggtatcaaagcatcaatttgatttaaaaaataggctccccataaatattttaataaatggaagtatttctgggagtgtagaaggacaatatgtcaattttcagaaggcataaaagccacaaaatatttggaaactagtttgctcatgttacagaaaagtgtgtgtctgtgtgtgcgtgtgtgtgtgaataaatgggtaaaatatgaatgtctctattttgtaataaatattgcttctgtatgttttagatgagtgctttcattctgatacaatcattttgttagtagtctccatctattaagtaagagaaaattgaatctcttctctgttatgtggatgaagatgatgactgcagtcaatttctgagttcaattttaaatatgcaaatttaaccttttataaattgctcttactttacatatagggacatttataacaatacatccaacagtctacaaattaatgtcaaataatgaagcaagctccaaattgtgtgactgccaccagttgactgggtggcatatggcaagtcacttaacctctgagaccttaattttcctatttgcaatgctaaggagtggtgctagagttccatgtctatgcttctactaattttagatgcatttcttaaaactgatatcttcaagagtaatgtaaaaacattattaaattcttgtcatcttgctagaacaagaatatcttttctatctatacattttatttatctctacttgttttaataaagcccatctgccatctgatttatttattaaataaactcatctgagaatcaattttattttacctaatagatagagcctatgcataacatgattataaattgtgaaaaaaatggaactctagtccaaaagacataggaaaaggattggccagaaaataggtacattcatattgtatttattatttctttttttctttattctctctctctcatacacacaaccactccccattaaagcaaactttaattgtaaatatagtaaatacccaagtgaagctaaaacattttgtatgttatatatctaaaggattagtttaaatatttgtttcaacctagtgctaacatttatgctctctttttttcctccctaaaagaacgaacaaaatattttttaggcaatgaatagataatttcatcatgttgcaaagtcctttaattcatggcatttgccgttcttggttttcaaatgaagactttttaaaacaataacgaaaaggatatacaactttccctatgccttcataaatttccattgtacaatataaaattaaaatcgtgttgagatagagtgacttccattttggagaatatggtatccttatatcatgtacaccccggtgtcatttgattttgtagtgaaagagaagctaaaatatattgacttcaggcatttttgatagaaaatacactcataaagataacagtaactaaggcagaggataaaaagaatcatacttgtgatacttaatagcattttagtattttaaaaactgatggtgatcttactgcaagcatctctacagggcagtctcaggaaatctcattaatgtgttagcccctttattttgctggtgaatttgttgacagaaagtaattgggtcactgtattgaaatgccccatgtaagctcagaattctctgtgttggttggcatgacaaccatagtggtcgattaaacatgctcagaaattgggaacctgggcttctcagaagctgttaactagatggggaataaaaaactgtgtagataatggcaaattgggcagaaatttctaagaattgccttgaatgtgctattacacatttatttatgtagtgctaacaagataaatgtatgtgtaaaaagctagatatttaaaaattcacttagatgattacgaaatacggttttgatttgatgtgtatttcaataagaaaaggttgaaacagccttacagtattaaggatgttattagagataattctgatattactcagaacaaatatatttgctatcaatggcaatttctatttagctctttctccttgtaaatgattttgtgaggtgcctggcagatgatatccgcagatggcatacaaaggcacattggcacacaggaacagcctttgctggccagttctgccatagccaaatttagggagcaggaagatggtaaaacgacaaatcattaaggagagaaatagagagttggtttgatggtatcactcactaatatcttttttcttctatattttaactcccttcctttggccggtagataactgttaacataaagacaaaatttggagatagaaaattaaagcaagttatcatgtcctaggacacaattcatgttttttttgttattcatgttccctgatttctcatacctcagaagacatttagcctaggagaaggaattgactttctaggaagtattattttttaaagtcagcctgcttttatcaggataataaaataataaaaacaagataaattgaacataatggatttacagcttctgcaatgagtttagttgccaagacaatcaacatgtgagatcaatgaaggggacatgttttaattttattatttcttattagtgtgctgatattaaaattcaaacatggatgttttgattaatcaagaagctgaatatggatatcaactataaaaataaatattttaaatagaacacatttattccaaaagtctattgttgaaataaattttaaaaatcattattcattatagcacttttaaaaagaagacgtattaaatatcatctttgttctgcaaaagtaaattaactttgtaagattaggaactaattagtgatagaactgggcctaaaaccctgctggcctcattcaaatgcagactctttttacagcaccatggtgtcttctaatcccactaccaagtacactgtggtcaaaacacgttaacttcctacttccaggagatgttcatttagtgtaaatgaaaccagcagtgtttcattttcatattcctcattttctttctttatcataattccttgtatggagctatggctctaatttattacattatgaaccagtttttgtttgcttaaatttttagatagccttattaatgtcttcattctatttatatgtctgatttgttcattaagaactattaaagggtggataggtttaagtatttgcccatcattggctggtattttaaaatttacttccgaaacaaaatccacttctgaaattcccctgtaacactatagatgcatgattctgtaaaattttcattttctgctatgcaaataattaacagtaataaaatctagtttcagtttagtttataactgtctcttacattaaattttctaggtttggggataagggttttgtctgtgttgtatttgcatctgtatgatgctttgattgctttgattaaagcttttcaagtattgggattcaaaactgttatttaaaaaaaatcagtagtctgtatatttctacttttatttctattaataaaacagactgaatataccttgccaatttaaagaaatttctttgagaaacaactgactgttttccttgatttcaggattgaaaatacatgtatctcttactgttccttttgtttttctt

SEQ ID NO: 1881564 - DNA, 4001 bp, Homo sapiens
gaaaaaaaataagacatgacctctgaaatcaaattagtccattatagtaaaaaatactgcatagaaaagttacaaaaatggacattactcccaattttttgttaatgctttatagtatggtcctgaattaattcaacaattgaatatttttaattttcgtttttaatagcttatagcatataatatttgggatgccagatgtcaatattttagcaatatttacaatagtttacaatatttacaataatttagcaatattggcaataattactttgaatagaaaatttgcttctcaccagcaattgtgtaagtaatagattacaatttgctttctgtaaaaaaaaaggcaaaattaaacaaaaaaatcactagtgtagttttcaatgatactgtcatttgtatttgaataaaggatgggacaactttccatttctttttccagaaatgacagtaatagtgaaaggaggaagagtaaatattctcaaatttaccccccaatcttttgatgtgtaattgtttgaatgttttgacccatagaagaagaattcttgatgtgctttgaaggattttacaattttatatggattagtggtaggggaataaaagagaattggtcagctttcataaagcagtttatatgaagaagtagatgagtgaagtgaatgtaaagctaagcagatgaatgtcacggatttgttctgagaaatgtggcgttgggcaattttgtccttgtgcaaacatcatagagtgtagttttacaaacccagatggtagaccctactatacccctagactatacagtatagcctagtgctcctagactaaaaacctggatagcatgttactgtactgaataatgtaggcaactggaacacaatgatatgtattcgtgtatctaaacatatctgaacatagaaaaggcatagtaaaaatatgctataaaagataaaaaaaaatggtacacctgtatagggcacttaccatgaatggagcttgcaagattggaagtttctctgggtgagtcagtgagggagttgtgagtgagtatgaaggtctaagacattactatatacaactgtaaactttatgaacactgtacacttaggctatactaaataaacaaatatatttttaaataagataaccttagcttactgtaatttatattttataaactttaaaaaattttttgactcttgtaaaaagtttaagacacaaagatattgtatagctgtacaaaagtatttctttctttatatattaattgtataagctttttttcttttaaaaattaggccggatgtagtggctcatgcctgtaatcccagcactttgggaggctgaggcaggcggatcacaaggtctagagttccagacctgcctggccaaaaattagctgggtgtggtagtacgcgcctgtaattccagctgcttacgaggctgaggcgggagaatcgcttgaacccgggaggcggaggttgccgtgagccgagattgcgccactgcactctggcctgggcgacagagcaagactccgtttaaaaaaaaaaaaaattattgttttttaacttcttaaactttttgttaaaaactatgacataatcatacacattagcctaggcctacacaaggtcaagatcatcaatcttccatcttcacatgtcctactggaaggtcttcagggttaatagcacacatggagctgtcttcagctccatcctaaggtaacaatgtcttcttccagaatacctcctgaaagacttacgtgagggtgttttacagttaactgctttttttcgataagtacaaggtatacattctaaaatagtaataaataagtatattatagtaaaatacatacaccatgtattagttcgttttcacgctgctgataaagacatacctgaaactgggaacaaataaaggtttaactggacttacagttccacatcgctgtggaggtctcagaatcatggcgggaggcgtatggctcttcttacattgcggcagcaagagaaaatgaggaagaaccgaaagcggaaacccctgataaacccatcagatctcatgagacttattcactatcgcgagaatagcaggggaaggaccggccagtgatttaattacctccctctggctccctcccacaatacgtgggaattctgggagatacaattcaagttgagatttcggtggggacacatctaaaccatatcacaccggtaacatggttatttattatcattatcaagtattatgtcctgtatataattgcatgtgctatactgtcatgcaactgacgggtcagtaggtttgtttatactaacatcagcacaggcacgtgagtaatgcattgtgctatgatggctaggatggctacatcatcagcaaataaaaggaattttcagctctgttataacctaatgggaccagcatcatatatgcaattcttcattgacagaaatgttgttatgaggtgcatgactgtagttggactccacaaattgaaaaacatgatataaagaccataaaatccatgagaatgtgaatgagtcaatggcagagagtaagaggtaataattgtttaaataataaagcaaattatttaaattcagtaatttttaagtatagaagtcctattgcttaacttagaaaatttttaagtaaaaattatgaagataaagaaaaaaaattagcaattatcctatccctgtaatgtaatctccattaacatttaggggtttgttcctccatggatatttctatttagcacagaataagtaattttttcctgtattttataaaagtggcatctatctttagctgcagtttgagttcagattatttcacttatttttctccaacaagttttttataagtggcttaactttgctgtaaccatcccttataatctttcttattggaaggaaatactacaaagctttgtgattgttgcaagtttgggtataattgcagttatgagagcaaatcttaatgtaaaaaaagaaacttcatttttatatttaaatattaacccagtgggttatgatctgagttacttcaagtttcttggtgttacaacctaactacctaatttgtttttcagatttatgatgctttttgagtaactattgatagcctccaagagttaaagatagctagtggctggatattttctcttcaaaaactttactatcatgagctgtgctataacaaaacccaagtcacagattatattctgacatatttgttagcaagcaaacatgtgtgcactccatacacgtgtgtggacacagctgtgcaatcttttctgcaatcctgacgaagtctctcatttctgacttttttagacaatcaggtaaattcttggtgtggacaatttttttcagcattcaattatcatttaaaaattatcctgtgacaaaatattttgctattttgatccaagagaatgcggggttctaagcctaagactccattctgatgagggcttctggtttcactagacctttaacttatcagaattgaagtttctgcaagtatttttccttatctgcatatttttactactgatcattaccaacaaaaaatcatttctaacattcattatgttaatttataagccccttaatgttgattggacataaaaagagttgtagcatttatttctggaggaaagtttttaattagatcttttaatactaaatcagaccagtatggagatgatcaatatctatatccatatctatatctatatctatatctctcatctacatctacattttgtcaacacctttatttatgcctatacacatatgcattctctatattaaaacatcttaaattgtaaataatataaaaactgagagtttatttttggtactttaggctaattgacatcttcgttcacaaagtccattgtggacaatcagaaataaggtgatgctgttcctaagattgtccaaggatctcctgttaacttgaattaagggaaattccac

SEQ ID NO: 1881565 - DNA, 4001 bp, Homo sapiens
agtgggggggtgggattttgactggagagcttcatgtacttgagatataatttatatttctgccctgttatttttctgctgatttgagtgctctgcatacatggatatggtagtaggggtcatttatttttatttttattttgtgagacagggcctccgtgttgcctaggctggagtgcagtggcatgatcatagctcactgcagtctcaacctccctgggctcaagtgatcatcccatttcagcctgttgagtagctggaattacaggtgcacgccaccacaccctgctaatttttgtattttttgtagagacaaggtctccctgtgttacccagtttggtctcgaactcctgggctcaagtgatcctcccactttggcctcccaaagtgctgggattacaagtgtgagccactacacccagcagtcgggatcatttagatagtaactggcagaacagggctacaatctgaatttgggattcatgcttctctgttcttacaccatgctgcctaaacttgtagtgataattccaaggaaaagttctttagattatctgtgatgtgctcaggtctttaaaaagcgcactttgaagaatgcagataaggcaaaaggagtgtttttatatacttttgcattatctttttctccatgtgatcgtcaacagtttctactaagaatttctctactgaatgtctgtactgagaaagtcatgtaatacaatgtgacaaacttaaattttatttttctgcagtttctacagcagtataatcactacaaatccaatgtggagattttcaaattgcaaccaaataaacccagcaaagaactagcagagctggtgatgtttatggcacaggtaagaatataattgcttaaataaagaccagtattaacacacagtttgctgaatgttttttcactaatactcaaccttattccactctggaatgggaacttaattaaaatatttttctaactttccctttttgcaaattttattttctccctatcatgagttagagaatgtcactagatctttttgcataactaaccaggacaaaactttaagactattttttttcttcaaattcatcataaaagcaggtactaaatcatgccataaatattactaagactagagaaaccatgataaatgttggagaaattaacatgtagaaggaaaagaaggttgtttggaaccatctacttctatgaaacatagccttttactctcgttttgcagaacatcctaaatgtatgcatctgaattataggagagaaagagagcaacttcagaagagcctttgctttgttacagattagtcactgctacccagagtacctaagtaattttcctcaagaggtgaaagatcttctctcctgcaatcataccgtattggatccagatctgcgaatggtaggaccagtagttggatgaataaattgtgctgtgttcatgtgtgctgcgttcatatatatttaaatgagaacagcctctaagctaattatcttcagaaaacgtaaattataatgtattatcctttcctaaaaatccttctatggcttctcatttatacttagagtaaaacggaaacttaataacctggctcaaaagtgcctgcatgatctgcttccagcctgtgtttctgatatcatattgttttcagctacactgtgatctttctattcttccagcacactaaccctacaggatgctctttaaccttttgagatgatttcttctagtcattcaaatctcatatgcatgtagaatcctaatcacaacttgtcatttttataatgccttaaattagtaaacttacccattagacagtcagtttgagcatttcatcattgtccttttagtggttggggttgagtcctggctgacattcccttcacgaggccggtgtacctgtttgccccacttgttgtgaatgtcagctgctggtggccctcagctgccctttctctgcaacattgtcctcagctaaatcggagtcctagtgcctgggaggtgtcctcctaccctagtagcccacagcccattatcatgtggtacaaaagcccagcccattacctcagggtggctctgactccaatgcaggatgtgctccagtgttttcctgtgttgggactaaagctagtctccagtcaagggcacatccttgctttgctttgcgtgtctctgcactatcctccttccttcacttcctttctgagatcatacccccaacaaatcacttgtaataaatcagtctctgcttctagggactaagacatttccaaatttaatacatctgcttttcaaacctctttacagcagataagtacgcaaatatgatcacaaaacgtactaatatcctatagcacaacttgtagaaatgccaagtctttagatgaatatttgttttcttttagactttctcaggttttttgtatttctatcatttttatactactttaggattttagtaatttgattaggccaaaaagaaaaagaatactgtctcagacaagccaaggtttcaggccctgggttgtcaactgattgatactcagctggtacatgggacctggcagtatagcccaagggactccaaacttgaacccctagtctaaaggcttttacctatgtcatgttactcttgaagtccttgtaggtcatagagatttgatattttgagtatagagacttaatggctttccaagtaattaggatttctttaagttttattttcctggcagtaccccaccaaactggtctgtgggcattattaaattaatatatatgccaggtgcacctgtagtcccggcttcttgggaggctgaggcaggaggattgcttgaggtcaggagtttgaggctgaggtgtggtatgagcatgcctgtgaatagccactacactgcagcctaggcaacatagcaagatcccacctctaaatttttttttaaatggaaaaaaatgtgtatgtatatttctttatagtgctttatgatgattagtaggtttttaaaaaataataaagatttccgccaggcgcggtggctcacgcctgtaatcccagcactttgggaggccgaggcaggaggatcacctgaggtcgggagttcgagaccagcctgacctacatggagaaaccctgtctctactaaaaatacaaaataagccgggcatggtggtgcgtgcctgtaatcccagctacttgggaggctcagtcaggagaattgcttgaacctgggaggcggaggttgcagtgagccgagatcgcgccattgcactccagcctctgtctcaaaaaaaaaaaataataataataatagagatttcctttactaggagataaaggattgcgtctgtatagttagcattgctctttagaggaagcattgaacacactggaagaagctctttttaattggttattgggataaccaacaattcttatcagccactgggctatctttctacctggtgtatttgctatttttccaagactttttgaatcattcccaagattttgttcactctgtcctgcttacacagatagaaacattgtattttttttggaagaaataaaatatccatatatagtaattcttacctacttagtcaaatcaataaaagtcaagttatatgtatttcattgacattataactacctttttatgtactttaaaacttttttttagtattattattttaattactttatgttcagattgtcaccaccttgccaggggaagcttcttagtccttttagcaatttccctgaatttttttttttttttttttttttttttttctgagacagggtctgtcactcagctgcccaggctggagtacagtggtacgatcttagctcaccgcagcctcaagcttctgggctcaagcagtcctcccacctcagcgtgccaagtagctaggaccacaaggtgtgtgccaccacacccagctaattttttttttttttgtgtagagacaaggtctcactacat

SEQ ID NO: 1881566 - DNA, 4001 bp, Homo sapiens
ttatatttctaacagaccacagtgacagtttgtggaaaatggaaggttgcaagtgtgaaagtgagcaagtgaaagtcattctctgctgcaggagagtgacataagctggccttgcttgacttcaaaatagttttcagtgtgatcaattcaccatttccatgtggaggaggtctgttgttcagactctttgggggctaaaaaaggttctttatgatgagagctggtaagtcaatgaaacagagcccaactccaagttggatcatggggtgatgcagcagaagactccaaaagtcacagatgaaagaagtttgcgccaaatttagaataaagagatttagaaggctgctggtcggtttgaggcacagatttcagatggcacaggaggagatagcaagcagtgttggacaggtcttcatgtaaggaaggagccaggacccgctcttaccagaaacccgagctctgccatttgatttctattaatgccatgtaagtctctccatccccgaggtaatttgacacagtctgggaaggctcctgctctctaggagctgggcttttgcaagagatgctgcagacagaaaaactatgttagacctgtgcacatgttgatatctgtgtgtgtatatacatacatacatatatatgaccattttaatttatttaatttatgaatcatttttctataatacaaatttcttgcaaaatataatgctatagcctacgagttcttacaaagtcacaaacaagaactagcgacatgtacttgacataacgtgaagtcctgtgctctgtgctctctgcggggagagatgaggtgattcttcagaagctgatcaaaattccctgcctccctcagggtagctgagcctcggaacagcgggagcactgcgccatctggtgggcagatgcactgcatcaacgttcattagcagaggcttttacacacacacacacacacacacacacacacacacaaatgcttttcaaggaagactcgagaacaaatcccgaagctgagtgacaactacaaaataccatcaattaaagatattatctggtaagtttcacaacagattataaatgaacaggattgaaatgtggtaccactgtaaatctttaatttttcagttgtatatataatatctgatagttaatgggtgtgtaccctgtgccaggtaggtgctagtctatgtactttacatgcattaacatatgtcatcctcacaacaatcctataagataggcactatttccatcccgttttacaggtgaggaaactgaaacagagaggttcagtaacttgcccaaagttacacaagttggtacgtggcaaagcaagaatttaacaatgttcttaagctcttaggcactaggctaggctgcttctctgatatatacaatgtagcaccgtgagattgggtgtcattaagcaagaggtcagaaaacaggattttgaaaagcatgttctgaaagtgtaagattcctttttcaaattgcttccccaagcaaaagaatgcaaaactctgagcttcctataagtcagaacctttacaaaaagcaagtttttgaagactgctttacaaaaaaaagcacccttattagaatcaccgaatttggaagtaaagggcaagatcccttgatgatcataattgtggtagttaattttatgtgttgacttactgggccacaaaattctcagatacttggtcaaacataattctaagtgtgtctataagggtgtttctcgatgaaattagtatttgaattgagagactgagtgaagcagattgcattcctaaatgtggcagacctcatccaataggtcaaaagactgagtagaacacaacgactcacccttccttgagtgagaacaagagggaactccctctgcctgactgctttgagatgggacatcagtcttttcctgccttcagactcaaactgaaatattggctcttcttgggtctccagcttgccaactgcatatcttaggacattctattggctgtttctctagaaaacccttactaatgtgatggctcattatgtcatcatcacattgtcatcatcattgtggtcaccctcaacatcaccatcatcatcttctctaccacacactgagtgtcctccctttcaggcacagtgttcagtgctctgagactgtgtgagtaaaagtgcttattttacagatgagtaaacggaggttcagtgaacttggaacatgtacccaacacctcaccaacagtcaatggtacaggtaagaccatggttatcaacagcccagtgcatttttctctatgccaagtgacatctcccactagatggaacagtcatcaacaactaacatttggaaggatgatggcatgttttccatcttcagatatcttattaactctaattttcttgaaaagtgctttctcattcctttgaaagccattattttccttcttttccagggtgacatgttgtcattttagcttggttacttttgaggcagtttaatctgattttgctaggaaccagttattcttcttacatctgtttgaccattcatcaactaacaggcattttccacaactgcagatacaaaagagacaagaaaaagtgcagctcaccttaaataccctgattcatctgagctgggcatgattcagctactcaagatattgaatttgggaaatatgtgtgtcttcagactttttcctctctctgtatgggagagggctggcaagtcgggcaccagagggatcaactcatgcacaaggctgctgcagcctgcataaaagtgtgcaagtagacctggttgcaaaggacaagagggtgtggggcatcaacccctcccatgacaacttccaaaggaaaaatagactataattatcagaaacccaattgccctattaaaatacatgaaataactacaaaaattgtgaaattgaagtcatggggtttttttaataacagtaaaaaatatttgtatccagaaagaaaatttaaacctagcaagatatatctaagtaaactgtgcccttcccacccctaagccccaacatgttaatcagatgtgcagtcccagaggcaggacctcttggcccatggtgagttcaccttggacagactcctttgaagagataagctatctaggataagaagagaacttgctggaaatagccagataaataacagtagattgtagcctatctgccaggaagcacactttttccccagccatttgcaggaagagaagtaggttgctatgccattacaagtcattttctctcccgggttacgccagcccatgctcctttttcattccaattgctgcatttctagaggatcatactgccatttttctcttctctgtctaatgccaatcgcacttctgggctgttgcccccactgctgatggtgttaatctccatgggaaccaatgtgactcacagggtcaatgtgtgcttggcaagtcctgttatgatcattgccagcgtgttaccagcaatggcagcataatcctcagtgatcacatttttgttttgtgaattttgccggtgagtcatgcagcttaaaggcaatagcctcaaaggaaatcttagcttagcactttggtgtaaatcctatcacagccaccttctatgcaagccgcattccagcatcccccttttcagaagtcatggagtccactatttgctcaggaattatgttttcttggactttttctgtatctattatcctggtttggcatcaggcattctgtctatagacaataggaactatttaatgggaatagcaatgcccatggaaataatgactctccttttcaataaggtattctcatttttctgttgttgttgtgatggtagtggtggtggttttcgttataacatgaaatctaccctgtggcctcttataggatgaatccaatgaaaggaagctatttggtcaactgaaagttgtcttacaaagtttgagtttctaaagataagctagagatcaccgaatccaac

SEQ ID NO: 1881567 - DNA, 4001 bp, Homo sapiens
gtaaagtgaaatttgatttacatattttaatctttttagtatatcttataaaacaaacctgccttactcaagaagcatttgattttctacaattaacatcacaatcccctacagagttttcatagtataaaggagtcactgatgtataattaagaaatggagcagagaaagggtatgttggtccttttggtggcaagcctctgagtcaggctgtgaaacactttctacttgaacactctaggccacaaaaaacacattttaaaaactgtatttaagaagcactttatctattttaacatctagggggaaacggcatattggaatgtgttcaaaaactcattttaggcatcacccagatggttggttctagtccaagacgagtcaagtcttttcatgaataatgcttttacgacatgtaccttggattctaacgatatgcattttgtgaaaacgtcttcagatttcagagaattaaaattcaaagcaaatacgttctttaactttttggggggtcaatttcattgaaacccagatggctttatggaatttaaaggaggtaaggaatagtaaaggagtcacatatagaatttaagcttttataaagctgttctcagtgggaggaaaaaaaacccccaaaaccctgcaaggctgattgttgacagattcatgcctctgtcaatcacaatatacaatgtaactaatatctgtcaagcagggagtagggaccattttatccttaagtgtaagtgacaccagcagtgtttccatttacaattcatgcaacccatccagcagtttatcaaggacagaccatgatgacacagtgcctggccgtgtggccccagggggttcagatatgaagtcattttcaagaagattgcttagcctgcatctctggagagtctcccattgtaacataacccagtcacagatgttacaaattaataattcatcctaatttctaagggtgtttttttttttacttaaagctggagaggccctagttttttttgttaaccaaggaaatctgtttttaatataatactaatagagtagattcaccagaggggatttctatgttgacagcaaatatgaaaatttagtatcattaaaaataaatggtaaattagacgtatttatagcagccacaggcaattgctacagaatatatagatgggggctcaaatccagtaataattaacacacaattcaaatttgaaaaactcatcttttcaaacaccctggaaaggatttgctgtatctcagcatttgcagacagcagcacagtttataaaggactctttattcatacctggcaaacaaatgtgtctctgtgatgtgtgaaaattctcaaatgtgaaagtgattaacgagagtaatgggatctatttagcgctaagaaatgcatgtgatttaccagcatagcttggactaatgacccatcaacttggtcctgacaacagccaatcactactgcatcatttttgacagtgtccagagttctaggaccagctgtcccacaaactgtccccataatctttgaaaaaaacaggctaaatctgtcatgcagtttaggagttgatttgggagttttgcatgtagcagggggtaaggaagggagaatcagaatttcccatcaccaagtaattgatctgatgtatttgttgaaacttagacggttgaactcctagaacaaatggccctgattgtgcaatgttccaatggcatttcttgctttagcttaaatcactcagaacatttatagaggcagccattgcctttaagcctcttcttgtgttctgataagaaaacgagggtgggaataacaccaacatactagagttcattaagagttaactaatgagaactgtaaagcatgatatagattcagaacggagtgtacagattaacgacaatgaaaataataatatgacttacgtacctggcagttatgcagtatggaaggtaagagtggaagtagtttctgcccccacacatggtgatgaatccactaagcatgagatttgactgtgacatcctcctgaactacaaacattgtgattcatcataaagtcacctgttagtcacagtgctttggtatttgatccagtggccttttgcactgtgactctaacctgccatctttcacaaagctgaggtgtttgaggctgggatgagggtgtagtgtggagcacctttgcccttagtcagattgcctgtggtgccgatgagaaggcatattcccaggcaccaccccacacttactgaatcggaaactcaagttggggcccccagatccacacctaacactctaatggtgggatttttatgcttattaaagtctaagaagcactggtttagttatgaatgtttagagtttgcaaccgtctgcctctttctttgggaattttccattttaatcacttttttcaagtctagtctttcttgtagtccttaccaacactcgcataaaccaggatttttttttttcctgtcatcctaacggttaaatccagagccataagaaagttgaaataattgtagatttcgctacagtttatgaaccattgagctaaaggtggggcagccaggtgttgtacaaagttcactagtccaaagtctggagattagggcttgtggttctgcctctgtcactctaccagctgtcaatgaattgtggtaggctttagcatatcatctcttcatctacaaaataatggagtggtgggccatatctctatgagctctttcaacatttaaatcatagaattctatatgattggctcacccaaatagaaataacttctgttgtttttcattttgtagtatctggttctttgaaaataaccaatcaggtgctacatgcccgaatggctgactgggcccacctgatccaggtgtgcttgccttaaaacttctgaggtgttctaaactcttgtacttggaaaacaaagattaactagtaacaacataaataactaactgtaaacaattttttaaccgacacacttggtacatagtcacataatgcacagaggtgtgtgtgtgtgtgtgtgtgtgtgtgtgtgtgtgtgtgtactatacatctggttgtatatcatcagtacttccaatacttctttttaatgaggatttcatttgctttttgcaagatacttataaagaagatttgtagctgcaaattaaaggctctaaggaagtcattgccttccttcattttctttgtcctctgtcactttggaatttccttctggttttatatattgtatttacaggtactcaggctctagcattttgctagattatcacagaatgaacattttgtttacagtaaaaatgggctacaactcattaccaggttatgaaaccaatttagaggaacatttaaaaaatcagaatagtaagtataagtattattttgaaaaatgtttcaattttgtataaatatgtgtacctgctcttgtgtgtgtattgggagtacatgcagaatgtatttcttactgttggtcagaattaaaacatgcttgaaaaccattgctctgcaggatagggtctatggcttcttggtcctctaagggacacctttgcaatgtaaccacaaggacaataaccacactatttgcatttctctttttggtctcagtgaccaccctggcttgactggttgcactccccagttggcaaacactgggcagtctagcatcacagtcagtacttaccactatatatttttggtctgacctatttccacagccttttctgatctatgaagttactgtcaacacactgggaggtattatttatcttcctcccatggttttgggtgacaaagaatcatccgtggagaaaaataccactaggaaggttgtcccttaaaaaataacaaaggtcttcctcagtatcccctttcaagcttttccccctttgaagttattcggttgttaggaattaaagccacacctctgcacacatcaaaggcttcataataactgaagaacagc

SEQ ID NO: 1881568 - DNA, 4001 bp, Homo sapiens
acaaaaccagtctcaacaaattttttaattgaaattatatcaagtgttttctcaaactacagtggaatgaatctagaaataaataacaagaaaaactttagaaactgtaaaaatacatggaaattaaataagacattcctgaatgaccattgggtcaaggaagaaattaaggagaaaatgtttaaaaaaaatgtcttggagcaaataaacaccaaaatgcaacacatcaaaacctatcagacatagcaaatgcagtgctaagagagaagtatatagcaataaacaccttcataaaaaagttgaaagatttcaaatagtctaatgatgtaccttaaaaaactagaaaagcaagaacaagctaaatctgaaattagtggaaggaaagaaataataaagttcagagaagagctaaaccaaatataaactaagaagaatacaagagatcaacaaaataagttggttttttaaaaggtaaacaaaattggtaaaccactagatagactagccaagaaaaagagaagacgcaaataactaaatcagaatgaaaaaagaatacattacaactgataccacagaaatgcaaaagatcatcagagactattatgagcaactatacactaacaaactggaaaatcaagaggaattggataaattcctggacacatacaacctaccaagattgaaacaagaagaaatagaaaaactgaaaagaccaataacaagtggtaagattgaatcagtaattaaatgtctcccaataagaaaagcctagaaccagatagctttattacagaattctaccaaacttacaaagaagaactaacacaacttcttctcaaaatatttttttaaattggggagaaaataattctccctaactcattataagaggctagcatcatcctgaacccaaaactaaataaggacacacacacaaaaaagaaaattacacatcaatatgcccgatgaacatagatgcaaaagttcttaccaaaatactagcaaactgaattcaacagcacattttaaaaaaccatgattaagcaggatttattctagggatagaaaaatggttcaacataggcaaatcaataaatgtgacacattgcatcaacagaatgaaggacaaaaaccatatgaacacctcaatagatgcagaaaaagcatttgataaaattcagtatctcctcatgataaaaactctcaacaaactaggcatagaagaaacacaactcgacataataaagaccatataaaacaaacccaaagctaacattattctaaatggggaaaagccaaaaccctttcctctaagagctagaacaagacaaggatgcccagtttcagcatttctattcaacatagtactggaagttttagctagagcaatcaggcaagaaaaagaaaggcattcaaattggaaaagagaaattcaaaatgtccctctctgaagctgacatgaccttatacatatgaaaacctaaagacttctttaaaaaactcttagatctcataaataaattagtaaaaatttgcagaatgcaaaatcaacatacaaaactcagtagagtttttgtacacaactaacgaactagctgagaaagaaatcaaggaggagccaagatggctgaataggaacagctccagtctacagctcccagcgtgagcgacacagaagacgggtgatttctgcatttccatctgaggtaccgggttcatctcactagggagtgccagacagtgggcgcaggtcagtcggtgcgcgcaccgtgtgcgagcccaagcagggtgaggcattgcctcacttgggaagcacaaggggtcagggagttccctttccaagtcaaagaaaggggtgacggacggcacctggaaaatggggtcactcccaccggaatattgcgcttttcggaccggcttaaaaaacggcgcaccacgagattataacccccacctggctcggaggctcctacgcccacggagtctcgctgatttctagcacagcagtctgagatcaaactgcaaggcggcagcaaggctgggggaggggcgcccgccattgcccaggcttgcttaggtaaacaaagcagccgggaagctccaactgggtggagcccaccacagctcaaggaggcctgcctgcctctgtaggctccacctctgggggcagggcacagacaaacaaaaagacagcagtaacctctgcagacttaaatgcccctgtctgacagctttgaagagagcagtggttctcccagcacgcagctggagatctgagaacgggcagactgcctcctcaagtgggtccctgacccctgacccccgagcagcctaactgggaggcaccccccagcaggggcacactgacacctcacacggcagggtattccaacagacctgcagctgagggtcctgtctgttagaaggaaaactaacaaacagaaaggacatccacaccaaaaacccatctgtacatcaccatcatcaaagaccaaaagtagataaaaccacaaagatggggaaaaaacagaacagaaaaccagggaactctaaaacgcagagcgcctctcctcctccaaaggaactcagttcctcaccagcaacagaacaaagctggatggagaatgactttgacaagctgagagaagaaggcttcagatgatcaaattactctgagctacgggaggacattcaaaccaaaggcaaagaagttgaaaactttgaaaaaaatttagaagaatgtataactagaataaccaatacagagaagtgcttaaaggagctgatggagctgaaaaccaaggcttgagaactaagtgaagaatgcagaagcctcaggagccaatgcgatcaactggaagaaagggtatcagcgatggaagatgaaatgaatgaaatgaagcaagaagggaagtttagagaaaaaagaataaaaagaaatgagcaaagcctccaagaaatatgggactatgtgaaaagaccaaatctacgtctgattggtgtacctgaaagtgatggggagaatggaaccaagttggaaaacactctgcaggatgttatccaggagaacttccccaatctagcaaggcaggccaacgttcagattcaggaaacacagagaacgccacaaagatactcctcgagaagagcaactccaagacatataattgtcagattcaccaaagttgaaatgaaggaaaaaatgttaagggcagccagagagaaaggtcgggttaccctcaaagggaagcccatcagactaacagcagatgtctcggcagaaaccctacaagccagaagagagtgggggccaatattcaacattcttaaagaaaagaattttcaacccagaatttcatatccagccaaactaagcttcataagcgaaggagaaataaaatactttacagacaagcaaatgctgagagattttgtcaccaccaagcctgccctcaaagagctcctgaaggaagagctaaacgtggaaaggaacaaccggtaccagccactgcaaaatcatgccaaaatgtaaagaccatcgagactaggaagaaactgcatcaactaacgagcaaaatcaccagctaacatcataatgacaggatcgaattcacacataacaatattaactttaaatgtaaatggactaaatgctccaattaaaagacacagactggcaaattggataaagagtcaagacccatcagtgtgctgtattcaggaaacccatctcacgtgcagagacacacataggctcaaaatgaaaggatggaggaagatctaccaagcaaatggaaaacaaaaaaaggcaggggttgcaatcctagtctctgataaaacagactttaaaccaacaaagatcaaaagagacaaagaaggccattacataatggtaaagggatcaattcaacaagaagagctaactatcctaaatatatatgcacccaatacaggagcaccaagattcataaagcaagtcctgaatgacctacaaagagact

SEQ ID NO: 1881569 - DNA, 4001 bp, Homo sapiens
cctatattctatccttatttgaattctttcttttccttaaaagccatgttttccctgaaatccagtgtggagttccaatccagcttgtgcaagctaaagagaatttatttcacccacaacattcattaacaccctagaaacaggtgatgagatgccttaagcctagcccctaataataaaaatgtcccaaagttaatatatatttgttatgtcccacttcaatatttcccatatacatatgcatacagaaaaacataacgggaacatctacacactggaacaaatacttaagaacactgcaaagagagagaaagaagtggaggtttatcatgttttacttcagggattccacagttctattacacttttttgaattattgtagattattaacatattgtgattgaaagcatctcccaattagccccatgatattccccagagaaagccaactttccaaactgaccagttgccaagtaaacaacgtattaatgagaggtcaagagtcgaagcgtggaagtcagatgaaatcctgggtttggaattcacttcctctgcttactagctgtgtggccttaagtgaattaagtaacttctctgaacctcagtttcttcatttataattagcattggtaatactacagactgcacagaaccacaaaaaccctagaagaaaacctaggcaataccattcaggacataggcatgggcaaggacttcatctctagaacaccaaaagcaatggcaacaaaagccaaaattgacaaatgggatctaattaaactaaagagcttctgcacagcaaaagaaactaccatcagagtgaacaggcaacctatagaatgggagaaaatttttgcaatctactcatctgacaaagggctaacagaatctacaaagaactcaaacaaatttagaagaaaaaaacaagcaaccccatcaacaagtgggcaaaggatatgaacagacacttctcaaaagaagacatttatgcatccaaaagacacatgaaaaagtgctcatcatcactggccatcagagaaatgcaaatcaaaaccacaatgagataccatctcacaccagttagaatggcgaccgttaaaaagtcagggaacaacaggtgctggacaggatgtggagaaataggaacacttttacactgttggtgggactgtaaactagttcaaccattgtggaagtcagtgtggtgattcctcagggatctagaactagaaataccatttgacccagacatcccattactgggtatatatccaaaggattataaatcatgctgctataaagacacatgcacacgtatgtttattgcggcactattcacaatagcaaagacttggaaccaacccaaatgtccaacagtgatagactggatgaagaaaatgtggcacatatacaccatggaatactatgcagccataaaaaatgatgagttcatgttctttgtagggtcctggatgaagctggaaaccatcattctaagcaaattatcgcaaggtcaaaaaaccaaacaccgcatgttctcactcataggtgggaattgaacaatgagaacacatggacacagggtggggaacatcacacaccggggcctgttgtggggtggggggaggggggagggatagcattaggagatatacctaatgctaaatgacgagttaatgggtgcagcacaccaacatggcacatgtatacatatgtaacaaacctgcacatcgtgcacatgtaccctaaaacttaaagtataataaaaaaaagtatcatataatacgtgcaaagttgatgttgtgacaaatccgttccctaccatttacgggctcgactgtccaaacttcagctaccagcccctgctgttccttggctgatatatttaactgtctgttctgcctgcaaacagggcaggttgcaggttttctgtttcatcagcaggactcaactacgactgctgggcactggcagttaaatgccccagtgtcctcttcgttaggcaggatgcctgtaagggtcatatcttatactttgtttcaggttccctcagggaaagcaggcccactgtagtaattgtctgacaatctaccttccgtagcctttttacctattgtcttattttcctattccaatacttacatttcttggaatcatctctttattaaacgacttgtactcaaatccttgtttgagcgcctgcttctaggggaacccaaataagacaatcaagggcatggcatagaataagcatttggcaaatgttacattctattctatgattactacttctaaactatttacattaacaattcatagtatgcttttcacgtgattcaccttccatacatcgaaagaagacgagcctggaagtatagtaaatcctgtatagaaaatggagaaaagtaaaggcttacaattctaattatctaatgatgacagtgctgtcaatgaagctgccaaaactactgtcagggaaaatggaatgtcccttttgttacatgaagaaaagaaaggcccagggtacatagtacataccaaacaagttagttctcataaatatttccagtagttcccagcttcttgccatttgtgtattctacatttgaagccaaaaatactaattcatccattgaatatctgctctggaatgtcatctctcatactggtttctcctacaacaccatgtatttgttatacaccatgtaatgactagcatgactagactgttcttcattcataactatattcaatcgagcaaaaggtaattgataattcttatagtgaattacaatgatatgtaaatattatgatttactaacttcttttacatccattctcccattacagcctttcaactgtgctatgaagcagtataggtgtgtattagtagactcataaaacagatgaagaacccatgatttagagaaaataaattatttactcaaatgcctagtcagaatgttgagtccttgaactggatgtaacattttttaaattatattactccttttagaaaactgacttaaatcgtctaagaacctatctaatactagttaaacaatgagtacaaagttgtctaaaagttttaaacacacatagattcaacaaactttaacctttctgaccctgacctccagatccagactgagttcaatgccgatattcttacttaacactcctgtcacaccatctttttctggcctgtaccttgcagtgtttccacttgttcatgccaggtggagtaagacagagaccatagtttgtttgcacatggtggtataccagttgtctggggcagtgcctggtactgaagtagaggatttctaaatatttgtaaaatgtattacagattaatcattctgcacatgtgccacttttcttgtatggaagtgctgatttatgaatatgttttcaaaagcaattatagtttcccaacaagtatctactgttatgcctacttccattataaccgaaataaggttaagaaaatgttttctgttaaggaagaaagtatgcccagtgcttatgagatcaatgggactgtgtattgttgtagaaagtgactctgtggtcaaaatactaatttgaattcccagtctgcgtttctacttttctactgtaaaatgttgataatgtaacaaaatttaggagtttcagtttcattttctgtaaaatgaaaaatgatattaatttttgttgggattagaataaaatgtatattaaatgacttcgcattaaaagcattcagtaaatggggcaattattctttgatcttcatgtttgatctttcttcatagtatttataaactagcaagtctgttggtttatatgactattgtctgtctcatccccagccagaatggaagctctgtggcaatagagactgttgtatacactgctaatttcctagttagaacagtgcctgagacagagtaggtggttaattactatatattgactggaaggatgtcacgattttataagttggtgactcatt

SEQ ID NO: 1881570 - DNA, 4001 bp, Homo sapiens
gatctattgtacaacataatgactagagttcataagaatatattgtatacttacaaattacttagggagatttttgttctcaacccaaaaaaatctgagtatgagaggtaatatatatgttaattagcttgaattagcagttctgcaatgtatacatatatcaaaatatgatggtttataccacaaatatatacaatttttgtcaattaaaaatatattttgtaatcctcacaaaaatgaaaataaacaaaattaatttagaagaacagtcatttgagctaaatgaaaagttatgattcagagtaatctgcaaatgtatcttttgtgtctccccaaaattcatatattgaaacttaatctccaatgtgatattgttagaaagtggcatcttagggaggtgattaggtcatgaggatttgccctcatgaatgatattagtgcccttataaaagagaccccaaagagctagttatcccctctgccatgtaagaacacaacaagatggtgccttctatgaggaacaagccctcaccagtcaccaaatctggctgtttcttgatcttgtacttcccagactcaagaattgtgagaaatagatgtctgctgtttataagctgcccattctcagatgttttgttatagcagcccaaatagactaagacatagctgcatgtgttaaatcatcgtatgtaggcacagccttcttacaataattactaactgaaatagatgctgatggtcctttaggagaactgtttctggttttcatttggttgtgaccaagaatatataagaaatagaaatttagtatatagtactttaattaaatatgtagttttaattttatttatttctgtcggaagggttttattgcaaagttagaaaatatttactaaacactaaaaaccaaataattattggtttataccacacagtaaatggcaaaatcagtgtagcaaggctgtctaactacaccctatatgccttatagcagggctggccagtctaatttcccaagttttcagcttaccctatcaattggcagcctggcagctttgtgaattttgtagactaaaacatcgactagataaatatatgaatggtccattgaatggtcagtaaaggagcagaatgggcatgagacaatttgtcacaaagatcaaagaagagaaactgagacagtctgtgtgcattccatcacctaccattttactgagatgaagttaatatttctccaagaatcttcagtttcttctccaatgtcaccatcctgatttccagaaattgcctcgtgtctagagcagccattttctttccattcatctattttctgtggtgatgagctgctgagctggtcccatgtttttgattaaggtgaataatctttgtgtggtcttccccgtctttagtttgctgatgggttgtaaagtactagttcagtttctagtgttttaagaagttcctgcttttgatacgtctttgagggactggctgtgagacccacttgctgccttgcttcaatttagtgtctaccaagcacaaagtggttttgaatgaaaactctataattaggcttggtcatctaggttagttggttacataggtgaaatggcttttcttgatgttgagctcgtagtctagccatgtttatccataattggacttgccttttgcctagggaagtatccaagtgaactccagagcatattgctgtatttagccatgacttactgctttccaaacactgtattctccagaaggtacactttgagatggtgatttcatgcaggagatttattaggaagtattttgggggccaacacctgtggaaaaagaaaatagagacaagttcagctgcaatacaatctcaatagaagcctctgctgaccctattgggagttctgaagaggtaatgagccttaccagctgtcctgaattggggtgaagtggccaggcttttataaccacatgttcatcagtcattgaatgaaggctacctatgaagagtgtgtaggctaggttaggcagcttttgtcagctgaggtcatcctcaaagggggctaagagctgagaggctgtctgctggcagcacacctagcatctgacataataagccctttattcctgacagggaatcttcttgcatcacagcacctacaccattgcccttggatacattaatagagttctcctattattggctttttttttttttttttttttgtgatggagtcttgctctgtcacccaggctggaatgcagtggctcactgcaacctctgcctgccggattccagcaattctcctgcctcagcctctgagtagctgggattacaggtgcgtgctaccacgcctggctaatttttgtatttttagtagagacggtgtttcaccatgttggccaggctgatctcaaactcctgacctcgtgatccgcctcggcctcccaaagtgctgggattacaggcgtgagccacatcgcccggccctattggctttttattcccaacatgctgagaacaaatttgcagaaaatcgaaggcaaaagtgcgtagggccctcaaaaatcactgtgcatctctgaaactttgataagcctacttttatactttgttatatgatataatgaatatctttattacttaagttattattattcagaattctgttacttgtaattgaaagtattctcaacaaatataaccaaacttgtacagccaaaccattcaatgacaaaataattaaccaaaaaaatcaactgttgacttttgatagaaaaactaaaaaaagcctctctgaggagataatatttgggctgaaatctgaatcacaaatggggttagccaagtgaggatgcaagaagagcattcctgttagggggaacaattgcagaatcctaaggcagaagtgaatttggcaggttcaaaaacatgattcttattaaagaatttggtttgccaggctatgatttaagatgtttaagatgctccagtaatgcttagggatttcccccacaaatatttaatatgattacaaacattttaaatgtaaagggaaagaggaacaagaaaaattgtcaaataaatgattatgacttaggaagaagaacatttgtgtaagaggttatctgcaattgtcagaagaaaaaaatacctgataaatatattgagaacaagatttgccttcagagatgtgtgtgtgtgtgtgtgtgtgtgtgtgtgtgtgtgtatgtgtatttatataaatacatacaaggaggtaaacatagctttatagcatcatcaagctgaattaaatgacaggagcataacagcagaaagctctatcactcttttaggaataaacctggtagaagtggaggtgtgttagtactgtatgccaagaagttgctggaaaatcttcagcagtgtggctggagaattgttggaaaaatcttcataaagacctatctccatttttacctgcataaagatagcagaaagaaaaaaatactgaaagaaaaaaagtaagattccacaggccaagattcttggaaaaatagatgactcaagagtaatagaaaactttcagacatgaatctgtgactgtaccgcatcaatgatgccaatttgcagatgtatttgctaaacttctgccagtaatcactgaggaattacagaaaatgggaaagattgtagtgtcagccaaggttcatggcagaagacagaagcattttaagcagcagagattaaatgctgtaaatgggtgcctgcagttacaggaaggcctggagaagtgggctgtactctgggctaccttgaatgactcccagacacccaagagctgaatcaccagggagctcccacctctgagagtatcctagaaccatcagatttccagaacatacaatcaaagctgagataggaaatcatagagctggaactatgcacttactgttgccatggctactctattatgctgtgaacgggggagtggaacctggagttcattggggactctgct

SEQ ID NO: 1881571 - DNA, 4001 bp, Homo sapiens
tacaattctacattctataactttccaactctgcattcagtgaaggtcagattgttagcttgaaattgaccatggcgggggtattcactccaagaaaactaacaaaagctacaaatctgaaccttctttttgagagctaggttagcggcaaactgttaggtgctctgggaacactgatgggattggaatggaatggaatgaattcagttgaaaagtaaataaaggatatggggtaaaaaagagcacaagttgagaaaggaagattatctgcctaggaaagacaaaataagaccccgtccttggggtgagtggcaggtaaaaatggaatctgacttttactctgagccaatacttccttaagcatatttttctacccatcacttcaccactgcttctaagtgtgaaaataactgagtgaaatagacactgacaagctttatcaacatctgaggttctgaacactctcagagacattttcaaaggttcattctctctgggaaaaagaatgagttcagaaagacacagattacaataaattatctgggatgaaaataataaagaagaaaaagaagaaattcaatttttattgaagaacagaaaaaatactgtaatactttaatgatacaaaaaaccttattttatgtggtaagtaacattaaagagaaattagagaagttgtgaatgacacagaaaagaaaatatgaatatccacaaattgtatcaacactttaaggcagaaaaataagaatgcatctattcttttattggtctacaaattcatccacttctgagctccctggcagagactgggctactccaaagcagacataatggaaaaagcccacttaagaagttatcacttataaacaaataaatgaacatattaaaaggctgtatcacctgaaattaagcttgtaaatgggtgacatcagacaccatcatttggttcgagaatattaagaactatgagaaaccctggaaataatcaaggacaaccatcttattttgaaagtgagaaaacagacacagagactttatctgattaaaatctgactctaatttagcaataagttatgactagcttctatgctcaagacattgttttgaccatcctatgatggcattaagattttggaaagccaacaaattcaaaggaccatttcctccagtgtggagagtggatcccaaaggcaaaattaagctggtcagaacggggagcccagcaatctcgttggtcaagtgtgtggtcaacatccacttcactaactctggaaacattcctttcaattagagttctcattgcttgagaagaatgagaggaaaagaaagataaaaacaagatttttttcagtcgtctaatttccataaatgacatcataaattatatattgctgttgccaaggaaatataagaaatacatagcagaaggaaacaaagaaattgattgcaccatagacgactagtcatatgctttggagaatcattctgccttttgagatgttatgatcagttctttacaggcacaaagacatattagttttctaaaaatacccaatcatttatccattcagcaaagaacaaagaaaacaaaatcagtgcaattctcataaccctctttctttgcacagcacatagaatgaggggctattttcctgccatatttaccaagaatagggacagtgttcattattccacaagacaccatcctaggtccagaatctaaaggctctacctccaaaactctcaaatataaaatggcttttttctctaagttaacaactaatttccagtcagtgagtaatttttttcctgaaacattcactcagtggaaaacaaatgaagagggaaaaaattaagtaaacaaatctgaaaaagaggccacaacacacagagatggagaagctctaaacttaccactgaaggaaagcaggcacttaaagtttatcccaaacaaaactgtaattttaactggtccccgagttgagcctcactcgatgaatgacttccagggcctttggctctttgggactaaacgagaaaattatttttagcacaactatttggaaatctttgagaatttggatctgttattctgtctggtaccaaagcaagtttttcactgagctctcatgaaagatcctcagtctcttgtggatttagaatcctgcagcagcccaccatctaagagcaaggtatggtgtttactcttttttttagaattttggcaaatgtagatgcaatggcctgttctcgtgacgggagctttttagcttattaaacagatggctctgtaggaagaatccataaaactgaagacctagcttcaagtctctggactgacactagctttctaaccatagacaagttgcgggacttctcaggaccttggttccccatctaacctaccacaagatggttttggggaggacgatatgggcttagcattgctctctaggatataaaatgttttgcaaatgtcagggttttttttaatcactgtgccataaagtagtcaaaactttatcaataatgaactgttgacaataataaatattgatgaatttttttttcttcattgagcctctactgtagactagtctctgtcctagagtttgcattttagtggggaaacaagcaagtcaatagatagccataacacagtgcaattgtgtggccttgcagggacttgagtagtgccaggaggagaaggaggttaattcatggcaaacaggaaaagcagttctgcagaggaaaattggagcccccaaaagcaaagaactggtgaacaacaacataaaaggaactgaggcatgagcagctcaggtctccatcctgtcccaatcacagtgccactcccagtgcaacaagagaaacacagagcttgctgttgtgaaatctccacctctgcaggccaagaaaatgtcccgttttggcttttcctggttacctattctcttcttaatgatttccaggcaaagcacattttcaacttgaattaattatcaagtccagccctttgtcatgaagtaatatgttatagtttccctcacatgatgtagggacaaactcaagtgtttgaagacaaaagaactcagtacaaattctggctgcaccatttcatgcctgtgtggacttgagcccacagagtatcaatgttcttacttataaagtgaaggtaatagcacttacttcataacaagtggtgtgaggataaagtaaaagatgtccttaaaacacctggcacagaaataagaatactgggctctccctgcattccaattcatttttattcagtttttttaattatggtaaaatatacatatcataaaatttaccatttcaaccattcttatgtgtacggttctgcagcattaaatacattcattttgttatgcagtatcatcaccatctctccaggacttcttcgtcttcccaaactgaaactctctatacccatgaaaccataaattcccattcccctcttcccttcctcctccaacagtgagtattctactttcagtcttgatgaatgtgactactctaggaactttgtgtaagaggaatcacacaatatttgtccttttgtgactggcttatttcacataatatactgtcttcagggttcctcatgttgtagcatgtgtcagtatctcctttccttttaaggctgaagaagattccattgtacgtgtagaccaggttttgtttatccattcacctttccatggacacttgggttgcttccaccttttgcctattgtgaataacgctgcagatatggctatgcaaatatctgtttgagtccttgctgctacgaacatgcatgtgcaaatatttgtttgagtccctgattttacttcttttggatatatgccccaaagtggaattgccatatcatatggtaattctctttaatttttttgaggaatcactatcctgttttccacaggcgctgcaccattttacattcccaccaccaacatattttatttttccaagaa

SEQ ID NO: 1881572 - DNA, 4001 bp, Homo sapiens
atatgtaacaaacctgcacattgtgcacacgtacactaaaacttaaagtataatataaataaaaagaaaaaaaaaacttcagcttttgcattcttccaaactcaaaaccaaggctgcttagtcttcacgtcttttctttgggttctatgctcctttactagtctgtagcaatgtaagggacactaggccaatggctcaaggatttaacaccaaatccagttgtgctgatgatcttatttgcctcctaccactctctgcaattgagctatgagcttaagcattcatctgagatccaactttgaccaatggctcccttagcttatttcctggtggcaaatcctctgaggatctatgtgggttgaatagtggtccctcaaaacatacgtttatgcaaaaccatgaatgtgacattatttggaaaacagtctttgcagatataataaagctaagaatcttgagatgagatcatcctggattaggatggaccctaagtccaatgacaagtatagagaaaagaaggagagaagacacagaacgaagaggagaacacacagagctgaaatccagggaagacaggcagagattagatttttgcagccagaagccaaggaacacctggaaccacagaatctggaagaggtaaggaaggacttacgagaaaaaaattactgttgtttttagccaccaagtttctggtgatactgcagccctatgaaagtaatgtaagaccctacaaaaaagttctattctgagtgtttctcagtcacttaaaaatcctggtgaccagctctatgacacttgcctataaagaggatttttaagtgactaagaaacactcagaatagaacctacttagactttatcctattcattaggcaaacatttattgagcacctacaatatagcaggccttcttgtgggtactgggtaaaaacaaaactgaagaagacataatcctgtaacagacaaacaaatacctactgtgcaacctacagggcgactgtaggcagagagagtgggttgtggccatgtcatagagtaccatattgacagagttaaaatcttcgcctttatcctgtatataatggagtactttagagggttttaggcaattattacccacatccccaggctcctctgatactaaacttctctgacatctactccagggccagcctggacatctgcctgtgacctgcagtgggactctcctggttttacatctgcctgccctgacttgctctatgaccacactaagttcctgctactgttcattctccaggcctccatagtcacagtcactgccccagagtaaacagctagtccggttctggcctcacctgattcaccaactgagcccaggtgcactacattattatttatttattttttgagatggagtctcgccctgttgcccaggctagagtgcaatgccgcaatctcggctcactgcaacctctgcctcctgggttcaagcgattctcctgcctcagcctcctgagtagctgggattacaggcgcctgccgccacacccagctaagttttgtatttttagtagagacagggtttcaccacattggccaggctgctctcgaactcctgacctcgcgatccacccacctcggcctccccaagtgctaggattataggcatgagccaccatgcctgaccagtgtgctacattattaatttattcattcattcgagaattatatgcttactatctactattttccagtccctgcttgtacaaaaatgggtaatattcagtctttgcccttaagatgcttaccatcaaaatgtctacctaatagtctcctcaggctgccatcacaaaatgccacaaacttggtaacctaaacgacagaaatttatcttttcacacttctgaaagtcagaagtctaagataacagtgccagaagagttagtgtctgatgaggtcttgagttgtagatggctgccttctccctgggcccctatatggccttttttgtgcactcaaactccagttctcttcccctccttataaggacattagttctattggattagggttctacccttatgacctcatttaaccttaattaccaccttaaaggctgtgtctccaaacataattccattgaggattagggcttcaacgtatgaatttaggggtttgggagcatggtggggacacaattcattccataacaccatctaagtggaaaaggcaaatatgtacacataattgccatgtgatgaaacaaataacataaaggtattgggtatttctgtggtgaagcatctaacctatctagatggatctttaaagaagacatagttacttaggtggaccagatggagcagggaaacccaggcagagagaacagtttttgtaaaatgcaaacatgaaacaacatgatctgttgagtagatggcaagtaattcaggatggctgagatagacagagagtggcttagggtatcatgaagacaagactcaaaaagcatgccatgtcctcatggaagcccaccccactcttctcatcttctgccacaaccttttttcccatgctgtagtcactgtgtgttccttcctcaccccaatcaaaatattatatcctctgcctcagtcctagacacatttaaaataatagcctcttatattttgcatagtactttacagtttacaaaacacctttactatatcatttgaccctcatagctgcccagtagagaacaaatattatatcaatatatacagtgaaaccaatattcaaatagtaatcataataatagacttgcccaagatcagaggactgtgctatggttattttatgggtagaacccagacctctgcctggcgatctagtgttctctctttgacactacctgcatttttctctgctgtttgcttcttgtgctgtaattctccggtaacgcttctacattttgacagagctttctggaaataatgtgttaaccaacagaaaaagctcagagtgggaatgttgggcctggcaagatatttttttggcctggcaggcctgtcaaagcccatcgaatcacacatttgcctcacaaagggccaacccagagcaaagcccatggggacacttcgccgagaggagcaaattaaagcacttccaagtcaggaaatgccaagctagacttttctatggtgttaacttgctggcccaaagtacaccaaacagtaatttacctacagcctagctgcagaaaattcctacccagcctagctggaggtaaatccttctctgactgtacttttgtcagcgttgccaaggcaacaactctcaccactctctggtcatttttagtttcaatgacaaagtttgcgttgacttagctgtaagtctgatgcagaaaacttttactcactggaatgcatgaggaatgggttccctaagttttcaacaaatctgagactacattgtcccttaaaaatatttgtccaccattttggatagtaacttctctaagattcttctctcatatctatgtcttcctcatacaatctatagagcataatttaattgatttttgagaagatccttttgaagagtggccttttgaaaacacaaattttattccaacgtgaagtttaaattcttataagtttgggaaagtgcctttcaccattcacccgtctacctttccaatctcatatgttgttggtctcttcccattcactagaggaacaccgaattaaccattatttttggaagattcacagaacacaccacactctttcttatgtctgagtatttatacacaaggtagcccttcattcttttctctgctaagaaaattcttatgcagccttgactatccagctcgacaaccacatacacaaaatctttcaaatgctcctcctagccacagtcccagagcattttgtacataggcctttattgcaagaatttatgtgcctgactcccttacctcatctttgtaccctaatgtctagttagcacagccctggcctcatataggt

SEQ ID NO: 1881573 - DNA, 4001 bp, Homo sapiens
ttgatgaaaaagagcctaaatgctatctgatttgggataaagaaaaaggagcattaaccttgactatgcctttagctctagccacctttttaagagtaaattgctgggcaggagggggagggctagtcacagaacgaaactgtaagccagaccaggtgtgaggaggggaggtgataaaaggattatagggtggaggagcggaggctgaggaagaattgggacctagctcggcctggcgaggagcagcctggggaggaagggagaggtcagatgggtctgtagaaaaggaagattagaaagactcagcgacgcttggtgttggtactggggggacaggcaggagggaaagaaggaagatttgggacaagttgcactgggcacagagactaggaagggactgatgtgtaaaagaatgcctggacgtcaggcacctcagaccgtttgcctattttacgacaagaattatttagatcttgcaggatggaaaaattcaaagtgccattttctggctatttggaactactgttgagtttgtattggggtcaggcggcattgcagaagaaaataaggcatttaggttttaggtcaggtgtgagttgaagaggttttaagtttttgagaacacaggccaagggagtagaaggaggaatggagggcggaaggttgcccatagtgaaggaaggaagcctagagaaaagagagagtagagaaacggagggaagggatttgggggttcttatcttccagaaaagtgggaaaagtggttggggtgcagaaataagggattggggcacagagatataaaaggttggggcacagaaataaggggttggggtgcagagatatgaggttggggctcagaaataagggattgggacacagagataagaggtcggggtgcagaaataagggattagggcagagagataagaggtcggggtgtggaaataagggattggggcacagagaaaagaggttggggtgcagaaataagggattggggcacagagataagaggttggggtgcagaaataagggattggggcacagagaaaagaggttggggtgcagaaataagggattggggcacagagataagaggttggggtgcagaaataagggattggggcacagagaaaagaggttggggtgcagaaataagggattggggcacagagataagaggttggggtgcagaaataagggattggggcacagagaaaagaggttggggtgcagaaataagggattggggcacagagataagaggttggggcgtggaaataagggattgggggttcttgccccgtagaaaagcgggacttgccgctaagggtgcaggagaaggggttgaggaatagttgcccctctcccaaaaaagcagagaaggggtagagacaaggagagaaggggttggggtacttgccccttccccagaaaagtgggacttgccgctaagggtgaaggaccaaggcaggcattcctgcgtggtctgacacccttgaaaggtgggtgtataatcagagacgcgtccctgcaatgattaaacaccaagggaaggctgccttcccagtctgtgaccggcgctggagttttgtgtccacggataaaatgtgtctcctttgtctctcccagaaaatgaaaggaattgaaattaagagaagggagggattgaagagtgaaagggagaaagtggttgagggacagtgagagaggttggagaagagagtaagaagaggccgcttacctgatttaaaattggtgagatgttccttgggctggttggtctgaggacctgaggtcataggtggatctttctcatggagcaaagaacagaagtacaggggattgatctcccaagggaggtcccccgatccgagtcagggcaccaaatttcatgcacgtctgtttgaagagaccaccaaacaggctttgcgtgagcaacatggctgtttatttcacctgggtgcaggctggctgagtctgaaaagagagtcagcaaagagagataagggtggggctgttttataggatttgggtaggtaaaggaaaattacagtcaaagggggttttttctctggcgggcaggagtgggggttgcaaggtgctcagtgggggtgctttttgagccaggatgagccaggaaaaggactttcgcacggtaatgtcatcacttaaggcaaggatcagccatttacacttcttttgtggtggaatgtcatcagttaaggtggggcaggacatattcacttcttttgtgattcttcagttacttcaggccatctgggtgtatacatgcaagtcataggggatgtgatggcttggcttgggctcagaggcctgacagaatctgtattggatgtaagcatatctgagcagtgcaagaggtagacggtagccaacacaatggataaagcactcaatatttccttggcttgcttgtgtcttcacctgcaattgtggagaaaaaaatgcccatctctcagtagtactatccagaagcatattcatcacagtttgtcagaggatactcagcagaagtgagtcccaacaatccactcattaacacattctatgctggctttttctttcttccactctcacttttcctattctctggctttttttttttttttaatcatctactaaataaagtactggtatccaagtttttatatcatggtattttgaggggactacaaactaagatgataagaaaactaggctttgttcttaactgtcaggaagctttttagatagcatttactattttggttccagtcctaaaaattgtttataaccttccagcaatatagctggaaaactgcaattgttcattactctgatggtctcagaatgttagtaacaaaatcatctcctatagagaggaaagcattttaacctcatgattttattataattggaaactgatggcctatgttatttttcattcttaatgtaataactattttggtagttttgaagaaacttcactcacacaccacaaatcattttaatttattctcttctggtcaaaacaggttaaatagattcaaagagcatgtacattttttttttagttcaaaaaagtttctgtaataattatctcgaaatatgcttatgaaacaagatagtgattgcaaaatgcatcatttagtgaaataaattatttttgtagattattcagttattcacatgctaactagaaggtaggtgtcacaaatatttaggtgaagaagagaaaagcaagatatttctcctttttttctcttctaatataaagtataaagattgaggaatagaatattgaaatgtggtttattacatggaaagctttagtgaggagacatgcatcaaacaaagaaaagatcttttcaccaatgccttttcataaagtcagtaatggtgtttataatggtgcctatctctggttaaacaaacagctagttttgttttgttttctttctaaaagaaattaaaaatctgagtgaccaccaaaatttcagaatcaacattgtaagttcaaaactccacatttcactaaatatcatcaataatggtttaaatttcaagcatcatgaaaccttgctaacattttcccttatcatttctttatgtttcataaatatttgaaaaatatcattgattaaaaatcccatcattttaatagtaagttaatttttatagtaaattagtacaaaagtgcatgttctgaaactcaactggccagaaatgaaggaagaacctacttacgtcttttgtacccagaagaacaccattactggaagacaaactattaatatgatcttgtaggaaaaattaactagacaaggaaatgccttaaaattcctattttatttcagagaaatcaaacattaaagtctccacaatataaaagtttaaatatttaatatttttcatgtaacaagttttggaattgtatttcatcattttgaataaacatggtaggaaaataatgcttctatgctttaataatgatt

SEQ ID NO: 1881574 - DNA, 4001 bp, Homo sapiens
gtctgtcaacagatgaatggataaagaaatatgtgatatatatacacaatggaatattatttagtcttttaaaagaaaatcccatgatttgtttcagcatggataaactttgagaacattatgctaagtgaaataaaccagtcacagaaggacaaatacttcaattttccacttacatgaagtatctaaagtagtcaaactcatagaagcagaaagtagaatgatggctgccctgctatggatggggaaattgaggtattatttattaatacagtttcagtcatgcaagacaaaaaagttgtggagatctgctgtacaacaatgcatatataggcctggcatggtggctcacgcctgtaatcccagcactttgggaggctgaggcaggcagatcacttgaggtcaggggtttgagactagcctggccaccatggtgaaaccccatctctactaaaaatacaaaaattagccaagcatggtggcaggtgcctgtaatcccagctactcgggaggctgaggcaggagaatcacctgaacccgggaggcagaggttgcagtgaatagagatcatgccactgcactctaccctgggccacaagagcgaaactccatctcaaaaaaaaaaaaaattaatgcacatatagtaaataccgtaatactgtacaatccacttacaaatttgttaagagggtagatcccatcttatgtgttttttacaattaaaaaaaagaaattatgccagcaagagtcacatacctatgcatcgaaatgtacagtcaacaaattacaattggataaaccattttagataaggcctgcacctgcaacctagaatgactaccactttgtctcagtgttatcactgaccagctgtgtaaccatgggcaactttcttgcctagtctgggcttcagtttcctaagtaaaatgactaaaataaattaactctaaagttgatcctaacaaagttttatgaccctgagtttctggtttactcagcataaccttcatgataagaagcaaagttagcaaccaactgtctttagacagacctaattttacattttcatgtagctcattgaggcaatttcttccctaatctattcctttgtgctgaacttttttaagtttgacactctagatatccgtctgcctcaagcaaaacagttgacagaaacccatgaacccatcatgccctgattcataggaagtaattactaataatcctaattctggttcatagtttgcttgtcagtaattacagctgcagttgaatgctttcagcattaaccatcagcccagagttgcagctccctcctcatctcagggaaatggaactgtgagtacctttcaaagcaaggtttgctgcttttttgcctggaacactttttaattgggtatcatttggaaacttctaaatcccattttagagcttctggtcactgcgttacttattgaagccctaaaagctagttatgaggcatgcctgaacagtgcgaatgtcaaagcaaaaattacgatcatctctgctttcttccgagaatgaaaaaagccatcatcttgacctttttttttaatatactaaaagaaatctaagataacaaagctgtatgagaaagtacttatgaatttgggattgaaattgcacttctaatttaagagttttccatctagttaggagggtttaaaattgttaggttgttcagaaacccacagactatgtaaatgtacagttttggtatatccacccaagtgcctgactagaaactttagtcatctttaccttcgccctctcttccccacccacatctaatgagtcaacaaactcaacccattctacttttctaatgattttggaatttactcccccacctccacccccattactgctgaaaaggcaattaaagatctcattacttcttaagtgggtgagtggttggcttgatcccagcccttctccacctcaggactctcctacacggacacaagagatggctttactaaagcacaaattagaggctgattttctacttataaatacatgatgcctccctggggcataaatgagtcaaagccttagtttggtacttcctacttctttagcttattctcttagacttccacttcatcacttccagctgtctaaatcccacccacaagacttattatttgtcatcccttgaattccaaaatgctctgtgcacttgcaaatatttctgttagctcttttctttgccaagaattcccaactttatatactgaaatcttacttatatttgaatatgaagctcacccatcaatttctatgaaacttcccacaactcttttagaacagctcaattgtctttcctacatgcttccctagaacatttatttattcacccattcattttttttttcattcaccaaatctttaagaagcaactaaattctggagatacggactcctgcccttgggaagcctaccttcttatagactatttctaccacatggatgctagctcatagtctttttacccatattttaatcagtgtcctgtttccttcattggaccacaaactccttgaaggaaagagattatgttttattcagtgcccagaacaatgagtgattttcaactaatatctattgaattttacttaaactagcttatctcttgagtatgtatgtacaagtatgtatttgtattcaaaccaagaaacttacaatacctagtactttggtagctgtgcactgccctaggcatcatctatatatcactatctagcttaaaaccaaacagatgctggtgcaaacatctcaccagcattagtgcaggtaatgaataagaagcacttgtcacagtgactggcatctgaaattgctaaaaaacacaaatccctcttcaggttaatttgagtagccttacattttttaagattcaaaataagctggtctttgtttaagtctgatggacttttcaagtaagaatgtccaacaaagcaagagttttcatccaacccatttcctcaaagtgtttaccattcaatcaataatagtagaggcatttgcaaagaagagtagaaaaaggtgaatatttgaatttctgtaagagatctgggtttcaggaccagctctgacatgaataacttctggaaaatcacctcatttctccattacttagttttcttatctgtcagggatggggacattaataacacttttacctcccttgaagagttttgtggataaaaatataataactgtaagattagcctgaaaaataaaggtaaaagcttatcaaatgtgaggtagtatttgtaatagtaaaaacttatgaaatgctctcatgactgaaccatctctgagggatgtccccaagcacatataaggctgtttggtaaattgatacacatatggtcagggatttagtggcaagagataataaatcctcgccaggtcctcttggggcagataagaaacaagtatagccaaccctcagtgacctgtgataacaaggccagggatgatacggataaacggatttcgcagattatccaaaaatataacttttcccaattaggacctctaaacttttgcagaaattccttaaaaagagccaaattactttcacctggactcataacctacatgagtttcaccaccagttcctaccccttcccatgcctagatacagctgcaaaaaaaaaaagaaaacaaacaaaacaagaacaagtaagtctgctggggcagctgccatacctaatgctgagctacccgggagaactcagtacattttattttcagagatgtggtgctggccctgtctatattttcctggcgcaaggaaaaagcaacctagggcctgccaacccagaacattctgtaagtgacctcaaactatggtaatttccccaagccgcctgaaggagcttgtcccttcaactgatcccttggcagcaatgaaatcaggtcttggataattcctaatccagaacttttctgcagatttccaaagctgg

SEQ ID NO: 1881575 - DNA, 4001 bp, Homo sapiens
ggtcttgctctgtcacccaggccagagtgcagtggtgcaaacatggctcactgcagcctcgacctcccaggctcaagtgatcctcctgcctcagcccccaaagtagctgggactacagacgtgtgccatcatgcctggataactttgtattttttttagagatggggtctcactatgttgccccagctctgccttggcctcccaaagtgctgggataacagacgtgagccactgctcctagcccaggagtatatattctttgtttttttgagatggagttgcccaggctggagtgcaatggcgtgatctcggctcactgcaagctccgcctccctggttcatgccattctcctgcctcagcctcccgagtaggtaggactacaggcgcccgccaccacgcccggctaattttttgtatttttagttgagacggggtttcaccgtgttggccaggatggtctcgatctcctgacctcatgatccgcccgcctccacctcccaaagtgctgggattacaggcgtgagccactgcgcccggccaggagtatatattcttaagctaacatttccatcaagataggtgaattatatgcaaaagaaaggaaatcagtgtatcgaaatgatatctgcattctcatgtttgttgcagcactattcacaacagccaagatttggaagcaacttaagtgtccattaacaggtgaatgaataagaaaaatgtggtgcatatacacagtggagtattatttcgccattaaaaaaaatgagatcctgtcatttgcaacatggatggaactggaggtcattatattaaaggaaataaggcaggcacagaaaaaaaacttggtatgttctcatttattatatttgtgggagctaaaaaattaaaacaattgaacgtatgagaaacggtagaacgatggctaccagaggctgggaagggtagtgtggggcgggggaggaccccggtggtcggtgagcatggttaatgggtacgaaaatacagtttgaatgaataagatctagtatttgatagcacaatagcatgactacagtcaacaacaatttattgtacttttttttttgagacaagagtcttgctttgttgcccagggtggagtgcagtggagtgatctcggctaactgcaacctccgcatcccaggttcaagctattctcctgcctcagcctcccgattagctgagattacaggcgcccgccactacgcccggctaattttttgtatatttagcagagacggagtttcaccatgttggctaggctggtctcaaactcctgaccttgtgattcacctgcctcagccccccaaagtgctgggattacaggcgtgagccaccactcccagcttattgtacatttttaaatgactaaaataactggattgtttgaaacacaaaggataaatgcttgttatggataccccacttaccctgatatgattattacacattgcatgcctgtatcaaaatatctcatgtaccctataaatatgtacacctactatgtacccgcaaacattaaaaattaaaatatttttaaaaaattaattaattaatcaaattccattctaagaacaatcaagccgaaagtgaggaattactttaaatgctttgaagctcagcatcccggggttcttatccgtcactaattacctatacatttgcaggtctcagtttctttgctttgtaaacataggcttcttgtaaggattgggattatacactgaaaaagcttagcacagtattattactattatgctatctacattatattataggtgaaacactacagattataatacatacaatatatactaattgtattatatattgttattttttgtcattatgctatttactattgttctatttaataactctctagataatttaacaggacaaaggtacagaacaatctggcccttacaagccggcggagacgggtacgaattaccatgacaacagcgcgcgcctcgacattgtcggctcgcgcgttgtttgggaagaaaaagcctaggctgcgtgttgcgtcatcattacgcgctcttaaggtttctccgtggtgttttggaaggtcccggcacggctaccgtcgccccacgctaggaaattttttttttattttcaacctttgttacatagcactgaggctacaagatcgtaagtactgagggaagaaagaacaagcgagcgattgaacgttaaaaagatgccttagcatgcactccacctctgaaccttcctgtgtgttcttaatcctatcagcttcctctcagctgggatcgcgccgcgtcaacttccgggcggatgcccgccagcacggcctccgccgctccccttctttggcccctttgtgtccccgcagtgtcgaggcgcgggccctggcaggtcctttctcgaggcagggggcacggtagcacagggagcttctctttgtgggcgggcgcgaggcccgctagggggttatactggggaacgtgcctgcgcgtgcttgggtaagaggaggttgcatgagggtcagctcgtggtttcagtaaggaggggcgggcgggggaggcggacgaaggggagtgaaaagcaatggaaaattttaaaagatacccccgtccaccttctaattgttgcggcctaacaatgaagcgcagccataacagtcctgagccactggcatgtttgcgggccctttattgccttgggaataaactgctgtggcattgtatcgtatattgttttcatggccttttttcctctctttatttttcccctgcagatagttcatttaaagcccccatccctgcaaggtggtgctttctaccaatatgaatcttttcaacctggaccgttttcgctttgagaaaaggaataagattgaggaagcgcccgaagcaacccctcaaccttcccagcctggcccttcttcaccaatttctcttagtgctgaagaggagaatgctgaaggggaagttagcagggcaaacactcctgattcagatataactgaaaaaacaggtgagttacaatgttaaaattgatgtaacatcaaggacagtttttaaaagatgaaaggcagaagggattctcatttttattcttgatgtcatatatattgatgcattgtcctgcggtgtgcccttttaaatacagctttgggactgccataagcaccatgtaccctcaactgagcatccatccattgtcgcctcacttttatatgagttcttcgaatatggccccatggtggaagttgaaattagaatttagggcatccataggtcagaacggttgctattggaagagcgatgtcagtgattcagtcctatgataaactttgaggctatttgggcagacattttcattcattccagtattccctcaaaatattgatcatctactgtgagctagacattgagcaaggtgcctaaagacaacctctgtacacaagggaagatcagatcacatcaagttcttgcatccacctgacttcctggatgtcctcagaatgcaaatgagtaattggtattcttcatggtgaatgaacatttttaacctcatcagcagattgtcagagacaaaagtatttgaggataagccaaaaattaagatttccactcgaatctatgttcattgaacagttaactattagaggaatatatttgagctcttgttgtattataggaatagtgataagtgcttcaccttctgtcatttaatttgcacaataatcctacaaggtagatattactgacatagaggttaatgtgaaatgagattcagagaggttattaggaacttggtagagcctgaactcaagtcctggcagtatgattcctgagcataaactaattagttagtttcttaggaaaggtgaaaggaatgttggaagttatattttaatatttatttcagtaatatctttttttatgcaaaactctgtttcgtaaacagcttttaacttaatgtagcctgaaagattggtaacaca

SEQ ID NO: 1881576 - DNA, 4001 bp, Homo sapiens
caactcctgaccatgggcccatccattggtcctgaacaccctagccactgaaaccgctttttaattggcttaaatgggcttgtttattttccacttttctgtttattgaagtagaagtggaaactggccttcaaagaccagtctatcagcatctccttccttggctcgcctgaccttcaggcagtgcagctgcctgaactgagttaaaaatggactgtcaagctggctttaatttctgctgctctgcgtccgaatgtcctcccactgatctgtttatcacaccctctataccccttctgttgttgtttttctaagagttttatgccaggacagctgaaactgcctttcaaggttctaacctgcaaatccttctacacataatcctagagggcctgggagccaacactgggatctctactgtaggaacaaccttctccctccaggcatcccctaacgcaccccaagctgactctctgaacagatcatctcctactggcacaccaaagcgagaaaaccgtggcttaataactttggaagaaaaaaatcaggtttggcttcttgctcatgggctatgcgggcatgttgcctctttccagggctcctctgcctctctgtgtgttcctgtgcaggaccgcacggagccctcacagggattatctgctgatccccagcagaatataaaactctttatcttcagtctctgaaacctcttcaaaatatcccaaaccaaagatcctcccaacagggctcgccagaaacttctgcctccggaaatgacagttgctctcgatgcacggatagaggagtacctaagatcctactaatggtattgtgtgtttcttggcaaactcccgctcaattcaagctccccgcgctctggggcaaggtctaattagaagagtgccaggctcacccttcctgcgaagaaaacgcattagccacagatgtaagtgcacgaagaatgccagggagccacggagtgcgtggggtcattaaggcccttcttaaaatgctggcgagccttcgatgcgggaaaggaaaactagatctgaccgcttgcagcagaggaggatacagaaaccctgggaggcagagtagagttgactgggttagaggccagaaataagtgcataaatgatgctcagtggacgttgcaacagatttaagccaagtgttcaggatgacacagcaaagccccaggacaaggaaatgcacagatcgcttaaagcttcccgctgccgggagcagcctgagtgtgaaagcgcggacgctcggggaggggtcgcactgaacaatcaggttcaggctttgacgagtcgtgcacccggaattgcggtcccagtggcccgagatctaccctggaagcaacaggtgtccgctctaccacaggcttatcctcaactccctgtggctaggctcgggctccctggaagtgtagaggttgaaaggggaccagactctggaggggaggggcggggcgctggccggggaggggcggtgcaggtgggcgggcctgagcagggtggggactggacctataaagttctcgctgccccggaggctatgctactgcgaggagccggcgcagggtggcccgggaggggtgagcagggtgccgctggctgctggggtctgcaggtcaccgagtccccaggagaggggactcctaagaagccacctgcctgtgtttacccggcagcgagcgcgcaggcccccgcgaactcctggcaggtgagcgaagctgcggccttggtgggggcagcggggccggggggcgctccgcggggcaggtcgcttccaagttttgcgaactgttgagttagtttcaggttgcggctccgctcccagggctttgtcaaattgagttgcagaggccggttccacccctttggcaaaggagttcctccgctagttcgctcccgggacgccgggcattttaggagcctctgcacgactcgcctgcttttgcaaatccgtctcttctcgcctcattttttccagcgctcaggaaaggccgttgcgcctcgcgaaggaaacagagccgttgaccatggttgcaactggcagtttgagcagcaagaacccggccagcatttcagaattgctggactgtggctatcacccagagagcctgctaagtggtgagtgtccccgctgtccacccttctcccctcccaaggtcggtgcctctggatctattgggtgggcgggctttcgacttcctcccctacctctatgtaggaggtgccacaaaatccatctgaggagactcctttccaaattttctaacatcttctctccatgatagaaacaaaagtagcaaaagtagaatacccgagggctgcatctttctagtctggtgccagtaggccccttgggattaagttccttatcttacatgattgtgaagaacacagttatgtgtgttttagcaaatgtatttaccctgtaatcaatatcgcccctccccctgaattccgacgcacctatttgccaggtattcctcactctcccctgactccagggaactactgatctgatttttatcattccaagttagttttgcctttaggtaagtggaaccatacagtaggtattcttttgtgtctggtttctttcccgcagcctaatgtttttgagattcttttatgtccgttgcttaaatcagtgtgttcgtgtttattgtttattactgagtaggattttcagtcgtggatatatccattattccatttttaatgtgagaaggaaactgttgaacagcagcggtgcttgacttgctgtcatttggaattttaacagcagtttctaggtgaacacactgctctgacactaaagagctgtaagagcatagataaactgcttaagctcttcgtgtttttctcctttcaaggtgaagtggttgatgacctaatttacaggccagaactccaaacttacacgaagtggagaggaaaagccagtggctgatgaaggtggagtaggcttagagagaggagctgggagggcatctgcctgcaccttgttcatttgactccgtgtggtgtggcatcctgccaaggggtaggattaatttgaggtgtaggtgaccaaatgcagagctatctcttttcctttgagcccagctaattttatttccctaggactattttgttttgcttggctaagaaaaaccacccagccggttacaaatatcctcatgaacctcaaaggtcttctctgcacaatttttaattaaagaggctaaagctaaaattgggacctacaggccactccagtaaagacttaaagacacaaatttgatagatctttaatataactcttaaagctttaatacaactcttcaaacataatagtaaaaattctttattttacaatacatgtattcctacagttagaaagtaacaaccccttagtccaaaaaacaaagttataactttttattccagaagtaatgcatgttttctgtaaaacaaaattagaaaacccccataagcaagtaggagaaaagaaaagaaaatcaccaataatctgggataatcacaagtagatttttgatgcatagtcttcacggttgtgtgtgtgttttgtgtacacacataaatttaaagaaaagtggttacatcctatctactctatttatctaaacctttatttcatacatgaactttcattcatgagagcttaaattattcgctatattacctagctagttaacagttaattgaggtcagctgactctgaaacaaatacaagaaaaaggcagacatggtagatagaggtaaccaatgttgatatcttggtgttttttttctactcttaaattttttcttctgtatctaaaaagaaaactccatttcttacagattttgactactgggattatgttgttcctgaacccaacctcaacgaggtaatatttgaggaatcaacttgccagaatttggttaaaatgctggagaactgtctgtccaaatcaaagcaaactaaacttggttgct

SEQ ID NO: 1881577 - DNA, 4001 bp, Homo sapiens
acctcaagcctcttgcactgcctgcttccctccacataaactgctcttcctctgaacatgtgcacagacattccctcaggcatttttcagatgaaattttctcaatggacctaatcttatcatgtttcttaaaatagtaacccattcccattctcaatttcacttaactctgctttacttttttgtgcattgtacttaataccttctactatatcttaaaattaactcactcattttattttttgcctccatcaataaaaggtaagttccaaagggacaaaggttgttgtcagttttatgtatttttatatatatataaatttatgtattatattacatattatatttttatatattatatatataaatacatatatatatatcagacacttgagacagtttctggcaataataggtgctcaataaatacttcttgaatgaatgaatatgtctaaagacaacaataatgcaataaacacagagattaaaaaaggaagcactgaagaattttgaatctagttgagcagatataagaatatgaaatgttcagtaattaactaaatttaaaatcatatagaagagagtttagaagtcaagggttcaatgcattcatctcaatctatttgtgataaaataaggccgcttagaatgaaaagtaataggtaagccatgtgagtgttttggcttggttctaaatccaagctctaccacttattatctaggtgaacttgatgaatcccttcgatttatcttatccttggctaatttacctataaaataggacaataatgcctgttttacaggtttcttggggctgctcagatgagatagttcatataaagtattgatcctatcaaatgatttaataaaatggtgacattattaagatttttggagagaaatacagagggaaaagatctcactatcaaaaaatatatagcctttttaaatgcaacaaggagggtcacacattttatagtatgacttatttataaagagttgtaactcctttattttgttcataaataatctctccacaaaatagaaactcaactacatttgtagtttaaatttagtcccacaccataaattaaaaggccatgcaatttctattaacatttttattaatacaaatatttcatatcccatatagccaccatattttctgtttctctctctaacattgagggatataaagggaaaaatgtatggcttacatatccttgggtcacaaacaagcaaggatatcccttatttcatgcagacactcttggggcaatgtcctttttaatctggtcactgcagctctaatggcttctgataacccaggctccccttggaatcctcatggttggttcttggcttgtgctctcatcatagaccactgacccttgagtgtttaccatctactccatccagcctcctagcctggaattttccacctgcctctgctaaggggtcacctaaactcaccagaagcttcctgatacaaagccagctgacataacacacagagagttaactgggtactcactctatcagactgtaccactgtcctctaaagtgagtttgttataccttcttcgtacaaagtaagttaaccatatacactatatcagtttgtctaaaaaatgctgggttttatgatctggcccagtatgatttcttttactctcaaaaatattgcattctggacagcatactggattgtcacccaataaatgggtaagcagtaaaaaggtccttctcttgccatcccacttatttatctaaaatacctgtgcccggcaccaccccttgaaagacaaaagcacagagaaggaaattaagatgcaaaaactggactgtttaacttgcctccctgaggtcctcctcttctcccctccctcttccagactccaatctcctgctgaggttttatgacaaacgaaagtatttcttccacatttcagaagacatctatgagctaagtccttcaggctggattgctggtataataatgaagtaggtaaacaaatgttgcttaattccttctgtaaacaatagacttgcaaagtctgtactattgcataatcctgtttttgcatgtgaaaagctaacatttggctgtgtgccttgctttgccagggcttactctgcccactgggtcatattccaggggctaagactataatacctgcgttacccaccttaaagagttcccttttattaatttcctcttaatgaccttttcaatcttagatcaatccaactgagatctctttcaaaaagattaacttcaattacttaaatcccaaaggcaagaaagagtgctccctacattataaagtgaatatgtattaatggaaagatgaaaccagaactgaataggagtaaaattataaagaaagcaacagtttgtctccagattgcttacacatttctggtcagcatcttcctcaacactgaggcatgttcatttccaaatgtccttcctaccattcctcagacaggttattctttttcttaagccatgtattttgttcttgaaaaatattcttgggtgccattttatcttttactaatatctgctcccccaaaaagaaataactggggaaaatctaacaaaataacacagtctatgtacagtatactaaaagaccaagagaaatatataattttaataaaagacaacatagggattttagaaatttatttttaaaaatctggtttcttagaaaattggttttgcaaatatagtccacttgaataatctttctctaagaggcagaaatccaggggccttgggcatttctgtaaaaagattttatctgcacaacaccttcacaaatcacacaaacataacacacacatacacatacacaaagttacataattacatatctttatgcacaaaaaagtgagctgagttctgtgtgttctatgtgccaagcattgtgattacatacattgatagatctagatatgagtcaaaacaataagaaattaataataattattaacattttccaaccacttaacatgcttagcatggtcatgatatacttttatgaggtgatgtcattgcatttttataacaaatctgtgggataggtaccactgctatttatacttgatgaatgaggataaaaagactgacagaagttaaataacttgctcaggatcacacagctaataagtaggccagccaggatttaaacccagactttctgcttccagaacctgcactccccaccactaacctatactgcttaccagaaagggaaaaggaataagaagcagtcagtctaggagacaaatatcatgtgcagggctagaatgcacagcaggtaacacacaaccaagattctgaaagaactttcaggtgaagaagcaagcctaacatagcagtgaagctacccttccagtagttcagctctcagctctcctgttcttaaagagtccaagtcctgggtcattggtaatgagagaatattgtggcagacattgtcctttagccaactcagaagtcattttgcaactgctacttccattgctgcccactttagaattcagaaagctggatactcactttcccagactcaccgtaatgggtagccatgtgacagggttctgacctaagggccacaagtcgaaaaacaaataccagtttagagtttccaggaaaaaatttatttgttgacaaaaaaaaaaaaaaaaaaaagaaaaacagaaaatggcacatttgctagctccctccagccttaaacatgtgcataaagccaggaattgcagcagccaccttaagcccatgaaatgataaacctaaaactaaaaattacaagatgaggatggtggagcagacataacaaggatatggattctggatgacaccagagagaggctaacaacacccaccatcacctgcctagagagttgttatgtgagaaaaataaaccatatttcattaagcctctgtttctagcaggcataggccttaataaattggatcaatctttatt

SEQ ID NO: 1881578 - DNA, 4001 bp, Homo sapiens
caatctccattaggaatgattaggaatattcttatagaggctgcaggcacttggtttaaaacctgagacattgctgatataaataaatatgtatatatgtaattatctggcttatctttattttctaccttaaaaaaaatcaagtagaacaccaccctcttacccccaccaagacccaccaccaaatggcttgtacaattgagacctgtccttggtccattgaattaagaccctaacagagccagctgtgctgggattcaaactaatgaccgcagacacagaaggatactgtggcagctggtagttcttttttccctgcctctttagttcagattgtatgtgggcagtctcttagctctcagttgtattgtgtttgcttacagtttatactcggatgtattgtagactttttcagtacttcatttgctaatttcctgttcattttcctcatagggccattgctgttttctactttacagcatttgcatgcccaggcagcacttgttcacacatttcataatgtttaaatgccctctgcttataggtagtatcgccctcccacccatgatttgcatgtctttagcactccaattgcccttttccttaggcgtttgtcacccccgtcttccttctttccctgggtatcctggctattaatacattttctcaggagggttataagaataggggggaggagctgtggtttgctgtggggagggagggagcgggggttgggagagttgggggggatgggctggggggggtcacgtcttgatgattcttatgcaaacgacctgatggaagaatgtgggagctttcggtgtctgcggtgggttagtgagggaggttgtttatttttaatctttttcctcgtgcagctcgttggaatgactttctttattttagttgtaacagttggaggataatgcaaaggaagacgctgcctgggaattcaccgtctgtggaaatgagccccagagaggaataaagcagccctcaccttgctctccccacccgaacccactttccccacccgcctcggcccccaccccaacaccaccatcactcccttccctcccccccacctttcccccttttccacccaggtgtcggaccaggcggtccccacttccaccctgcaccccttcttccccccctgcaccatgaacaccaatgtctgcgtggagcccgggccgagcccggaggccccgggcttgcccaaggaaagccacttgcccgagggggctctgaacagccttgtggattacaactcggaaatggagcgctaccgctcctttgccacctccttctacaagaccaacgggggcgccttcccacaggcggccaagatcgcgcgcatcaccacccccatcttccccagcagcgccgccgccgccgcggccgccgcgcgcatcggcatgtccccctggaactgcgacaacgcggccaccgccgccgccgccaccgccatgctctggggcagcggcgggggcgggggcggcggcggggggggtggcggcggcggcggcggcggcggaggcgggggcgggggtggtgggggcggcaggaaatcctcctccgccgccgcctcctcctccgcctcctcctcctcggcgatcctccccgccggcggtggcggcggcggcggcggcggcggcagcaggaccagcatgcaccaccgaaacgactcccagaggctggggaaagctggctgcccgccagagccgtcgttgcaaatggcaaatactaatttcctctccaccttatcccctgaacactgcagacctttggcgggggaatgcatgaacaagctcaaatgcggcgctgctgaagcagagataatgaatctccccgagcgcgtggggactttttccgctatcccggctttagggggcatctcattacctccaggggtcatcgtcatgacagcccttcactcccccgcagcagcctcagcagccgtcacagacagtgcgtttcaaattgccaatctggcagactgcccgcagaatcattcctcctcctcctcgtcctcctcagggggagctggcggagccaacccagccaagaagaagaggaaaaggtgtggggtctgcgtgccctgcaagaggctcatcaactgtggcgtctgcagcagttgcaggaaccgcaaaacgggacaccagatctgcaaatttagaaaatgtgaagagctaaagaaaaaacctggcacttcactagaggtcagaggagatgatttcttgtttcccagtctccccccttccctcctcactccctctccccttcagggattcttgtctggcttcaagatgcagtaccccttctcagaagcttcattcaggtggtaagagttgtaggtggtttgcgaaaggcttggcctctccaccacccgcaccagctgcacttcacgtgacaccgcccttctgatagagagagtgccctcctttttatccctgggggaaaaataatgtaattgaagaatcagaagtttcacattcaatatgctcaatattttcccttggtggtttaaaatgccccctcctcctcattaaaaagggtggggcatcttgcccaaaggactggacacatcacatcctatacaagtttactggctaagttagtggcccatttataacagtgaggacacagtttgtggtacacaagcctgttctcattaaaaaaccggtaacaaaccacacagcagtattcaatgaagttgaaacacctggattcagaaggggatttcctacccttttctagaatcatttttctactcatcaaggcagaatgttttctattttattttctgcgtatctgatatttttggagaaagctgaaactgtgtaggaagcggatttctacctgcaaattttgaggagatgtgacttagaataaagggatacaattagttaatttcagggcagataagagtgattttgtttaaaaattattttatgtggttttagaatgaataatttctaaaactcagttacaaaaaaagtatttcccctgggctctgcattggacaaagtaaccattttgtggttacaaagttggtgtatacaccaagcacagttttggttgataccttatatggtcaataatagtttcttttacctataggtctttaaaacagatattgtacagatgctcactaaagtaattgttaaattaggttatgaattatgctaaatacagagattgatacctttgataaaaattttgtattgtgtcctgatcaaaacaaaaatggggaaaaatgaaaaatcacaggtaaatgactttggtggtatattaaacaaagaaatctggacaagtacttatagttagtctcgataaaatttacagggtagataattagatgttcatatatacatgagactgtaggtggtgggtttagcattctgtgctttaacattttaatattctgtggagtgagttgcaggatgagagtggctctcacaagttatcttagggttatctgtacattcttttaaaaattgtgagtactgcttagaggagtttgctttatgaactgggaagcagtctttaaaagaataaagagaagggttaaagatctttggtacaggtttgaacacaaagaagatacagttttttttttaacctttaattgtgtaaatcaaatgagatagccctctaggattctaaaaatatcagaattatgttgatgtcattattgggtatgatcagtttcatcaaaatattgcatttattcttctttataagataaatcagctctttttggaaagtttaactttactcctggatggtttattacattttctttggcaactttctttgtgcaaatataatagcaactataatgcaggtccatgtattttcttaggtggcaaaaaatagcttttgaatcttctttgccggattaatttattgtaacttctaaggactatgggaaattaaaattcagttcatactgaaattctctattcccagctgataaggacaacatggcttttatt

SEQ ID NO: 1881579 - DNA, 4001 bp, Homo sapiens
aggctggagtacagtggtgcgatctcagctcactataacctctgcttcctgggttcaagggattctcctgcctctgcctcccgaataactgggactacagatgcacactactatgcccggctaatttttgtatttttagtagagacggggtttcaccatattggccaggctaatctcgagttcctgacctcaagtgatccgcttgcctcggcctcccaaagtgttgggattacaggcgtgagccaccacgcccggcccacgctgtattattattgcttgtttcacttatatcactatgcttcaaagctatatcactatagttcaaagacctttcatttttcctttctgtaccagattatgtgacatacttcctgccacagaatagaggctcaatataatacgttctacattattaaagctatgaaatatagtgataatgctttgcctaatgtctgaattatgttactaaatatactattgttttctgggtaaaatctaggttacattaatagaaaacaaggaattatcattaattcgtgctaagaagagaagtgatgaactgggtttaagcaacatttggttcattcaagcaaatatggaatattttactgggatgtttaatattggagtaagtaatcaagtaatttcaatttctttaattagctaaataagaaaaattacatgccttagagtaaataaaaaagataattttgtgttctttgccaaacaaatttataattttgtatacttatattatctatgaaatatagcatattaatgaatattattatattcatagcacttcatcattacataacagagataacattggctcctctatcagaccagaactttattttcttcactacagaatccccagtagcaagtgctgaaaactggttaataattgaataattgattctgatgaacatgacttgccttggtttattctgcatttttagaagacaatgaaggaaaagaaaaaagaagaaaagaaaataacttgttagtaatctctaaatacaagcattgccttgtgattttttttagctaagattttatatttacatgtattttcaggttccaagagagaaagtatattgatcatgtttctaaacctttggatcaaattgttattatttgatattatgaaaaatccctaagatatgtaattctgcctgatcattaaaccccagggttttattattttttgtagactttgagttttatgaacatgttagtgttgctgctatttcttatatttgctttaaataattttttttctgattttgataggaatatacattttgatagtaatacagaaaaatacatagtaatataaagaagaaataacctatatgcctactatcaagtgataaatactatcaaaaatctttagttttttatatttatgcacgcatataaatgcatattttacacatatgtgaacattgttaagaccatactacatagatcctgcattgactgaatactgttaaaaatcttttacctactttttaatcatacttttttttctcattgttataatgcaattattactatgatggatattttatgcatcctttaagaattttgatgcatttgccaaaccactttccaggaaggttcttactgacatcctttctaattacatatgttcatataaacatgtggttgtctaggtagaacttttatcaacttaactaattcagaccttttatagtatttctgatttttacccagtgaaatttatttcttaaatattgactactgcaaatttgggggtttattgtaatttttttccaacctaaaaaatatgctattcgtttcctttgcagacacgatctacagtttacttctctttttataagcctggctgttaataaggaaattcaggaaaatgtagacatgtaatctagaaaattcaaattaaaaaatacctgtgcagctttaactttacataaatgttgaggtaaagtttagcgcttctcccatgaaacaagccattaaaccagtccagatattaccagtacaccagacagaatggtagcaagtaaatgtggactgctacccatttatttacctcacaaagcatggaatttccagcctatgtctgttccatccgtctcttggcccttcatgacttatagatgctaaatcactctagcatattcttgtaacttccaagtgtataatttactaatgccaactaaaaatgtatatatctctttggaagtgaaatttttctctacattttgtaatacatctataatgactttttttcctttcataattacccttgtcaaggtgtatagaaaatggattaaaattgcttagaaggttaaattaaaagtagattcactctgaagagaataatttgcctaggagagtaattgagatattgtcactaggtaaattagactaaatgcatcagaggttctaactcctgtgttaaatgtgttccagtatacacacaaaaaaatttaaaaaatattgtggctagagaggaaagcagaataaccagatattggaaatgcattaaaactgcataaattcatggttttgtgacatttcaataagggcttagttagcatttatctttgcttagtaaatgctttatttttttcatttactatttttctttagatataaaaattaatagtataaacaagattttaatgaaagaattttaaaagacttagaaacaactaagtctttttaaattattaaattttataatatgtgtattaatacccatgctctcaaacaatattacaaatatttatttgcaaatagtattacataaagggtcatgactatggaaaaatgctcattttgcattaaaaacaaaaaccgtatcaaggctaaacagcctgccaccaacatgtttagttggaaaatttcaacaataacaaacagtcatttcaaccagatgataaggtactgatttctaacagtattggcgaatcctttctgttcatcaacatgtatatgaaaatctcaaaacagttttattttctagttattggtatttgctttttgctattttgcccacaacataatttttaattattgtttatcactcataagtgctgactagttaattataagctcatttctatttatgtatgtatgttagtgtacaattaaaagaagcatgtgtaattatagactgtaattcagtaacatttttgatgagtaattatataatccttgttttaaaagataaggaccttgagaaattatatattctgcaggcacgctttttaaaaatcattaaggcaaaataggggacttctgagatgaaaatagcagatagaggtatttcaaccccgcttctccccaaaaaagttcagatccccaaataacaagaacaagaatcagaaaaatcaaactctatgatgaagctatattcaacattctgtaacttgaatcacaatatgaagtgtgaaggtgaaaagcagattgaagaaaaatgataagttattgagtagaggagaaggaagataaaatttaaatgcatgccaggcagagtggcaagaaggctatcaggacacaaaccactttgctcccacagaatcccagaaaagtttgggaattcagagcatcagaaacctcagaggaaatgaatagggagggactgaaatcgtgtttaattaaaaatattatttagagacaagattcctgctctcgtcttgtgtaaacaagaaactacctctccccaactcctaagagagacaggaagtttattctgtagaagaaactgaaccagagaggcaccaagtatagagatatcaggcatagagaagggcaatggtgatgtgccataccaagaataagaactaaatgagaatctgcatactgaaggatagatctcttccctacccatctgccttctaattccagaaccacagaaaccaggatcatttccacaatcatgagaattaaaagattcttctctgtagaagcagaactgtccccagagaaaagaactacagata

SEQ ID NO: 1881580 - DNA, 4001 bp, Homo sapiens
ggacctgcttaagctttcctaggagatatgtacagtattacgaatctctaagaggagttaaggtaggctgtctcttttttcctactgagcacttcatggaagtactccgtggaacccattttgggaaattctacattatgcccgtaggtcttaaagtctcccggctgaattgatacccttaagataggttttcttgaggttctgaggggaacaatgtgtactgggagtaaggttgtcaagtaaaatacagggtgttccagctaaattcaaatttcagttaaatcaattttttttctttttttttttagtgtaggtctcatgcaagatttgggacttacttaaacgattattcatagtttaatctgaaattcaaatttaaccaggaattctcgaattttattgctaaatctggcattcctaagtggagattagagcagaaagagagaaaactaagagctgttaagacaggcaggccgggccttggcctcaggaaggaaggggccaccctcaaggctctgtgccaaggagagagcccaggtgtttctagcccacttagaccagaggcttcaaataagacgggctactggcttcagtctggaaatctgtggggcaatttttgttgtgacagtgattgggaggttctactggcacttaatggacagcaatgccatatgtcctgtaatatgtgagacagtccagtttcccactccacattctttgtgtgtcctacctgacattcttaaatgtgctttcttacttcccttaaatgcaagcctattcacgatatgaaagtgctagctcctgacaacttctttaagtctcctgggatgctcatactccagtatttacatgttaaattatatgtcattttatgctgacttactttccttttatttatcctctttcctattgttaaagcaatgtgtttgtgtgtgttcaattatttacaattatttatacctataggcaatagtgtctgtgattttcattttaggagagtaaaataggtattataaaatgttcataataaaaatgaacacttgtttggtagaaataagaagtatcgactgagccacattgtttttcttgactataagtcaagaaaaccctgagttctgctctcttcttcttcgttaagtatatcgttcaaattaggtttggctgcatttaatggaaaaacaaaatgagattgataaataaaaataaaatcctaaatgccataccaactgactggatccttccccacttggccaaggggaccccagaaaaaccttaaaaactggccatgatggtacagaaggttggacatgccttgttataccccctccctcattaaccactattaggctttctttcttaagcattaaacaaaaaccagccctttggaaggacttgttccactgctaaattcaaccaacctcccttttgtggttttgacacaacaaatgatcagcattctttcctgataagagaccgccaaccacaaagtggttctggccatctatggatgctgtgcagagggcctttgtgtgctctgtttcacccttggatgtatagggcctaattgtaatacatttaaacattaggtttccaccccaaagtgaacatgggacacatgttgtattcatgttagtcctctacacatgcccatgcctcccctttgtgaatattcatagctcctcctataactgtcaaatatatatatttggccaccctgctcagcgtatatctctgtcttattcttcccactctcaagagcctatttctggcttctgactggaggtgacgcttgccagcttatcagaatggctgcctgcaggctgcaacgctttatgagaaataaagctctcctttccaaatttgtaacttcgttgttcttcagttgacaagaaaaagcagtggcttcaacaatacagcaggttatttttgttgcatgtaagagaagttaagaggtaggctgtcctgtgttgggaggccacttccttccaggtctctgttctgccatcctcaagatggctgtttggaggtcttggacatgttcgacactcatttttggaagccagcctccattctgaggaggcaaagcagccacatgaagaggcccacaagaagggaaccaagggccctagccaacagtctcaactgagctcccagccagtggctgcatccaaagccagcctggtaagtgaggctatttcggccatcaccttccagcacccaagctgtcactatgtgacaccagagaactgtctggtggatacacagaaatgtgataaatgataggtcattgttcttttaagcctctaagttcccccttcccctaccactaccaccccacaggtaggggggattgttatacagcaattgataacccaaacaacatttgtttattcattcatgtgaactcatgtgctaagcactattccagatgctgaggattcaggagtgaaaaggtagaaaaaatccctgccctcaagaagtttaccatctcgctagctccttcttttattcctctagaggctacaaatcatttttctcttcaagccaccacccctacttcttgttttatggggaagttggagaccattagaattgaatttttccaacttctttctcccacacacatttccctggatctacactgtctcctctcctccactgcagctcacggcagggccagaaccagcccatcccctcttttctgctatccagctaccagactctggatcctattcttcctttcatgtgcctttaacttctgttccatgagaccaactctttcataatttaaacagattcatctctacagtcctaaaaactagcacaataaaaagctcctctttaaccttatcttcacaatgtaccttttgctctttctcttttagccgtcacagccaagtttctacagattggagtcttctcattctttctctgttttctcatttccagttcactagtatataatggtcatggaaggtctctgtgggaagtgacatttaagctggtataataacaatttcttgattcttcatattgctggaactttcagcagcatttgcattcctaaccattctttccttcctcaactaaactctagggtaatctcttggttctcttcctacatctccaacccatgtatctctttttcttatctttctggccattctccatcaggtattgttcaggtttccacctttggccttcctgtctcactcaccttctttgcagccaaattcatccacatccatagttttaacccaccaccaaagtgctaatgaccccaaaccagtatgtccactccagactgctacccccagccccttggttcatttgcccagcttccttccaagcagctccacttgggtttccaccaggcagttcaagttcagagctgaatccaatttctccacctctttccactactccaagtctcagccagcaatgcttcttgatgaagcctaaaaccacagggccaacctagatttctctcttctttttttgtaccatcacccacatacataggaattttttaaaatcacaagatcctcttgattctatatccttacgatttcctgtctctattcatccatttccatccccactgttcagaactggccctttctccacttatagaagacttactggactctttaccccaaagcatttcttccttcaattagtcctcttctctactatcagagtgacatgtctaacatttaaaattgataagatcaagctgctgttcagaattctccaatagcctctgctctgggtcctgcttggtactttagttcctcccttccccacccagctttagtcctcccctggccacgtcttgggaccacagggatgtgcacaacttgaacctgccccaccactccccagttcaggtattctgaacctaaggactccctgtgtgcacggtgtggaaaggcctctgtgctcttacacagccccatgaagtattaggtacaggaaatttgctgcctcatccatttccc

SEQ ID NO: 1881581 - DNA, 4001 bp, Homo sapiens
agatcgtatctgcaaacaagtagtttaaatttttaaaaacttctcttaattcaaaaattcaaaaaaaatgagaaaagtaatctcacaagtagtggttaattatagaagatgagaggtgtggaggttttttttttttgtttggggtgcataagcttaaaataacatgaaaagcatgtcaaaaagaatatgagaacagagtggacttgaaatttaacatatcctactggcatcacttgtttatagaaaaataaaatggatcatgtatttatttgaggactcactatgctttctttgatcacatttttataggtacagcgtggtgttcaaacttttaatgtatggagaaaaatgaaacggctagaaaaatggcccagtacagacaattctatgctcaatccaacttgaacagaaactacaggatttggcctaaacaagactgaaagggaagcccttatcaggaaagccattatctgagaagataaaataaagtaatactttgtttttaaagtattatacaattcatatctaatatttcaacctcagcctttcaagtgttgtctaacaccaataataatattgccacccctccctcaaccggttatcttcttttcatatttctagctacttaaatccaccaagcaaattctggtttcgctatttctggatttaagtacattttctaatgcacccaggccacacgcaggaatggacacagctttcgctctccgcataagttttctagcccagggcaagctctcagaacgtgactcctcgtgcctcgctgcccgcccctcgctccccccactcccgccatcatcccttccgcagagttggctgccaagccgacacccacagattctgcattccacggcttcccagcatcctgctgtctctgcgtggaggaaagggtgctgcgaatcccagtttagataaggaaccccgtcttttcactactacaccgaagcatgcaggaatagggcgttgaccccattctcccagctcagggcacaggtgctaaggccgacccatctcacgggcctgttcaccagtttcccacactcagtacagatcctaacacggtttatgcacttcataaccatgcgtttgtgtttgtcaactgacaaacgagtgataatgacaaacgaatgacacaagggaaaccaacagccaatcagagcgcaaggttgtgttgccagcatcccagtttcagggacagtcaccgccaagcccgaccctgcaaagggtcgtaaccggacttcggggcaaacttcaggtcccccgcctgctagcccgccaaccccctccgccaggcagccggcgcgcctccaggttccgcccaggcgtcgctgagtggcggcggcggggagaatgcgcgcggcgcagccaatccgggggcgttcctacaccccctgcccgcccccgaccttccagagcagagcaggacactggcgccgcgggtcaggcagctgcgtgcgcgtctcctccaggcagcaaggggaacccgaggccgccggcgcccggaccatgtcgtctccggggccgtcgcagccgccggccgaggacccgccctggcccgcgcgcctcctgcgtgcgcctctggggctgctgcggctggaccccagcgggggcgcgctgctgctatgcggcctcgtagcgctgctgggctggagctggctgcggaggcgccgggcgcggggcatcccgcccgggcccacgccctggcctctggtgggcaacttcggtcacgtgctgctgcctcccttcctccggcggcggagctggctgagcagcaggaccagggccgcagggattgatccctcggtcataggcccgcaggtgctcctggctcacctagcccgcgtgtacggcagcatcttcagcttctttatcggccactacctggtggtggtcctcagcgacttccacagcgtgcgcgaggcgctggtgcagcaggccgaggtcttcagcgaccgcccgcgggtgccgctcatctccatcgtgaccaaggagaagggtgagcgggaggtcgtgggctgtgggtacgcggatgccgcggatgagtctccaggtgcgtgggggctgcagttcctgtgccccttccggccgcccgcgcccccaggctgcctcacacctgcatcctgaactaacaggtgatggtggtggcggcgcttctcctttctgatgcctttaagatcccatcaagtagtgacggacgcgtgacttgctcatactccaagatcataagtagaaaagtcatccggagattgagggagagtaatagggatggcggaaggacaaggtggcaagccaggttccatctttccaaaagtagccttcccttccaccagctgtgacctcggagagaaactttggcccccatgttagaaagagggaaggatattctttttaccttgtgggtttcgaatgtaagaatttaagaagataatttccaataagataaaaagtccagaaaacacagaagaagcctattaccaaatctccggctttggttcatagcctctgattcctgcgtatgggagtctaaattggacatttttgggggttggaaaacgtgttatctgctgcaataaaatgtccaatctaacctgtctctaccgtccccctttgtcttactggctggcttaggtctctgacttcttttctgagtcactcctacgcatcagtcaggtgttaaatgccttttccttggggaagccttttctcacagcctctgcaagtagggtagcctcccttgttagaaccaggtcccttgcccaagcacttttccttcactacacttttcaaaactgacgctacataactttatgaccttgggcctggatgtcagtcttcaccactgttctgacatctaggaggacagagtcattgctgtctgaaacatagtaggagttcaagtatctattaaatgaatgctatttcctgcccctataacatggcaaagaaagatctaggcttttcagaatctgataaagccagagttttgcatcaggattttaaacggaaaagacaaatattgtatgatccacttatatgaggtgcctcctagcgtagtgaaattcatagggacagaaagtctcagttttgcaagatgaaaaaagttctatggatggatggtagcaatggttgcacaacagtgtgacagtacctaatgccattaaggtgtgcacttaaaaatggttaagatggtaaattttatatgtatttcaccacaatttttaaaaaagaaaagaaaagcaggtaggttttctccaggcacccatgagctcagaagagaattttaggtagaagcagtattacgaaggcatgtagtggatgaggtgtgaactgtgacatttgtttttcagtggggcatttaaagtattatgatctttatccctactcatttaaaatccttagataatgtcttagtgttcatccatgttgtggcatatgtgaaaattttcttttgaagactaatattccatcatatgtacaatcatccctccttatctgtaggggattccttccaggacctcctgcgaataacaaaaccctaggatgctcaagtccctgatataaaatggtgtagtatttgcatatagcctatgcatatcctcttggatactttaaatcatctctagattatttataatacctactacaatgtaaatgctttgtaaatagttgttatacagtattgtttaaggaatgacaagaaaaaaagtctacacattcagtacagatgtgtttttttgatctgcggttggtggaaccaacagatgtggaacccataaatgtggagggtcgactgtatataccacattttgtttacccattcatccattgatagacacttgtgcctccaactttgggctattgtgaataatgctgctataaatagaagggggcaaatatctgagtccctaggagttacttgatcatgtggtaattctaggtttaattttttgaagaaccatcatactattttacagtgagtgcac

SEQ ID NO: 1881582 - DNA, 4001 bp, Homo sapiens
catcagtacagttccaggcaggaaaacaaataattaaaagtattttaaacagacgccattcactatggagaaatagttaagcagatattgaaggctagaagagcaaaaagggagaagtaagattaaatcagaaattttaaactgcaggatggctaccagtccttgagctggtggaacagaaggtagaagtagtagtatcatagcacaagagcaaactcactcactgttaagggtgtcactttcttaaggtaaggaaaggaggggctgctccaactggctctagactttgtaagggacatagtcatcgctctagatgccagaagcagagagtaaaataaatggacaatagctttcccatgttccaccttttgatttcctgcctgtgcctcctgtgggcagagtcttacaggaagccatctaacaaggaaggctgggaaatgtagtttgtggactccctgcctagccatcatctcgaagcagagggtaggtgagtatggggttcaaagattacaagcaagtaacctgcatagcaacttatcaggaaaaagaaaaatcctccattagacagtaaactcataaagaaaaaccgactttagtttttaatctttgacagactttatagactctagggcctatcacagtgcttgccatataaaatgctcaatcaatatcaacagatatttaagtgaataattgcctattctcaccattggtaaaatttaaatcagtattcaacttaaatgattgccagataatacaactgatttttaaagaaatacactttaactcatatggacataaatattttacagtatccaagtagtgctgacattactcaaggaattgtttaggactacttgttcaaaattgtctttcagacctagttcttcggaaatacattataattatttctataaaagtgggcatgactaagtagaatctagtcttgcccacttttggcccagcctgactcaactggttttgatctggatgacttaatattatttctgaaaattaaatctactctgaaagaacagacttattactaattttgttaagtacttaccgcgatttccaattaaacttgaggcaacatgatgtcttactccacttccgccactgtaggcttgaaataagatggcaagtgtggtgaataataatggtaataactcaaataagactttggcctttgctgccatcctatgaagacagaatcaccaccccccagccctcacccctcacccccgcaatccgagtaatttcaggaagctatttgtttccttatccttgggttattttcagttaagacaaatgtacaagcacaaaaaggagtctcttagcttctgactcctaggacataaaccaagacacgctttactatcacatactcatttccctaaagggaagaagccaaaaaatgcatactatagtaaaatgggaaacatttcaagggacagtaaggtgtggggaagagtgggcagatgttgtggctgttacctgcgtgaaggtaaataaaatattaacaataacaagcacttctacaccgctatgtgcaaggtgctatttatcctttcaatcacagctctgtgaggtagacacttatgactcccattttacagatgacaaaactgaggctcacgaaggtggttaactagccaaggccactcgtctaggaagtgagaggccaaggttcaatcctaggcaatctggcttaagtttgtgttctgttaaaaaaaaaaaaattaaaggttatctggcaattttttaaacgtcaggactgtcatctgtggaatcaattgaaaagggaatcaacacttcagaaactgtaatacaccaagggaacctgctatcctgggaaagagagataaaggagaagtcagctgactgtcctccttcagactagctcagaccaccccaacctgcgagggccctggagacccctgtggcgcaacagatcccttactgggtcccttccaagtggcgtcacatagcaagcgtccagaaggaggcgggacttccgggccaagcgagccaattccggccgcgccggaagtctctactgaggaaagctatgaggatactctgttcgtaagctcccggtgaattttgttccacagactcggaagaaaggttggataagagttcactggagattgacaagtactcgggatagtgaaaagccggagttggaacatggatagccgcttgcaggagatccgggagcggcagaagttacggcgacagctcctcgcgcagcaggtccgcggccctggtgtcccctgtgggagggatcgagaatgcgagtgcgcggccgcctcctccctccacaccccgcctttttctgtcccttctctacctgccgctgttaaggcctttctggtcctgcgatcttgatccctggttctgcctttgtagttctcaattttcgcggtgtcccgaatgtttttccagttccttccgcggtctttgtggtgctaaaccgaatgccaggattagcctttaagctttgtggaactcccaccgagtgtctggcatgttcacgccaggatgagtgtcatgttatcccctacatttctcttcactattaaatggtcatctatttctttcttttcttcgtcgtcagccccaaattcttgagattgtggtttcattatgaaatacgtttacagtattttctttgacatctttctgaagacaacactggaagtagcctgagtgtaaattttagattctgcatcttatatagagtatccttgtcacatccacagttaatatttgaaatcttactctgtgttagtcacaataatctcctgaaacaggtattattaccttcacttatcaagtaatgaaaaaggctccatacgttaaggaattttactcctggtcgctcacttctctgctgggaaatagaacctaggtttgtctccccaaagcttgtcttctaaaccattgtccttcacttctttcttgtgtatgagtaagttaacatttgctgattagtagagtgcacatgcagaaaatacagattgtgcacagttctacttaaaatcgaggctgtattttccattctactattcagatcagtaaaagtgataggagcaatgctcatagagtgtaattagtcatcttgcagttatttttcagtaatgaaacttggttttagtaaatggacttctgaaacctatcctctttatggtctgatgaacagatttgtggaatatggctaaaaccgtggaaacttggagtcagatttgttcctttgttccttatcccgctggcattacgatcttgggcaaatcaagtatcctttctaagtcttcttttcgccaacttcttttatcgtattatcttcaaaaatgttaagtagctctttgttgctaccacagaagacgttttactccttaatattgaattcaaacttctatttgactcaatatacattcataggacaattatttgtttagtgttttacactcagcagatgccaggggctctaccttttaaagtcttttatgaattggttgcactctacttagccagccttataaccattatttgtttacatttgtttgtattttgcaaaattttccaaactgccaaacaaaatttatgttaccattttaaggtagtaaagttcagccttgtgtctataaatagtaagacttagcttgagtaaaactggatcgatttttattagagcatagaataaataagttatataagctgatgcctacaaaatgtttaacatggtacccacaaccctgtgcaaacactgtcttatctgccttttttagttattgctattgcaggttgaatatctcttatctgaaatgcttgggccagaagtgttttggatttcagatttttttcaggatttggaatatttgcatattacttactggttgagcatgccaaataccaaaactcaaaatcggaatgcttcagtgaccatttcctttgaatgtcatgtcagtactcaaaaagttccagattttggagcg

SEQ ID NO: 1881583 - DNA, 4001 bp, Homo sapiens
ccatggagataagcattcgagagagaaccaaaggatcttgagagaaccaagaacatagaaagcaaggactttagaaagattaatgtggaggaactggaggaagaatggcgatgagtttaacagtgtgatcatgaaaggccctgccggtgggtaatgaaaaattcttagcagagaagtataatgatcgtattttcacgttagaaaaattattaatagaatggaggttggactggtgtgggaaataactagaggatatcttgtgaatattgcaatagtacaaggaagatgagtcataagagatggtgattacttgaaggactaagacagtgagagtggaggggtggacctgagagatacttaaggaaataagagtcaaaatttgatattagaaaagaggaaatgaaggaaaagtaacaggggtactcatagatttctgacttgggcagttgcgtgtcattttctgaaacagggaatggaaatggtgtaggttccagatgggtgaagagggacatggcatcaggaacagattatagtaaagatgtccatgtcaatttgggacatatttaagatactgtgtgaaatccaaaggatgttgcttaaaaatgtccgacgtatagatatacacctgagagttcttggtgcacaggacacgtggtaggtaaatccatgatgggaaagagactgctcaaggagacatggattaacattaaacagaaacagcaaaagaaaatggagtgctggcgaacagagaccacgcagcggaaaaacagtatttaaagtgcaccagaaaagtagctgcagaatgaggagaaaatgacattagagaaacggagggaagagttaatggtgtgctcttattgttttaaaaatgcagagtaggatctttttttcccccacccctcccaaagtttttaatattttgagggcagaaaccacggctttatttcatcctatttctgacagtgcctagttcagtaaagggaacatagtaaatgctcaataaattcttaatgattcagcctcagacattacaaacgggtcctatttgtctcctgtatcaacgaccaatatttcttccccctctttcttcaaataaacttttagaagtgcctctgggtttactgaaatccatttttacaattagtatgttcaacttacaccagctttggaatgagttccaaaaccttctttatttacttgagagatattcggtatcagtgacgatgggtttttcctttactactattcctaagaaaggtttattcaaaatcaaagtttagcccaattcccagcagtaccttttaacttaaaacctgttcgaaagcacggcaaagaggcggacagacttttctgacaatcattaaccaggtcaacagacttattaaagctatctaattaaaggcaagaaacaactgcttggggaatacacattcacgccacaggaagccatttaactgcaaatagatcgtctaacgactcacggaaatctaaaggaaactgcgtgtccgcatggggttctgatgccaaactacggattgttctctcaggtaacacctaacctaagtgaagtccttggtggatccgcgttcttgagcttagaaaataccgaatgaactaccaagagcaccagaataatcgcctcctcctgaagaactagcctctttctcaccacaccagacagcacgtcctacaaccacctttcccccaacaaccaaactccagcgccaagctgccgcttttgcagaaatgttctatctcttggtctcgcgcgatctcgcgcctccgaggaagccaactgtatcgcgcacgccatcaaatccccgcgggaatagaattccgcaggtccagaaagccgggaaatcgcgagcggaggcggagttacctcggtgagcgtgaaggcggagcccgctccgaggggcgggctcgaggcggggagaggggcggggctccagggacctgttgatcgcaggtgtcactggcctgactggtccctgggtattggggcgtatgcgcatgctccgctcacagggtcgggctctgggcggcggagaccagccgcctgtgctccagttcccggtgagcctcggtactgtggcagcagtcagtgtgtctggcgggtgtcggcgtgaagcggggctgggccagcgggaggtagctctgtgggagtggaaggcctgtatttctctacctggaccgcacgctcctcgcgcaaggagggtagagctcaaggtaagtctccgaaactagccctctggttggagatccagagacctgcgacccccgcgggcctgaccgggacactctcattctagccccagagctcgtctctcccctcgcagcccggcgacctcctatggccccggccctctgggcacacacacactctctttgctgggcggttcagacgccagaggtcacgcagccctttcgccccttctcgccgcgtctggcggagatgcctctggccaggctggaggcgctcgcgaggcgggaggaggtgctgtacttgttgggtcctggatgttattgctgccgtgtttgagggcggcgacaagctggagtcctgctgggattgtgagtaatacccttacttggctcctgcccctggctgtccaagccacattgcctcgcctgagcacacagttttttacttaaaggggtccaggatggttatgctccctccttggagaagagagatgactggactcgtgagattcttggggtggtggtttctcagtggtagtggtgatgtatataaagttaatgtttagcttctaaagggcggcttacggggcatttaccaaactatttttaaacagtgttggagaacaggaagtacttgcacaggtgtaatagggagggtttctaaaacctgcaatctgaggatgttttgaggtttgtaaccctgctacaaggttttctttatcaatgcaaagtatgcagggaattaccagttggacagcaaagttttccgaaagtttccttatctggaaatagatatatatatatatatatatgtgtgtgtgtgtatgtatgtatgtataaatatatatatttgcaaagaatatctaaggctatttttgaggtaggtttaatagtaaacttaacctgtagtcccagctactcgggaggctgaggcaggagaattgcttgaaccggaggttgcagtgagccgagatcgcgccactgcattccagcaggggcgacagagccagactccgtctccaaaaaacaaacaaacaaacaaaaaaacgcagtacacttaggaaggtttttgtgattaagatctgattcacttttagttattaaaagaaaaggcttgctgattttcactatttaaaatgagtagcaagtgctaacacaaaatgtctgttggaaatgaacttttagttacattgataattgttattttctgttcttttcagttccgtgatgatggtctaagcaaagacccttcgtcctgttaaagataaattaaaaaaaaaaaaaaaaaaccaaagggaacaaaacttactctgcaaaagtaatatatgatttacctgctgttgtcataagaattccaaatagacaaactcggtgtaagtaggagttaattatagtctgagaaataaggtttttgttttgtatctcaaaggcttttaaaataagctccttgatacaatttgtgcaggttcgtgtttactggtgataaaccatgaaagtgatttattaagattttttcattaatgaaactgggaggtttgtgtatttcttcctaacgtgtaaaaaagagactaagaactggcctttcctttttcctaagaattttaacaaatatttttaaaaatgtatgtagattgtgtaagttcatggaatttgatactaataatcaattcgttaatattttcactaaacaatgcataagatagttttaaaaaagatattttaatgggaaggtagacttttccaactagtgtattcttttccttaaaaaaaaaaaaaagaaaaatcacaatactctt

SEQ ID NO: 1881584 - DNA, 4001 bp, Homo sapiens
ctgggtgctgagaggtcagaggctgccaccttgaccctccagtgagctggttggcactcccctgtccctggacggctgatctgacagagtattggtcataacatgcttggactctggccagttccagtgtttgttcgcttcagttcctgcacttgctcgctcgcaccctccctcctgagcggaggagtggccagcggtgggcagagtgaaagaaccactccagttcctgcctgcgaagggggtaaacaaagtatcccatcacatcaagatacctctgaatatgaacagctaggaatctgatggctgcaaagatgactattacccaaattgtgaagaagagaaagagaaggaaaaccagaaccctgaagatagacaaaattattatgtgcaagtagccaatgacatgaggcagcaggaatttgacacttttgataatgaggcataccagtggtcatcatcccaacctacaggagttcaagggcatcctaaacaagtacatagccatattagtcttaatgctactataggaaattatataggaaagaaaaatcttttcaataaatggtgctggaaaaattagatggacatatggaaaaagattagtctcaatccttacctcatgctacacaaaaaactaattttgagatgcatcatggacctaaactcaaaagctaaaactaaaaggcttctagagaaaaacagaagaatatcttcatgactgtggggttggcaaagatttttttccatgagaccgaaaagtaccaacctcaaaaaaactaacacattgggtttaatcaaaatgtaaaaccataagagacaccgttaagcaaatgaataaacaagccaggaccaaaagaaaatatttgtaatacatacatctgacaaaggatgtgtatctaggggatggaaagaattcttacaactcagtaataaagataactcagttttaaaatttgtcaaagtgacatttgtaagcaaaaaaaagaagctcaacttaaaacgcatactttatgcaaaaattaactcatgaacttatatgtaaaatataaaaccataaaatgtttaggaaaaaatagaaatttcaggacttaggactagcaaataattctttgacgtgacatacatcttcctcttgcacaatctgtaaaagaaaaaattgacaaattggatccactgtaaatgagaaagagacttaggcaaacattttagaaaagaaaaaaatacaaatgaccaaaaagcacatgaaatggtagttacacaagtatgtacatttgctaaaactcatcaaattgtacacttaagatgtgtgaatttcaatgtatataaactagtcttcaataaaaataaattttaaaaaagaatatttttataagttgaacagagaagcaatattcatgttgataaagatcaattatttcccttcctacctaacactcactgtcagaatcataactgtgagattcagaaaaacaaagataaagaggacactctaaaagtttccaggaagaatttctagttcttcttaaaaaaagaaaagaaggaaggaaggagggaaagaaaaataagcaaataaagaaagggggaaaaaatcagacatctcatcagccataatgaaagctagaatatggtagggtaaaggtcttcaaggtttaaaaaaaaataattcctcttgaacctagaattatttactcagtcaaactatcaacaaagtgtagtgtcaaaataaattcattttaagacataaagggattcctgaaatctacattactcgtaccttaaaataattttttcaaattaagatataattcacataccatgaagtctaccattttaaagggtacaattcagtcgatgttaatatattcacgaggttgggcaatcatctccagtatctctttccaaaacatttcatcacattataaacaccgtaccaattagcagccattcccattcctccaatacccaaccactggcaagcacttatctcttttctgtttctatggatttgcttattctgtacatttcctataaatggaatcatacaatatgatgtcattatcagcattctatttcttttaatggctgaataatattccattgcatgcatatatcacattttgtttatacatgagccaattaatagacatttgggctgtttctactttttggctattataaataatactgctgtgaagatctgtgcgcaacttgttgtgtgagcctatatgtttaattcttttgggtatatatgtaggattgaaagttctgggtcatatagtaactccacatttaattttttgaggaaccaccaacctcttttgcacaaaagccataccattttacatttctaccagtgatgtacaagaattctagtttttctacatcctcgcaaacacctgttattgaccatattttttattatagccatcctagtgggtgtgaaatggtatgtcattgtggttttgattggcatttccctaatgttatgatctgctcccactccctgaccccaatattaatatgttgaaattctaatacctaaggtggtattattaggggttggaaagcctttgagatatgattaggttatgagggctctaccctatgaatggtaatagcgcccttataaaggaagcctgagaagtgctcctttgtcccctccatcatgtgaggacaccataagaaggtgccatcgatgaagcagaaagtgggctctcaccacccactgaatctgctggtgccttgatcttagacttcccacactccagaactgtgagaaataaatttcttttgtttataagctatccagtttatggtattttgttatagcagcctgaatggaccaaggagcctaataactaataatgttgagcatctttttatgtgcttagtagccatgtatatgttttctttggataaatatttatccaaatcatttgctcatttaaaaaaaaactttatagagcaatcttagattcccagcaaaactgagtggatagtacataattccagtacacaccctgctcagcacatgcagactctgctcccccaccgcctgcttcttaatcaacatccttagcagagtaatacatgtgttacaatttatgaacctgcattgatgtatcattatcacccaaagtccatagttaacattagatttctctcttggtgttttacattctatggatttggacaaattataatgacatgtatccaccattctagtatcacagagtattttcacttccctaaaaatcctctgtgctccacctgttcatcccttcctccctgcaatttttggcaactactgatgtttttattgtctcccatagttttgcctttcccagattgtcatatagttggaatcatacagtatgtagactttcagataggctgctttcacttagtaatatgcacttaaagccggagtgtagtggtgcaatcttgggtcactgcaacctctgcctcccaggttcaagcaattctcccgcctcagcttccaaagtagctgcaactacaggcatgggccaccacgcctggatagccctctttttttttttttttttttttttttgagatggagtcttgctctgtcacccagtctggagtgcagtggcgcaatctcggctcactgcaaccttcgtctcccgggttcaagcaattcttctgtctcatccttccaagtagctgggattacagcatgcatcaccacacctggctaatttttgtatttttagtagagatgaggtttcgctatgttggtcagattggtctcaaactcctgacctcaggtgatctgcctgtctcagactcccaaagtgctgggattacaggtgtgagcgactgagcccattttttaagtgctgaataatattccattgtctggatgtaccagacacctggtttatccattcacctactgaaggaaatcttggttgcttccagattttggcaattatggctaaagctcttataaacatccatgtgcaggtttttggatg

SEQ ID NO: 1881585 - DNA, 4001 bp, Homo sapiens
tccccactgttgaggaagggacctggtgggaggtgattagatcatcggggtggtttctgcatgttgttctcgagataatgagtgagttctcacaagatctaatggttttgtaagtgtttgacagttctgccttcacgggtttctctcacctgccgccatgtaagacatgcctgcttcctcttttgccatgattgtaagtttcctgaggcctccccagccatgtggaactatgagtcaattaaacctctttcctttataaattacccagtcttgggtatttctttatagtagtatgaaaacgggctaatacaaggggtgactgggacctgaagtggcagttttacactcccagccattctctcttcaaggtacacacaccccttgaagcaggcaggtgtcttcacgggttcaggcagccgtcaagacactgtaccaagaacacctcctaccaccttcagagcctaattggccccatcctcaggctagattcttttcctgggatcccttctctgcaagctcttctagctcttttcccaggagcctcctcagcccctacgttaatctgtttatgcaaacataacacagaaggcctggccctgccctcatgcctggcacaggttaggttctgacaaagcacctgccatgtaagctccctcatcctgtcctgagtgtgagattctagcatagggtagaaagataccaagaaagcacaaaagcttaacgtttgtggctctgttttatgaatatgttgaaatattcccaatttcaaaattgctgagtcaaaatgtcatgaatcccaggatctagtgggaattataatgcaaactggtccacaagggaaactgtatcaacggccagaatgaagcaaattagaatcacttcaataatcaaaagttaatgtaattctactgggtggctttataaagcttaaaaagtttgtttgaatctatgttgtttaaaaaacaaaattggccagccacggtggctcacacctataatcccagcactttgtgaggctgaggcgggtggatcacttgagctcgggagtttgagataagcctgggcaacatggtgaaactctgtctctacaaaaaacatacaaaaaaattagctgggcatggtggcatgcacctgtattcccagctactactcaggaggctgaggtgggaggatggcttgagcccaggaggcagaggttgcagtgagcctgcactccagcctgggtgacagaacaagaccctgtcttaaaaaacaaaaatcaaattgaattaactgccagcaggtttatatccccttcaacttctaccagaaaggaataaattctcagctccttttatgccacttgacaacagaatgaggcttgctcaaaaaagggatagctcagagaaggaaagactaattttagctatatagaaactggggtcacatgtctgagctctgacagcctcagtggtcaaatcttgaattcatggaagtctgggagaagatgggtactttggaatcagtgctccaaaatatggatcttagctattttatatgcagatggtgtggctgatataactgagtgcttgcaatgtacttcatactttacattatcttatctaattctcaccttgcaagtaaggtgtcaatacccccattttatatgttgagaaactttttctcatagatacaaagagatgtgcccaaagtcgtcagcaaataagagcagactgaacccaggtttatctgatttcaaaaaacgtattctcttcccactacatatgttgctttcccaactactctggaaggtatgggatgcagatttcattctctggatattcttaccttggatttttcactccctttggtattcctggcaggtttcctgaggtgtgacagacatcctgaagaggcactcagcacccattctcaactccttctggagtgtcttcctctactgcagaggcgggaactctgagagccatttttccagtctcacttgcagctggggttctaactgtgaattaggttcaaccaattatatgcatttgcaagagatttggaagtcagaatggaggcagaagccacttcctactgattggctgtaaacactggcaagcatgattgtggtaacaccggggctttctgaagccatgtctcaaagttcagccactgattgcatgggtgtcgagagacattaaagtggtggtgacagaactttctaatgaacagatttcagctaaaacaatgtgtcttcggagtcactattcccagtgacaggctcctgatttcctccctttacggtggtggcagatgtggaagcacccgcaagccggctcctccagccttcccaacgacgttgtaaacacctgcttctctctagacaatgactttctgcttaaaatagctggcgtggtttttgcttcctgcaactaagccccattgatatatgctgttttccttctttccctctaactgctggttttcacaacagccaaccccgcaatcgatcctttaagctctaaaatgaaagccttgaatatcttcatcactccatatcctgctttgtttttctccatagcagtgattgtcacccaaagattatttttattatttgttgattgtccaccttactaggatttaagctccattagaacagatactttgttttgttcacttctgtgacaactctctgacatttagaagagtactagaaaatagcaggaattcagtacatagggttgaatgaacgaaatctacctttcttaaccaaacaccacattaaattcatgcattaatagggtcatcgacaagatatcctcaataacacctcctcatgaaacatttacctgggttttaaaaatcctccaaaaacacaaaatatcatttgtgctatgtaactcagcattacatttaggtgacatcccctcccagtttgcctgagacgttcctggttttagcactaaaagccccatgttcatgagaatcccctcagttctgggcaaaaagatgattggttatcctaattaaatatcttagttgctgagaaaggcactgtaattacattactttagatcaattttgcaaataaaagtttgaagacacaaatccacctgtggtctccttcccatatcagctgtgttgcacaggatccccggaaccatcaggtaaaatccaagcaatggctttgggttgtattttatgttttttactaaaatttctattgcttgtaccctgaatatttcagagctgagcctgtgaaatcttttctgcatctcagttacattcgaaacatgagcttcccagagaaaagatactgcagcataaacatgtgctcttgagtcacagcaccggggaagtccccttgggatccagcagagtgaactctgcagaaaatatggatcaatgttaattctggggatgaataaaggcttagtcatcaccttcccccgattaaggaacgcactcccatctcgctgctaacattatcctgaaacttcaggcagtgagttccggtgcaatgtgtggattcgaaatgtcaacgcttctgaactggcatattagagaaaatttggagaataagagtattctcagacacacaacccaagctgccagaacatcttggatatcctctccctgatgattcatgtggagagatgtttgggtgtttagattttaaaatatgcttcccaaccaaaagtgaaacttaaagatgctatcactctggagtttttttgcacctgcaaaacaaaaatttgtgtttttaaaattaactgttttcgcgacacagtctgttgcatgtgatattggtgtttctccagccaagcatgtaaggggttaactgggcagcagttgcacaatcccagcacactacattccacagcaccagcaatctctgtctgaacgtgtttataaagcagatacggggaaactgaccaaacctccaaagggcagtgtgcttacaggaacagaagcacacacactgcttttcttctgaagaaacttggtcagactccaga

SEQ ID NO: 1881586 - DNA, 4001 bp, Homo sapiens
acactcatggagctgtcatctcctaagataacaatgcttacttctgaaatactttctgaaggacctgcctgaggctgttttacagttaactttttttttttataagtaaaaggagtacactctaaaaaagtatagtatagtaaatacataaaccaataatgttagatagttgttcattaccattattaagtgtatgtactacctataactgtatgcacgatatttttaaaagactggcaggattgacctggcatggtggctcatgcctgtaatcccagcatttttgaggccgaggcgggcagatcacctgaggtcaggagttcaagaccagcctggcaaggagatgaaaccccatctctacaaaaatacaaaaattaaccaggcatggtggcagctgcctgtaatcccagctactcgggaggctgaggcagaagaattgctcaaacccggtaggcacagattgcagtaagccaagatggtgccattgcactccagcctgggcaacagagcgagactctgtctcattaaaaaaaaaaagactggcagcatagtgggtttatttataccagtatcaccatatacatgtctgtaatgtgttctgctatgatcttagaacagctgtgacatcaccaggtgacagaaatttttcagctccgatataatcttatgggactactgtcatatacaaaatgtagttatgtgatgtatgactgtactagaaaccactgaatatagtgatcagttcacactgtgggacatacgtaggaactaaagccaagtaatggaaaagtaactttatatgctagtttcatgctaattctggaactttttttttttgagtgaaatattgaataaagtaagctgcaccatttaaaaggtattttctgcccctcctgtatatgcatgtgtgtgagaggagcgttatttcgtaatttaattattataagtaaaaggcaactataatgcaactacaatgcaacttcactataattaattgaagagtgatgtcttatttgataattacatgagaatttattcctttgatatgaagcaaaatgttcatctctctgtgtgttaactaggtgttctatgtgcggtgctaaaagaagaaaaataaggtttaagctagaatttgtcgcatgtattagaaaacctgaattaaaacccttggtctacagctctttactggagtgactcagtaattatataacattataaagttttgcttactcatctgaaaaataaaggtaaaacagtaagaattaagtgaaactgtacacacgtatacacacaaaaagagagagagaggtttagcattccaaatcccaaaatacgaaatctgaaatgttctaaaatctgaaactgtttgagcactaacaggacactcaggggaaatgctcattggagtatttcagatttcaggttttggatttggggtgcttaattagtaaatacataatgcaaatatcccacaatccaagaaaatccaaaatcagaaatacgctagtcccattcatatcaatatcggatccgtgtgtgggtgggtggagggggtgggtgtgtgtgtgtgtgggggtggatgtgtgggtgttggggatgtgtgtgtgtgggtggatgggtgtgtgtgtaggggtgtgtgtggctcgctgtttgtatgtgtatttttaaagtattacaattgctatttttgtttaaaataaatatgaattcagtacactaatttgaatttataaatatatatattacacaatgtttgaaagtgatctacaagtaattcactgtagcataataaaggcacacacacacacacacacacatatatatatatatatataaaatttttacctgaaaaacttcattggatatatggaattcaccttcactgtgggtagcatataatcacaggtttactgactaacatcaaatcacaaaatgaaatcaggaaatgtagcccatgcttcgtattaccaaattaatttttccatggtgtttttattcactttttctcccattctttctttccacacatatatctgcgtgtgtaatatttttttaaactgaatccagaaccgaaatcaatgacgtattagtaaacagtgattctttcaatggtaagcagacctgtaccttctaaaagttccagatctgacttcttaagcaattgtggcagcatcacttatatgtaacaataaagaaagtatcataattactcaaggttcggaatcattgccagcgtattaatcaatgggctctacttagctgcgtgggagaaaaggaagatattgatgacaggacgtctaccttcagttgcttttattacatctgttatgaaagaggccctttctaaccttcacttattcatcttctaatggcataagagtctttacttgcaactccaaatacctagaatggctcctctgttctgatcaagctctgacctcttgaacttgtccccagtaatcaaatgggtacctaaggccctggcagatggttcaggctgaactacttaaagttcctttctttggaatttagaattaaaaataagaggttccagtctcagctggggttagtttcttgagctggaggcatgtaaaaagcacatgatgagccccgtggctccgtatgaactggagagcagggaaagctggtttgcagggagacaaggaagcagatgcccaggaagacacaaagaaaagagaagggcggggatgaggcacaaatggggaaggggaaagaacagagagagagagagagagagagagagagagagagagaaagagagagaaagagatttccaaattctgtaaggctcccaatttcctgttgcaatacctgccttcccttgatttccaaaaaaacacatctgtgtccttgggacaaattcttttgtagcttaatctagcacatgctggtgtttactatttgcaacaaaaatgttctcatttatgcaaacagctaccttcggactgacagctctcatcaagtgaatggatgtgtccaaagcagagaagacacttaagcaaatggtttaaaaacctgtgactgctcatacatcggctctcattgatatccaaatatttctgggattaagaggcacattccagtccaaaacagccccggggaacaaagcacattctccaaccaaccccaggttgcaaatatcaagaacatgaagtttcttggggcggtagatatgctgggtgatttttacaagactaaagatgatgagcctgtttatatacatttcctgaacgtttttggctcttcagggaatgtctactataaaaaatcaaaacaatctcttgctccataagcagagttgaaagaacgtattttattaaattccaatcccgggtgagctaagaaaaaaattcacatcaaaattaaaagctgaatagatttcataagagaaaatatatacaataaaaatatttgtaattaggtattttatcaattagaaaactaaaaacaaagcttcattcctgacataccccatgagcatttagcctttaataatcagagagattgacagaagagttatgatattttcaagaatgctattttgaaaaaggcaatgttaaaatgatgtttggttcctaacctaagtagctaaatctagaggggaatataaattctctctgggaaatgccacacagttaaaagtagaatacttcaaaaatccagaggaaagacatggagtttttaatatagaggttgattagaaatgtaagaactcataagtgtttctcaaaaggacaaagaatggagaaatttataaggaaatcgtttctaatcaggtcagaagcctagtgaattgagtgctggctcacctggaggcttcaggtgttctagctgcttgttagaaaaaagtaatcaggctggctgcagtggctcatacctgtaatcccagcactttgggaggctgagggcaggtggatcacacgaggtcaggagtttgaggccagcctggccaacatggtgaaactccatctctactaaaa

SEQ ID NO: 1881587 - DNA, 4001 bp, Homo sapiens
cacttaaatacttcaactttcaactgaaacaagattaaatattaaacaatgatctcagaatgcccagagccacaaaatacaatcagaagcatgtttttttttgaaaattttaaaaatgaaagctaattatattttcatatattgtgattaaacacacaggataatatataagacaaacctgaattataatcccctttcctcttaataataaaatgatgcctaacagttagttagtctagttaattctccgtttcattatctatattcgtaattacatattctgcactttgggggggaggggcaggtgtgtgtgtgtgtgtgtgtgtgtgtgtgtgtatgtgtgtgtgtgagagagagacagaggcagaaatagggaaacaggaacaaagacaaagattgctcagtgatcagaacccactaaattttgagcaggcagcatgccataatggtttagcttttggttagagtttggcagtctgcagtttgaatgttgtcttcatcacaccagagtaggataccaccttaggaagaaaaaaattagttttttgagtctgcttccttgtggggataattgcagtgcatatctcttcgggtttttacaaggattaaaaacaaatttctcatttaagatggactcaaaaaagttaatgtactattttgtaaccaagaagtatatcagagccaaaactctcaacatgcattatacacattcaagagcttgcttaattatcattttttgctcaataatactgttttttccataagggactaaccatttattttgtcaaaaagtctaattttttagaatctctgttactattaataattatctgggtatggaatttgtagccatattccaaaaatagtatttaaatttacactaaattcaaatttagccctgtctggttcaaacacaatctttttacgaagtataatgcattataattagagtttacttatagagaacattaagatgttcacactggtaaaacaaaacgtccggatttttttcttaaactacagaagttaagtccagtttttagaaagaaatgataatattgaaatattataggtattcgaaaaatatataaaattatggaatttagtatatgaggattcagcttaatttggccccctgaaattgtgataaacactgctctgatggagagaacatatattcacccattcagcaaacatgaagtaatgcctattatgtcctaggcagttttccaaacaccaaaaaataacaatgaataagatacatcccctattccaatatttctttcagatttatgaaggaaatcgatatagaaacaggtgtgataggaacttgaataatgagcacataccacataaaacgtctttctgagcccactttgccaactttgcttgaacaaacaggacaaagacttgactttgaaactgcagccattttgagaagtggcacttggcagttagattgtctctgggcacatcatgtggacagagaggaatttattcaagaacagtggggccagaaagactctccacagattaacagtaaagacagtatcttacctttgtctaggagctcccctctgcctttggtagtgtgtctggaattggtgggttcttggtctcactgacttcaagaatgaagccgcggaccctcgcagtgttgcagttcttaaaggcggcgtgtctggagttttttccttctgatgttcggatgtgtttggagtttcttccttctggtgggttcgtggtctctggctcaagagtgaagctgcggaccttcgcagtgagtgctacagctcttaagccggcgtgtctgtagttgttccttcctcccggtgggttcgtggtctccttggcttcaggagtgaagctgcagaccttcccggtgagtgttatagctcataaagacagtctggacccaaagagtgagcagcagcaagctttattgcaaagagcaaaagaacaaacctcccacagtgtggaaggggatccaagggggttaccactgctggcttgggcagcctgcttttattctcttatctggccccacccacatcctgctgattggtccattttacagagagcaaagtggtctgttttgacagggtgctgactggtgcctttacaatccctgagctagacacaaaggttcttcacgtccccaccagattagctagatacagagtggggacacaaaggttctccaagtccccaccagagtagctagattcagagtgtcaattggtgcattcacaaaccctgagctagacacagggtgctgactggtgtgtttacaaaccttgagctagatacagagtgccgattgctatatttacaatcccttagctagacataaaggttctccacctccccaccagagtagctagatacagagtgtcaattggtgcattaagaaactctgagctagacacagggtgctgactggtgcatttacaatcccttagctagacataaaggttctgcaagtccccaccagactcaggagcccggctggcttcactcagtggatcccccaccggactgcaggtggagctgcctgccagtctcgcgccttgcgccggcactcctcagcccttgggtggtcgatggcactgagtgccgtggagcagggggcggcgctcgttggggcggcgctcgttggggcggcgctcctttgggaggctcccgccgcacaggatcccaacggagggggtgaggctcaggcatggcgggctgcaggtccggagccctgccctgcggggaggcagctaaggcccggtgagaaatccagcgcagcgctggtgggccggcactgctgggggacccagcacaccctccgcagccgctggcccggctgctaagcccctcattgcctggggcctttagggccggccgtgcgctcccagtgcggggcccgcagatcccacacctacccagaactcgcgttggcccgcaagcaccgcgcgcagtccgggttcccgcccacgcctctccctccacacctcccggcaagctgagggagccggctccggcctcggccagcccaggaaggggcttccacagtgcagccgcgggctgaagggctcctcaagtgccaccaaagtgggagcccaggcagaggaggtgccgagagcgagcgagggctgtgaggactgccagcacgctgtcacctttcagtggaaccaggctaagtagaatggtaatctggtggttctcactgaaagtatctcgcctttgtctaggagctcccctctgcctttggtgggaccaggctaagtagaatggtaatctggcggttctcactgaaaataccagggttctagcctcatttggtcactactcagtaatggaaatgttagtgtaaaagttacatgtaaagagccttttatattgtctttcacataaatattctgtatgtggtgatgataattattacccatgtcttgaattattattttttttgcttcaaattaaaaaaacgcctaaagaatgaatgaggttgtcaagaagattaaataagtagcacttttactttgacatgctttctagtaatatgtttccatatattatatacaaataagaggattattagaacaatattattttcttcatcttaaatatgaggaaactaaaactaagagaatttcagctacctcatcaaagtattatatctagttatatctttgacgtagtaaagtaatttaaaccatattatttgtttcggcacactttgtcaactaaagaaatgtttgagaaagttaacatgacatttttctatgtagtttttattcattctgttaaagtctgaaactagcaaaagaacaaaaatgtcatctttatgactgagatctcagagttaaaacaaaacgcggtggccatgcctgggtgagggagcagccaggtattctgtgttcttagaaagattttgcaaaagtatcacaggatctccctttctacaatcaaggcaaactagttcccatggtgggtgctgacataggatactc

SEQ ID NO: 1881588 - DNA, 4001 bp, Homo sapiens
ctgctcactgcaacctctgcctcctgggctcaagctatcctcccacctcagcctccagggtagctatgactacaggcatgtgccaccacgccagctaattttttgtatttttggtagagacagggtttcaccatgttgcccaggctggtcaacagcccaacaggatgagctcaagtcatccacccactttggccttccaaagtgctgggattacaggtgtgagccatcatgcctggccagttttcaaatattatacgtgcatattctaacagatctctcttctaccaaatgcaattgtaatattttgtcttgattcatttggatcttttcagattaatgacctctgagtttttgaagaaatctagttctaaaaggagaactccatcgacaactacctcttctcactatttagggactttaaaagtcttggaccaaaaaccttcacagaaacagagcatagaacctgatagagcagataacataagggcagctgtttatcaggtaaaaaaggaaaatatttttaagagaagaagaatgatcactttcataagcctacactgtttataaagaataaagtaatcctgatagaaaatgatggtttaatacttaaatttattgagaaagagtttccttttaatacatgagtaatcatattttactaaattatttgcttccacactttgcataactgaccatagttgtttttaaagaaagaatatgccattgcaatttatagaaatacagcacaagccaaaacattgtaaagtctatatatgttttcatttttttcttcttgaagtttatatgaacaaaaggagttattatgaacaaaaagttattaaattttttctttcctgagatgttgttaggcgtacataggaaaaagattgtattaatttattcacaattctaaaagtctttttttgtcttttttagagtagaatagtatactttagaaaattgtacatgtgaatttcagagaaaatgttaatataaagaattctaattcacttaagaaattttaaatattatatgacctttttcttgttcttataggagtggttagaaaagaaaaatgtgtatttacatgaaatgcacagaataaaaagaattgaaagtgaaaacttaaggatccaaaatgaacaggtattctgacatatagaagtaaaaatgttttggatttttatttcagtaaaatatccctgaatatataacttttctaaatcagctttttaaatggcaaaataacttgtatattaaagaaatgatttccggttttacttctgttttactttatacattttagtttgatataactgttttacatgaaaacagattttaattttgtatatgtataggatagctttgttcctgctgattatgaagttattattgtttatgagcacctaattcacttttaaaagttgatttcatttagaacttaaccaagaaggccaggtactgtggctcatgcctgtaatcccagcactttgggaggccaaggcagatgggattccttgaggtctggagttcgacaccagcctgggcaatgtggtgaaaccccatctctactaaaaatacaaaaattagccagggatggtggtgggcacctgtaatcccagctactcaggaggctgaggtggcaggatcacttgaacccgggaggcggaggttgcagttagctgagatcgtgccactgtactccagcctaggtgacagagactctgtctcaaaaaaaaaaaaaaaggcacgacaagataaaggatcattagacactagttagccttcaattttcctcttttctctcttgaattttataagtatcttcaagtccaacccctacctgaactcttgatctgtatcctttcccattgaatggaggtgaacttttgttcctgtctcttctgtactgagtctcttcctctaactcctgcttgtaatacgctcagttatttcttatcttctaaagtcaaacttctggacaaaaactccagtgtgctgttcaatactaaaaatagatttagaagaaaaatattttccaaggtgaactgcacgataatgcgtcagtagtgaagggagcagccctccagggggcgtgcctgtctatctgttaaccacgttcatagcagtatgctgctgtggtcagtgccataccccttctcatttgattttcgtagctctgtgaggtagatagtactttgacctctaaattatgttaccccaatattaaggttttatgtcatttaatattgaacaataaagcaaacatagaatattatgggattagattgaaggaagtaaaataataacataacttgctatacagtctccaacctatttttcagtcgagcacatactttcaacatttggaatacatttgtgcagtaagaactttatgttttgatactattcaaaattaagatttaaaccaaaaatctgcatcttactgcatggcttggccaatttgccttactctaacttactttataagcccataactttactgatttttttttcaaatattttattatgaaaattttactataccacttagcctattacagtttattttgatataatttgtttagtacactttcaaaaataatagttgacatctttctcattaataggtcaatatgtgataaatgtttttagaaaaggacgttttaaaaccaatgaataattcagataacattctttgtaaattatctaagccattctaaataaattacctactttgaaagttaatttctaagtataatgaatatcagaggactaaagataaatgtatatgtgtatatttatatctagccatatttgtgtctatgtatatatacatatatatgtatatcactctattattttttccactgtagaaaaaagctgctaaaagagaagaagcattagcatcatttgaggcctggaaggctatgaaagaaaaggaagcaaagaaaatagctgccaaaaagaggcttgaagaaaaaaacaagaagaaaactgaagaagaaaatgctgcaagaaaaggagaagcactacaagtattcagaactttgcacatcttaattattttaaaacatttgaaatccaaattaatgattaaccatatttttatttattttcaaatattcacagtaagaaaattattctgaactttttcaggcttttgaaaaatggaaagagaaaaagatggaatatcttaaagagaaaaatagaaaggagagagaatatgaaagagcaaagaaacagaaagaggaggaaactgttgccgagaaaaagaaagataatttaactgctgttgagaaatggtaatccaaaatcataaatattttgatatattttaaattatagtaacacttcaggattttataaaatttatttacttgaaatttagtaatgcatttcaatttcattactgtcaaagatgtactagggaatctttattatgtattttcctttaactctccagtgttttatactatgctctataggaatgaaaaaaaggaagcttttttcaagcaaaaggaaaaagaaaaaataaatgagaaaagaaaggaagaactgaaaagagctgagaaaaaagataaagataaacaagctattaatgaatatgaaaaatggctggtaggtattatttgtcaatgcactttcgtctttttcatgtaccttttgtgtcttttctgtccctaattctaattctatttgctccagacctactgatcatttctacctggaatctgctttgttgaattcaagctctcctcctgcatatagcatattttctttgacttagtcatttctattaatgtttctactattccctcaaacacccaggctgaaaacttgttataatcttcttccttacctgcatccccacatttaccatttactattcatgcccattcttcctttgctgtgattctcacatctaacatagaaagaagacaagtttactattgagggtactacgtggtggaacttggtcatgacaaaaagtaacactg

SEQ ID NO: 1881589 - DNA, 4001 bp, Homo sapiens
aaaagctctctgcctaatgatatagtaagattagctattgttaaatgaatcactactgaactgctactaggcaggccctgggctaaacttttaaaataattatctcattcagcactcaaaagtctaaagaggtgggtaccaatcagagttccattttacagatgaggaaattgaggactaagagcctacagttattgtgagctgatagaaggattcagccctaggaggtctgggtccatggtccctgaaaataaaccactaattatcctgtctccaactacctaaaggcttaaggtgcctcaagacacaggtcttgaagccctactgtgtgccaggccctagattgagtgctggtattggagagccaagaaggacactgttctcatcctcaaggaggtcacaggctagtgagaagagagatagatgaacagagtgaatatcccaggtaaatgtgctgctgggtatccggagggattgccgcatgagcaaagtcccatctatcctggaggccttgccaggagcagtcaatgaaggcttcctgaggaggcaacccctgagccaggtccgatgtctgatccaccgccactttaataccaatatgaacagcatatgtgcttcatatccacacagacattactgctgtataagtatgaccttttggtccatcagtgtgactgatcctcctaatttgtttatgaacgtaactccggtcaccattggtaagaatggctaggtgggctttcttgaacctcagcccatttattttatggcttgggcattcatctcaagttctggcagatttggaagcaaaaggcagcctcatataagagtccagaggaggacaaagggcaagtccacaccttcccctgccccccatggtgtgagcaaagagcccttccttcccttcacactcccttgacaccggcctctgttaccaccttcgttctccctgcttaaccccacacttgttgcttccgtggagaagcgtcatgtcacatttgtgttctgttggaaaacatgaggcttgaatctgaaaaaattaaaacatgtgttccattttcagttgcttttctgggagtcctcaggtggaggaatccatgtgccttatccacccatctgaacattctttctttttttctcctcatagaggtaggaaaaatgaaaagcctggaattcctgccctactgcaagtaagatccagaaaagagcacagagaggatggtgggagcagccggaggggctggcctccttgcttcctgagcagcacagctttttggatatgcagatcccctttaaggtgtgcactagaacataaggcctggcacggaattccacaaagggtgagattaaggcaccaggctggatgtgcgggtcggggaaagggttggcttcgaggacatatttgatatatgatggtgaaaactgcatttgtccataccagagatatggatggctggatgaaggcctaggagctaaagctctctcttaagattgggagaaataaaagaagactagagagaaagaaagaacaaatgggtggggtgcagtggctatgcctataatcccagcacttcggaaggcagattgcttgagacatgcagattgcttgaatccaggagtttgagaccagcctgggcagcatggtgaaacccagtctctacaaaaaataaagtaactagctgggtgtggtgcacccttgtggtcccagctgctcaggaggctgtggcaggaggatcacctgagcctgggaggtcgaggctacagtgagctgtgatcacgccattgcactccagcctggttgacagagtgagaccctgtctcaaaaataaataaataaataatgaatgaacagacagagcaagagagagagggaggacacataagaaccagggtttctaaaatccgcttctgtcagaaattcctgcccgtacttagtaaaggtctaacacctacatttcattaaaaattaaacatttgttattaggagtagaactctgatgtgcttttgatgatgtcataagtaaaagaatctgagttttggtctgggcgcagtggctcatgcctgtaatctcagcactttgggaagccaaggcgagcagatcacgaggtcaagagatcaagaccatcctggccaacatggtgaaacctggtctctactaaaaatacaaaaattaactgggcatggtgtcacgcacctgtagtcccagctatttgggaggctgaggcaggacaatggcttgaaccctggaggtggaagttgcagtgagccaagattgtgccactgcactccagcctggcggcagagtgagactcagtctaaaaaaaaaaaaaaaaaaaacagaatctgagttttggagaacagtagaagaaattttaaaacttaatattgctaattttgaactgaatgacccagaataagttcaatttcctcacgaataaaagtggatatcataatacccaaatagaaaggtgaaaatgccagacaccatgggctccatgcaggggcctctgagagggcactggtggccttcccttccctatggcctccgaaaccctgatgttctggcctgactgctccctgaaggtcgtgatcctaggagagggatctcccaggcagacatttcttccctgctgaaggggttgcaggaaggtgggcctgagatgagaagggcagaggtcccagcagcactgaaagaggttagggtatgctgggaaaactagccataggcagtggcccttggggcttccagccctggccaggcattttgctgatcattactggtccacaggatttctggatttcatacatgttaattattcttctcctcttattcccagtgtttcagctctgggattctctgaaaacaatgtgcttctccattcctttatattctacattccaggtttggaattcaggtctccagtcattgtttctggtttcgatgttgatggctcctacattctttcttcgatagctggccccgtctctcgggctatgcggacctaggctggactcattcccttgagcaggcatttggctcatattcaagttctcaaaactgagcccagtttgctgtaggagctatatgaacaggtgtgtgtgtgtgtgtgtgtgtgtggctgtgcacgtgtgtgcacactggtgtgtgtgtgttcccctccagtgtggcactttctgttagctctttcattctcttcatagcctctctgttaatacattcattcccaatcctttgaaacatttcacctttaaacccacaagaatgttaagattctatctaggcttcaggaattatatatttcaaaagtcacttcagtcgcatgactattaacctagaaacattaacatttttgaatctttcaagttgctctatgagcgaattcaaaggtgtccttttcttttctttctttgtttagtaagttaactaatcattcaggcattgatcttatttttgatgttaagaaaacccacagtactcacttgcaccatataggtttctgacatctctcagaatgacttgtaatcaggaaaaaaaaaagtgatgttttccaagtaaagaagataattctccaggaatggagttaagagagattacatgtaagtattgcctaggaatgcgtttaatacagtaacttcttaatgtgatgaaacagtgtaaatacattttatttgcaatgtctgaaacaacttatcaaggcactctgctatggaatgaattacttctctcctggttaagagaaccaagtgctccaaagagaacttaacatcattttaaggaatatacctccaaaagaaagggaaagagaagctaaaccttactaaaacattgaaaatctagtgtgcttaaatgaaatggttcaatatgttttatccagatgaggatatgcaatacaaaaatttgatatatggaaaaattgatatatggatatatattggaaaaaattgggtatatgaaatatagttgttgcattctaacttcttaggagccctttgatatttc

SEQ ID NO: 1881590 - DNA, 4001 bp, Homo sapiens
aagaaaataaaccaaatagcaaaaaagatttagaaataaaagatactttatttcatccctctccagcatccaatgtagaaaataatagcagttatttactgagggctaactacgtgccaaacacatgctactatgtacattgcatacctttttccttaatctttcaaccatgtgaaaatagatgatactatcttttcacagaataggaactcgaagctcagaaagattagtaactaagatgacacagtgaggaggaggcagaacagaatccatctgtacttgcttctgagttcatcctcctaaccactattcagcgaggcaacagtaaattccctttatggggcttcatagcaaagagctggcagagtattatctaaactagagatggcattaatgttggttttttatatatcacaaagcttccctggagccatcgttaactatcaggtttcatagcttaatatatcattattatattatcagtaggaaaacggctgaagtcttgctatcgacgacatcataagagttccttggttccaagaaataataaacctcaatgtcaaaattgttgggaagctcttctctagaatttatctcacagaaattgggaggtcctctaattcgataaaatctttcaaattgaaacccaatctaaagtacttcagagtatatgtttgttgttgttgttgttgagaaagtctcgctctgttccccaggctgagtgcagtggcgcaatcttgactcaccacaaccgccgcctcccgggttcaagcaattctcctgcctcagcctccagagtagctgggattacaggcgggcgccaccatgcctggctaatttttgtatttttagtagagatggggtgtcaccatgttggccaggctggtcttgaactcctgacctcgtaatctgcccgcttcggcctcccaaagtgctgggattacaggtgtgagccaccatgcccagcatagagtatatgtttcaaaatgttcgtcacattgaaactattcaattatgttaaaaaatgtaatacactaaaacactgcaaatgagattgagacactactgtccccaagcagctggagatgtacataggtgttaataacctactagttggaaggatagtactgtgtgtacagtaccattactttaacctcatcatttgcaactgattgcattgcatggaccctctaactgcctgaaaatcatgtcagagttactccatcgacatttgccgaacatttgtcatgtggcaaaatacttactgtagaaaagttgacacataatagctctgaggtttcactaaatgagctttacacaccaggctacaggtacaacccattgatgtgtagtctccaaaaaatatggtttatgatttgattaaagaatactgcctcgccagaagctccctaagtatagacaaaaagggtttcgtgaccagtgaggtgacttggcttcaccgtttgctgtcacagaactattccgtggaggatttcataagtagtgagggagaggtggaagacccggctgaaaataaagtgggagcagcgggtcgtgatctgttggtggctggggactcgcctagacggaagaaacacggaatctctactaaggctgtggaaggcgtcagggcaaacctcagactcctctcactggacgcgttcgcgccacctgtcagacgggaggagccgccagggattgagagggtagggaaggggtgtccggggccccggaaagcggctgcgggtcgcaggtctccgcccgagaggcgctgggaatggggctgggagtggtgggggcggcgtgctacataccgaggagacttcacgtggtctctagagccctgctaggggacccgggacgctaccgcgcgcccctcccctgaggtctcagctcctcctcccaggcacgtgatcgcagccggctggtaactgcgctcctgcagcgtagctcgctctgtttcttccctcccgccgcggtgcccttcttctcccccgttcccatccctccgccttcccccgcctctccccccacgccccaatcgcggcttgagattagaagcgcccgcccctccacccttttcttcgcttgctcattggctgaagtctcaaggacgcgtcccgagggcgggtggcagccattggtgggatgagcaatccgagttcccggatgagggaacattctgcagtataaagggagcagggaaggcgggagacagcgcagtttgaatcgcggtgcgacgaaggagtaggtggtgggatctcaccgtgggtccgattagccttttctctgccttgcttgcttgagcttcagcggaattcgaaatggtaaacttcgcagagacgctcgatgactccgcgggtttttgccggcgagagaaaaacccgttacacagagggatgggggtgaagtggcgacggttgggaacgcgcggagacaggatttagaagagtggggggaggtgttttgtcggctgctagcggagcagcctcggatctcgcggcgggcggcgacggttgggtggcgcgcgcagcgccgctgggggccggcgggcggaggcgcgcggccgtggcgagcgcgcggcggggggcgaacgggcggggtcgcccctgcggcgcgccgcgggccggagaccccggcagggtgcggggacgcgctcgcggcgggacgcgccgcggtgggggatgggcgcgccgccttggtaattctatattctccgttcctcctccgctcgcgggcgtgtgcgcgccgcaggctggcggtaaggctggaaaggactccggaaaggccaagacaaaggcggtttcccgctcgcagagagccggcttgcaggtcagtagttgttcgtgcagtctgggagtcatgatgtttttctttgcatttccttttttgttattcatcgctctcgatgggcgttttgtgtatgcgtgggtgatgcggtgtcgcgacttgggctgcccatacgataaatatgggggggaggaatcacgtgtttcgatgtcgggacgcgttgctgcgcccgtgccccttgctttggcgcgcatataatttccccatctctagttctcatttttgtgcatttatgtttgtgtatgcttaaaatttaagttcccagtgggccgtattcatcgacacctaaaatctaggacgaccagtcatggacgtgtgggcgcgactgccgctgtgtacagcgcagccatcctggagtacctcaccgcagaggtaaatgggtgaacgcctataatccggagaaggtttggggggcggggaggcggcaagagggaaggaggaaagtgatgcaagaaaactcccaggccctgaacgcggcgagaggcctaagagaacgctagagggagctggtgttcaacaaggatcctactgagcttgagttctctgctcttggaattaaaattgcgtgccccctgtatatcttgccagtcagatagtgaggaacgattccagttggtagatctgcgtttgtgagggttttattctgttctctgaatcttggccaaaggaaagttggaaggcaactgacagattctgccttttaggtacttgaactggcaggaaatgcatcaaaagacttaaaggtaaagcgtattacccctcgtcacttgcaacttgctattcgtggagatgaagaattggattctctcatcaaggctacaattgctggtggtggtatgttaacttctaacattttaaaaaatttcttcagaggaaggaattttttgctgcttttaattagtttttccaggagaggaaatttaagtatattttcaatgatggaagtatggttgtatcatgaaatttgatttatatgtataactcaatgaatttttacttcatacttgagctgcatgtttttaaagatacctttcaagttgaacagtatacactttcttggtttcaaatactgtgattttttaaaaaatcttaagtagaattaattcctgtcactctcctaggtgtcattccacacatccacaaatctctga

SEQ ID NO: 1881591 - DNA, 4001 bp, Homo sapiens
aagagagaataaaaatctgtttaagccgctgtctagttgtgatcccgattactcacagccagacataacccttaatctacacacatgtatcgaagtaccaccagctgggctttttaaacaacagaaatgcactgtctcacttctgtaagctagaagtctgaaatcaggtgtcagctggtccacgctccctatgaagccctggggaaggatctgtcccaggccgctctcatggcttccgggggtttgctcccatctttggcatttccttggctagctgatgcctcgacctgatctctaccttcatgttcacacggcatgctcccgttgcttgtgtctctgtatccaatttcccccttttataaggatagaaggcagactggattaggaatccaacctactccattgtgacctcatcttagctaattacatctacaacgaccctatttccaagtaaggtcatattctgaggtcctgggagtgagcacttcaacatacgagtttttttttttgagggggtgggtggggggaacacaattcatcccaggatacctgggcattgtccctgattgtccctccctccctcctgtccacgtccaagccgtgagcatgtcctgccaattctgcacccagattgctctgatgcgctgatacttcactgtatcagcgtggaggaggcccccacactgcctccttgtccccactcttgactacttcagcccatgccccaagggcagccagggcatctgctaaagatagtctcacatctgctcacagatatcctagttcctcctgaccccctgaaccttagaggtctgcacttcctcctcttctgaagttaggcatggccatgtgacctgctctggccaatgaaacgtgagcagaagtgacgagagtcccttcggggaggaagccttcaaagccagcataattgtcacctttcattcacattgctgcaccatgtgggtgctcggctggcagacagccccagcagcttgggctcccaaccactctgatgaacagagccccattgaccgaggcaggatgtatgatgtgggcaagacacaccagggagatttgggtttggttgttactgtggctaacatagcttatcctgactgatgcactttaaaaaatatcaatctgacaatggtccatgggaccaccttccaggtgagacagtctccaaactctcgccagcctgcaagaccttgcaagtgctgcccctctgtgcccccgccccccatcttccacacactccctctcaccattctgtggcccagatacttttatcagattctcaaatatgtcccgttcacagcagtcagggtgttcccccatgctgctccctttggtgggtgctcttccctgccttctccttgctagaaagtaagctctggtgggcagccgcttcctctctgctgttcactgtggtgtccccacatcttagtgactacctggcacacagcaagtgctcaataaatatttgtctaatgacactgaatgaatgtttgcccagctgagtcctgcccctcccaagtctcagctcgacagcacatctttcatttggctatgacctgctgatgtggctttgctgggggcagcctgggctggtggggggaggctccctaggctggcatccgcccagctctgccgcttgctggctctgccgccgttagcgtgcgctttaacctctgaccttcagacctctcatgcgtacagagggggacatggatctccggggtcgctgcgtcttcctgaccactgacggccaggacggccccagccccgctttacctgcaagccccactccaggctcgagcccccgagggcagggatagcttcccgggtcccgaggcttgaccagagcctgaaagctcctgccgggggttgctccgactcagcgaggcgccaggctgcccggcgcggctgggggcgctcagcgccgggaccccagccctgccccggccgcccgctggcccagtgcgcacgctccggcagctcagctccccctcccacggcggcaggagagctcccggcatctgcccggggcgggggcgggggcggggcggggcgggcgccgcgccctcctgcctgactggcaggaagacagaccaatcggaggggctccccggggggaggggcggtgccgtgcctgagccgggcgcgggcgaccgagggagctgcagccacccgcgtgcggcacgcgccggccgcctgcccggatcgcggccaccagtgccgcggcctctcgactcccgccccgccgagccgcgcgcgcgactgccatcctcctcaattgctttttacgattttttttgtgcatgcattcattttctgttccgttttgtcctttttaaggcggtggcggcggcgacagcggcgtaagctcgcagcggggagggggcggccggaggatgcggcgcggggctgcgctcgctacgtccgctgctgctgcccggctcgggcctgagcgccgagcaggtgggtacaggtgcgccggggggcgggaggcgagcgctggccagagggaacccgtggacccggcgaccgaggggcggacctggcggcaagggacgcggcgaccggtgccgccccgccccatcgtccatctccccctcctccggccatcgcgccccctctgggtcccccttccactctcgcatcccacctcagtggtcccccacccttccatacccatcccccactcctcttcagacccccttgcaaaatctcccagccgctgcgtcgcttcccccaacaccccctcccggtcccgcccccagcccccagctctccttcacgccacccctatttccactcttctccggattccgccctcaagccaaggagcgggagggggacccacccggtgcctgccggagtggcgcggggggtgtggccggcccgtcccctccgtgtcttccgcagggtaggtcacagtcccccagatctccgcccaggtggcaaagaagatggagctgggggccgcgccccggcggcgcggggcccgaaggcgaggccgcccagcccgcaccccaccccacgcacggcacacgccgccgcggcccctgccacgcacaccctcgcgctgctccgcccacgtgggcgccggggaggaggctcgagagatgggaagaaaggctggcacccaccctcctgccgggccggcgcgccctgggcgcactggcctccggagatggcgcgcaaggattgactctcgtggtgccagacaccttgccgggcgccctgcgtcggggccagcggcctcgctggcctgcgtcagtgcgctgcggcctcgcctcccagcccctcggtccttcgctccatcccccctgctgtgggctcctgagcatccggcctgggcagcccagatagaggccgcttacgaggctggcgcttcttttcgccttagaagcatcccgctcccacacaccccagctcgccggtctcctgaaggctgggccagcctcggctctccgccagcctctgcccggctctctgagctccagcgatactgtatctaaccgccagccctcctccgccgcccgccccatctgcgcacactcgcaggcacactgtccttggcctttgccagtgctgtgctctctccgcgaacgccctaacttcagctggccagctccttgtagtcagggagatccccttgcccctcctgagctttcctggaacgtggcgctgtcccaggatgctgttaccatctgatggcctctgccttccagagcagaggaggaggtggggaggagggcaggggcagcctcagcccctctcccagggctccacccacagtgaatgttgggcatagcagggccatcccccctaagtcagagtaacccgctggtgtggagggcgaggccatgggaggagctggcccttcctgtagcaccctgggctggtgggtggtggctccactagctgggatgggcaaggaggagggacacattcggggatagagtgggggaattagaatcctttcctagcagggc

SEQ ID NO: 1881592 - DNA, 4001 bp, Homo sapiens
attttaaaattgagataaaaatagtatgtacttcataggactattgagaagagtattaacttgaagcatatgcaattataattttcatagtccaaaaatggtcacatattagcatttttatatggtgaaacctaataaatgagataattgatatagcatatttagaatggaggtatacagtcagtacttagtattagctgtaatgatagcagtggtgatgacaatgatggtgtctctttgtatatgttaagtctcaggctttctctggcctaaacagccaggaatagaattgctgggtcacaggatctatccaaattcaacctttacctccagaatgttctccagagttttctatccaagatatgttttatttttctacatatttgtgtcttaatatttttcaataacgttttataatattgttcataagaattattcgttttcttctctctttcccctctcctcctctctcttcttctgttcttttttatctctttcttcctcctcctctacctctccttctttttcttttttctcccaaattcgaagatgaacactcttctgctatcagagtagaaaggtctgtgacttcctcatgtttctagaagatctccatggatcatgcaaaaggtcagatgccatctttactttcacagctctggaaatccatttgctaagctctcaattatcacccagagctctaggacggtatttctaagacttttgtgtggctcacagagtatcatgctgttaactgtcccagaagcctagaggatcccttggctttacagcgcacagctcctgaccctgcagctccactggaaattggactgagccatcatcttccctgagcctccccgcttcgctcttcattgtcctccctccctattcggcagatccagagattcactctgctgcgtaaattcttttagtcccaagataaagcactgcctatgaagagatgtctaacttttaaaactggccaattacatcaaaatttatttggttctataagcaaagatatggcccagcaatttattaacaggaagggaatgctaagtgaatatcagcaatcattaataaagatgttgtgaatggtttcagaacgcacagtaaacaatttaattccaaatgatatattaagagagaactaagaagaggatttctttcagatagcacagaatagaatatttttccaaattaatagttacaatattcaggagaaacaaaccgttcaaaataactgaaccctgcctgtagtctctttcctgtattgctaatcctctttcctatttcgtttttctgtcatttctttctctctctacttggctttttccatcagcatgtaaatctaatttagtttttgccatccttaataaaaacaaaatgatgcctgcgactgttgtctaatgtctacttttcaaaaccaaaattttcaaaagcactatttatgctgtttgtctcttcctcttcccctttcctcccagcccatttcaataaggctgactaccgccaaccactccgccccagaggcatctgcccccggccgcgcaccctctctccctcaccacgccttggtgtcctcacgttcccgcacctctcagaagcgcttcctccacgctccacaacggccttccccgcccagaagcgcttcctccacgctccacggcggccttacctgctcagaagttcatgctcccagcggccttccccacccagaagcgcttcctccaggctgcgcaacggccttccccgcccggaagcgcttcctccagtctccacagcggccttcccgcccgggagcgcttcctccacgctccacagcggccttccttgtgagaggtgacagcgtgctggcagtcctcacagccctcgctcgctctcggcgccccctctgcctgggctcccactttgggggcacttgaggagcccttcagcccaccgctgcactgtgggagcccctttctgggctggccaaggaggagcccgctccctcagcttgcagggaggtgtggagggagaggcgggagcggaaactggggctgcgcgcggcgcttgcgggccagctggagttccgggtgggcgtgggcttggcgggcactgcactcggagcagccggccggccctgtcggccccgggcaatgaggggcttagcacccgggccagcggctgcggagggtgtactgggtcccccagcagtgccagcccgccagcgctgcgcttgatttctcgccgggccttagctgccttcccgccgggcagggctcgggacctgcagcccgccatgcctgagcctcccacccgcttcacgggctcctgtgccgcccgagcctctcggatgagcgccgccccctgctccatggcgcccagtgccatcgaccacccaagggctgaggagtgcgggctcccggcgcgggactggcaggcagctgcacctgcagcccctgtgcgggatccactgggtgaagccagctgggctcctgagtctggtggggacctggagaacctttatgcctagctcagtgattgtaaatacgccaattgatactctgtatctaccgcaaggtttgtaaacacaccagtcatcaccctgtgtctagctcagggtttgtgaatgcaccaatcaacactctgtatctagctactctggtggggccttggagaacctttgtgtggagactctatctagctaatctggtggggacgtggagaacctttgtatctagcgcagggattgtaaacgcaccaatcagcgccgtcaaaacagaccattcggctctaccaatcagcaggatgtgggtggggccagataagagaataaaagcaggctgcggagccagcagtggcaacccgctggggtccccttccacagtgtggaagctttgttctttcattctttgcaataaatcttgctgctgctcactctttgagtccaccctgcttttatgagctgtaacactcaccgcgaaggtctgcagcttcactcctgagccagcgagaccacgaacccaccagaaggaagaaactctgaacacatccgaacatcagaaggaacaaactccagacgcgccaccttaagagctgtaacactcaccgcgagggtccgcggtccctcttcattcttgaagtcagtgagaccaagaacccacgaattctggacacacctgctcagcagttcatgctcccagcggccttacccgctcagaagcgcttccgaagtgcttcctccaggctccacagcggccttccccgctcgctcctttgagctcctcctcggtcgcttttgccagcctctgcctccctttctagcgtcctatttcagcacactcattttcgtttcaggcaggtgcgctttccgttcccagagcgcactggaacctctttcccgctggcctcagccttttcttggaatgccctttccagccttttcacgtggaagcaccactcagcttcaaagccacctccttgggaggccttctctgaccgcccagcctcgttcgcgccacgtgtacattctcagtgcagccagtaaccgcccatttatgtatacatacacatgtaaatgcacatataaataattcacccactataattttgatgaaatatatatttaagaatgtgttgttttgtccatcattaaagtccaagctccacaaaatcagaaactataacttttttattcactgccacatctccagaattagcagattgttggtatagtgttaattgaataattggataaaatttccaacatacaagccctacagaaaagaacatgtgtggtggaaactaaaatacattttgcctatttacagaaggagatcagttggaagctttccttggactaagagcatccttagctatgaaggcgaatggatcttgaggctgcaaggtattcaacaaatattggtatgatggggtcatattgttgacttttaaaaatactgcaatatactgacatatcgaaacagcgacgttcggctatgttttctggtgagtat

SEQ ID NO: 1881593 - DNA, 4001 bp, Homo sapiens
cacctccgagcctgcgggggcaagggaccttcttgggcccccaagaatgcagagatgcccaggtccccagccagggcttgggtggctgcagctgtgcccaggaaggtggcgctcctgcctgctgccagccctaaagagcacagggatgcctgagtttgcagctgcagctgcacctggggagctcaaagttcccaccctgctgactcagaagggagtgggtctcccactagctctgtggagtgggcagccagccccagaggtgtcttccccattgcagctggcatcatgtcagtggcctctctagatgggccgctactgtcagcaatacttaagtaaggtagacagctgtcagtctgacagtttatccaaataaaaattaaaagctaaatatttactgatgtacaatgatattgaaaataaattgactgctctatataactgttgcaatatttgtttaaatatttaactgtcaactaattataatttaaaaatatataacctaaatgtgaaataacccaaggttttggcatctaattctatttcctatttatttaaccttgttctataatctatgttctattttttattgaaaatttctggtaatttattggttcaagggaatgattttctatagctttttttttaatcatcaggatcaattcaaacatgacatttatattatttaggaaatttatttatttatttattttggcatcagacactcctaggttctagtattgggtttgccacttatttgtcatgtaacctcaggcatgtgcctaaacttctcaaagctatatttccctcctttatgaataatggataataccaaaaaagcagtttcattctataggtgatattattttcaaaataagctatgcaatgcacttaatatagcatctgactcaatggaagtacgcaaaaggcatgactagtgtttcggtttttgttgtttagttgtcacagacatctaattttttatttgttcctcagtttatttgtatgctatttgcaggcatgctcctttcagaagatttcaagaaaaaagaatgatttttatcttgcttagtgctcttgtcaggggagaagcaagaacattcaatgaaggtttttaaaaaatacactacctaggagttaatagtaaaagatctctctctcctaatagtgtaaacctggcaatcctattataccacaagaactcacttatatctgataatttaaatgacttttcaagttcccacttcgctgtttcatttcattgttttgccatttcattgtttcctaataaagaccttccctagacctgttatttgctcaatgaacaaatcacaaaagtatgtgtaagtaataaggaacacagaaccgaaactagcctcagcagatattttgattatcttaactgaataaggaagactgcaaacataatttagttacatttgtataatatgtatacataacttatcaggaaagcaaagcacaattcaatacttagttcgaaaatttcataatgttttctgttagtgatcttatttctattacaagttgttcaaaggatagtttaagtaattttaataaatcttatttttaccctaaatgtgaatctattcaaaattactcaaataatatatgttgcatgcttgttcttagaaaaagaatcaaacactatagaaaatacaatacaaacccacttctacaccaaatccctttcctcatcccccaccctcatacacataggtcccataatggccttttaagaaatgcttacgaatgtcatttgtgtcatctatctctgctattgctggagcgtagaattctcactttgaagaaatgagaaggatgtaagaactatgaaaaaaactttaggggagatgaaatggtaaaagaagcagcaacagaacacaagcagtttatatacattaatcaactgattccttacgacagctccatgaggcacatgttattctcaggtttcattacagtgaagtacagcttaggctaagagatatcctcaaggttatgttatcagcaaaaggcagacctggaattcaaccaaattctattttttccagtacttcaaatgtagcagttacatcatgctacctctcaatggctttttctttgggatcttaaatattttttttgaaatgggaagtttttctagacacgtgcatgaacatgcacatgcatacacatatatacatgcatgcatatgaatcttagggcgtacaataaacagaatagcatttttgcaaggatttagatgaataatatgaataatcataacttttgagttcatttattacaacaactgaagataccagagggaaattatcttttttaatacatttatattttcagagcagtttatgttcagaggaaattgagtcaaagatacagattcccctgcaccagctgccctcacacacgcatagtctcttccattatcaacatccacaccaatgacattttatatggtgaaattctacttagataataaatgagataaatatcatctcatacttatgaatattttgaccacaggtgggtcagttgactagaggacattattgtttgatgggtataggcaatatattccaaaattcccactattccagtgatttggcatttcagagctttgggtattgccatctcggtaaactctgaattgtagctgactggtaaataccactggacactctctaaacataaccaaaacaaaaaaatcaacctaactatagaattttctagacacaatctgaccatttacattcagagtctccctccggtcagtcttttctggttctgcataaccccctacagctgtggataccagcactcaggccattccttggcactctcttgacagaggcacgtttctcattgaaaggtggtagttaacctttcagagatggaaataggatcttttttcctgaattggagcctgcagcacataggtaagaagggagaatcttgtccattgcaaaggtagagagccagagcccttttcctgtatatcatgttcaaatctattgacaaacagaatatatcatttgatttatttctctgtatgcttctaaatgacatagtcatttatcagctatgaagtctagccagtcagttctaataatgttccaaattttgtaaaaaagcaatacttctaaaaattaccagaaaacaagacatgcatgaatatttaggatagatgacataagacacatatactttctttaacttaatcaaagatatttcttccacctaatgtatacattaatgatttctgcaggcagaaggaacaggatggggaaaaaagaggatatgaaaaaggatctttcagggaaattttaaatatattatgaatttaaaatataactataacttatctaaaatatacacatttatgattttgtcctgtatagttattggatttattagaaactccaaataatttatattataataaataaaattaaattgaatactaaaacacttaaaaacacaactgtctatgtgattaattaaaaaactctgatttactgtcatcattgtttttatttcagtcatttgttgctgacagaaaagagttcttacattaagtgtgttatagatagtcctctttttttcgctagagtccaatgaatgttatagatatttctgatgcctagttacacttatacaaattattaaataaaaacatttcagtcttagttgataaaatgctcaaagttcaaaatataacatgtgctttcccataattaatatacaagaggaagacttctctttctcttgtgaaatatttagtggattatttcttattcacttttttctttgcaaagcctaccatctttcatttggataaggtcttatggaaatgtctggaaggagcaaatgcataacataccaaatcaagtccttcaggcaatacataattcatatcaaaaagcaaagctttatttttaaaatgcagagatttgttagtttgaaatggtatttttcttttcagt

SEQ ID NO: 1881594 - DNA, 4001 bp, Homo sapiens
agcaacagctatttatctcttgagattctgggttattacaattttttgtttttgaaatttaataaaagcattaaggggtttttgtatagtgatttttttttaaggatgaacatgaagtctgtgatttaacactgggactcgagacctctaaatacaaaattcatacaaaaggaaaaattcccctatttttctatatggatggtttcatcagaaaatttatcttcttgagttctctccttatatattactagtttcttgaaaaagcactacaacgttctcattgtgaataagtgttccagttagacctaaacgacaaaaaccacttgcacttgccccaaatttacactctgtttaaagcaactgccataacaaccaacaatgtatcttcgatgcaaagggacactttgtcatgaggttatttcgcttctctattctgggaaaaaccactgcaagtggaatgaaaagtaaccgcaaagggaggggacggaggaagtaaaaaacaggcaaaaccaccaccactaccatcaccaccaccaccaccaaccagaaagcaaaggtgaaaaatttgcgtaccctgaaaacactaaacatttcacatcagaacccagaacaaataaaccagggaaagcagagttgagagaaaaaaaatggtgcaggcttggggacggactcatactacagcggtcgcaagagggaagagcacgtctttgctttttcttggcatccgaaaactcaagctcgaactgggggcaaaggccagcggctgcggttccaccggctaaggcgcacacattccccgagctcagaccgcacgctggcagggccgatggggctgggcagcctccctccaccccgtggcagtcgcctacccctttgtctccccgtggggctccgaggccgcgcgcccggaagccccccgcgggagggccgcgcgcgagaaggcgggttcccgtgcccgccgcagcggccacggccctagtcaggcaatgccgaggccggtcgctcgcctcgccgtccctcccaacttgcagcctggaccccgcgcgcgtcagggctcgtcccagctctgctttcctttctcccctcacctcgcgaggccgaccttgtgtttgttttgttttttggggctcgggagagtgccgagggctagaaacagctgtggtttaccgcgccgcttattttggcaaaaattccgggcctgttgcaatgttccccagcgccaaacagctcccgccttccccccaagcagaacccgacactcgaagaagggcttgctcctccagggaccccctgataagaaaagtggggaccacggcccgctctcgggcgagacttggggggtgggcgaccggaagcagccgaaccggccgggcagggcttgctctccaacgggagagcgggagcgggagaggtgggagcgcccgcgggctcaagtcccccgggccgccgcgccgaggcggagctcggggacgaagcagaggtcgtggcggacagccggcgggcttgggggggggcggtgggcggcgatccacctgggcgacgtggcagccattgccggcgcctcgagacccctccccacccggccgcccacccgccctctcgcggcgggcttctgcgcggctgctcttccccggccggacggagagcggcagtgtctccccgccgggcgcgctcgccgtgtctcccccgcggccgcagctgcttgctagccttgcgcggcgcgggagagcgcagtggcgccggcgggaaagggctgcggacctgcggcgccgcgttgtgcgttcgacgacgcggcaccggcttcgacgccctctgcccgctccagaagcaggtaaaggcggcgggtgggaggcagggaggcgggtccaaggtgagggccctggaggttaggggtcccggggctccgagccgaagcggagggcctgaagcagcggcgggcggcgcggcgaatgaacccccaagccctgaatgtggggcccggcgcgggccgcctccgatctgacccgcgggcccggctgcccggacggaagggaagtgaggcgtcggcgagaggcgggccctggcgctcagcccgaggccgggcgaaggcgggggccgcggccgcttccttggcctccgagtgcctggcgggcctccaggccccagacacacccctctcgaccccccgaggtttcctcccagatctgttcccgccgggacctgaccttgcgcccctccaggcgccttaggtgtttgccaggcggagccttctgggaacttcaggccaccttcctgagcacatagtcctagcagagccgtttatttactcagttcaagtccagacacacagccactcacacgttcggattttggagactgcggggagactttcccctccccggcatttgtgtgtctttggccctcgtcccgcctcccctgcccccatctgcaactttgtccctcaatgggacccttctagagcccctctctcatcgggactctctctaagccgtccgtttggaaattcatcctcaatagagtgagtcatcttagcgggggcacagtttatctctcatgcgcttttggttaaaatagttttttttttccctccgaaagagagctagagtaatagaatgtagatgacaggtcagtgtcagtgttggcttcaaaggctcttcctttcggcggcagtctttgtaactaggatctgatatttgtggcacggacaggtttgtacacattctcgccatgcagtggttgtaatgtctccatggcacagttctggcttgaaggcaggattggctgctttttctactcgacatctttgagccaatcagcaagggctgcttgcctggagactggttaactcagtaaaggtggccattggttgagctcctagaagaaaatcctggagatgaacctagcctctcagaaaacaatgactgatttgcagctgtattaaaaaaatgttttcttttaatcccaacatcagccttttcactccgtttttattacttccagtgtttttctttcaaacaccagctgtcttttgtaactcgttttaactctcatcctttaattttaactaaaagacgcgctttaggaaatgtaaacatcgtgtgttctgtgttttgataaacgtggttccatctgcctttctaacattgtttactgctaaaggtcagaaataaacagttttgagtttcgctgccaggaccttttattatttaagtgccgtgctaggatggggggtaggagcgaggggctgtagtggtggacatggtgggaagaataggaaataaatggctgctcttttgcaaggaggctacaatttagttaatgaaaaaagactaacctgtaaaacaataaagaataaagcagttgaaatcagcacgcagtacgtacgaatgccagtttgtgtacttgttgactttagttaatttgaaggggagatagaagtactgtatttcatagaaaaagtgggcttaagttatggtagaggcatgttttttccttcattaaagtatattaaagtaggcatagtatcttgtatgtacacagtagaagctaaatattatcactagttgcatgttttttttttagtatttattttaaatctaaatactgttacatagttgcatcttatttatttatttttttgagacaaggtctggccgtatcgccaaggctggagtgcagtggcactatctcagctcactgcaacgtctgcctcctgggctcaagccatcctcccacctcgtcccctagagtagctgggactagaggcgaaagccactacgcccggctaatttttgtattttttgtagagaggaggtttcgccatgttgcccaggctggtctcaaacccctgagctcaagcaatccaactgcctccgcctcccaaagtgctgggattacaggagtgaccaccacgcccgcccggccgttttaaaacgctgattattttccttttaaaatctcccttttcatcatgattagccatgattatgcatgttttttga

SEQ ID NO: 1881595 - DNA, 4001 bp, Homo sapiens
gggttgctttatggtagataatacactgtagagcaaataaaatgcctttttgctttattcacaggattaaataccataaattaatttctagttgctgagaacgggagattttaaattttgcatttagaagacaagaaattcaatctgaagaggccccatatttccagttaagtgaccactcagaagggaaggacagcgctcaataaccaaggtcaagagttgggtttagggtttgtggcgattttttttgggggtggcaagaataagccgtagattaatctcttaaaataaatatagcaagaaaagcatgcctaaaataattcatacatatacatatattatcatattacagtgttttacagttttagatcagtaccagctaaaatattctttggattgtttttgcttttttaccagcctgttcaacagaattataaaaggtgacaataatgctataaatgtctcctatcccatgctcatccctcctctcatcttgctctgtttctggagtactctaggtattctgcatctttgcctttttccccttctagtttctaaacacatttcttatctacttgcagatcacttatcagactgaataaaatccataggtacattcggtgtctgacctgtaacaaggcaccccacattattttgcgcctttgataaagaccagcttattcaaacttgtgagaaaacaaaaatagcagggttcaagtaaaaaccagtaaaattcagttcttcacagtggcggttttttgacaagacccggccgaaagatttcacgaacagtaaaatcccagaatgttctcagaaatactatccactgtactgtctgggttgcttaatactggcccaaacctcagtgtcctaggataataacccaagacaatttcccagtcctttgaaatagttgacgtcccaagatgtcaaattgcctggagtgctttattttggtttgaaatttaaaatttcctctagataaagatctagatttctctttgcaagtcaaaggctagttactattaacagctgtttcaaaagtgctctaaataggtcaccattcaggtgtaccaacgctgcaaactggatctaagaagatccaaatttgtcaccactcactcacattttaactcaaaggtagtactcacaattggccttgtttacataggcattccattaaaattatccatgcattcattctatttgcacccatttctttcaaaaatgtccatctgtaattaaaatcagctcctctgcctgacatctcatttacactacaccgaaattaaaccccactaggagatcacgtagattatggggccgagggcccgcccgctgactaggttttcactcgcgtctcctccatgccccaggtcccctccgattgcagtcctggggcaggactgagcaaaaagtcccgtaaagctggcgtgtgccccactccgccaggaagcctcaccgacgtcctgtgcttaaatgttctgacaccccccaaaagcagttgtttttaaaggctgtctgtgggaccaatgcgttgtcaaacagatgccgtcccgcatcccctccccctaaatgacacagaagattccagcgtaggggaagggccacgaaacccgcagggcacacgacgccgggggccggagggagcaccgcctacctccctgatcaagccccgcggtgccgggcgagcccgagggcccggcaggaggcgggcggcagccccaggcgagctcggaggcggcgggaacgcagccgccgcgcatgccgggagccgcacgccgcccgccggggcgcgcagtcccgcaggcctcgctccaggtcgtccgaaaaggaaccgcctgctgctcctttgcaggctcgcgaggagccgcactcggaccgcctgatggggaaaaagccggtgtggccgggcggagcgagccgagcggagctggagctgcccctcccagcggggaggacggcacgaaggaccgagccgcctcccctcccgggtcccattcagacgcgaggcgcagagactggctccccgggcttcccctttaaggggggcggggcgcggcctgccgtttggccgccccccacaccctcccccgctagcccagagccggcagaccaatcgcccgggcggcggagcgaaggcgggagaatgcgaaccctccggtaggcggtaggggcgggccccggccttattcgcagggagcgctgcgcaggcgcagaggcggccgcgggcggaggggcgggggcaggctagcgggaggctctccgtgaggcacggagggtgactggggacaggcgggcggcgacgggcttgtcatggggatccgggctgcgagacggcactcgtagcatctggggactccgagggggacaggaagtgtcagcgcccgggaccccggcgccggccccgccgaggggatccccactgctccggtcctggagcgggaggggagaaaggagggagccccggtttcgccccgcccctgggctggtgctgcgggggcggggagtgagggctgctctggggggagtggagatcggggagcgcggccgtgccctctcgagcggctgcggggtccccgcggcgccgggctgctgagctgagggcccgcggcggccgcggccggtgcatgtgcggctgctggatgcggaggcggcggcgacggcgcggatcggcaggatgttagggcagcagcagcagcaactgtactcgtcggccgcgctcctgaccggggagcggagccggctgctcacctgctacgtgcaggactaccttgagtgcgtggagtcgctgccccacgacatgcagaggaacgtgtctgtgctgcgagagctggacaacaaatatcaaggtaggagccgcggggctgccggcctcgggagccggtggcggggagcctgtccgggggagtgccaccttccctttctcccgtgacagtctccccgagcgcaccgagggtctgccgagcgggactgggaggactggagaccgggttggcggccctccgtggccccgcggtgggcgagtacttctctggggtccccagagtgggggtgggggccgcttgtcagcccccgctgcagacccagcggctgcagctgccgctgaggggaatcagccattttaagcagcaagcatttgttcaggcgctggcccgccccgtgccgcagaccctgcggccccggcccgggactgcagccgggcaagggtcggagggagtgagcggccgggctcccgctggtctgcggggcgcgcttccccacctcactcgcccccaccccggagtgcgggtgctttggaacgtgcggggggagggggcgagaggccgcggaggcggactgagggggccttcctccgcgctcctgccccggcccggaggagagcagtccgttccgctctctcgccccgggaaagttcgcgggcgccccgcgttgtagccctagcccagttctttcggcaaaatggttaagaggggaggggtcccccgcgggagaggaagagaggggcgtgtgtggcggggagggcccccgcgccgggggcggggcctgcgggcttgacgaggggcgtgggaggggcgcggcgcgcgttcccgcgggcctggaaaatggctggtcgcgagaggggcggtggcgagctggctgctggggagggagtcggggctgtgcgggggcgttggttcggccccagcggagtccgaatcggggtttgcagcatgttttgcggtgatgtttccaacctctttcccagtcaatggatcaggacggcgatcagcagctcggaccgtcgcggatcctggctccgcgtaggttccgggacatgtgtcacttccgggcttcaggaggaagtgggttggttgactgggcaaccgcctggcgtccccgagcccctccttctccgactttaagtgtggaggcgaaaccaccctttgccggccgacccgggaacccgggacagaatcgaccttccttacagtgttaccacctactatcggtggtgctac

SEQ ID NO: 1881596 - DNA, 4001 bp, Homo sapiens
atcgcatgactgcactccagcctgggcgacagagcgagactctgtctcaaaaacaaaacaaaacaaaacaaaacaaaaacatctcctgctattcctctttcaagtttctgtattaaatttaactggaaagtatccagacattccaagatgaggtgttttaccatttttaaaaattatttactatttttttctttttaagctatgctattaactgaaatttactattatttagctatattagaattgttctcaatactgtgcaaccaaaacaaataagtagactcttgaggctgaagacagcaactgttatccataaatcccaattttgcatatgtatcaaaattgcttcattttacttattccctatttttatttacagagtaaatgttacaaatctgaaactttaacatacactgctaataaaatgccattttaattattttacattgaagttccatgagatttttattatatttattatttatttttaaaattgaacttcacccttttgtaacaaaaaattaaaaatttttgttgactctgtttgaacacaacagactaggaactcttccctagacagtgttagagaattggcaagaaatgtcaccagcaacttttagaactttccggtggtccacactcggccaaatcatcttcaaaaaggaggctcaaatcaggcccggtcctgacccccaggcacagacccaggggaccgcctccgagacatcatgtttcttgccaatccgggtcaacttcctgatggtctatcgcatgtgggagcaaagggacttaacagtcactcttccacagtttaattgttttgtcattttctagcgcggcagaggtgatgatgttttctgttgggtgacaagctgttgaggtcacaacatctgtgtggccttctaatttctgtacaatctctttcgtctgaagtttccagatgtaaagaaggttatcctccgagccagacacaatccacttcccgccagtaacagagaaattagcaaatatgcagtatttctcgttcttgtggccagtgtatgtcttcaggcacttccccttgctgtagtcccagagcttgagtgttgcccagcgtggcagccacgatgtatccacccttcggggagagcttcacgaaagacaccaggggttgtcatcatcagtgagcgttttcaggcactggcctgaggctgtgtcccagatgtgacagagaccatcatagctacttgaaactatcaagaatccatcacgattaaaatgaatggccgagactggatcggagtgagctagcagtcttgtggcacttccctgttttcacaacccatatcctcacactttcatcaaaggatcctgagacagtaaggctggactggggattgaagttacagcaaaagacataattactgtgtcccttcagggttttcagacactttcccgagctcacgtcccgtatcttcaaggttttgtcatctgaggcggaaacaaaaaggttagaatctgacgaccaggctgtgaccagacggttttctcaaatttcccatcatatgagtcccccaaattttaatgagtttatcagcagatgaacttgccagccactctccattcgggctgaatttcacggaggacactgctttggtgtggccagcaagggtgaactttagagagcatagtttggcttcacgggcgtaggcttgctctgagtggtggatgacgaaggggtcggctgtgctctcgttgcctcggtctcgggcttcctctcctccatcgccatggctctgacgctggccgcacaggggacgtggacggagggtcctgatgacagaggcagtctgccgggctgctgcggagggccgggcgctcggggcgtcggcgcatcctccctgggcgggagcgcggcctattcatttattttttttgagacaacagtctcactgtgttgcccatgctggagtgcagtggtgcattttcggctcaccgcaacctctgcttcctggattcaagcgattcttgtgcctcagcctcctcagtgccacaggcacgtgccaccacacccagctaattttttatatttttagtagagatggggttttgccatgttggccaggctggtgtcaattcctgatatcaggtgatccgcccgcaacggcctcccaaagtgttgagattataggcgtgagccaccgcgccggctgagaattttatttcaccaaatgagtctcctgctaacaaatgtttacctgccattggcctacactgtgcaaagggcctaactattagataatatctagaaatgtcacaaaattagcctgaaaagtaatccatttttttcctgtaaaataagttaaggtagcttgagatgtttctattttaagttggtagggttaggcccggtggtggctcacaaatcccaacattttgggaggccaaggcggtcagatcgtttgaggcctagagtttgagaccagcctggccaacacggcaaaaccccatctctactaaaaatacaaaaattagctgggcgtgatggtgtgcgcctgtaatcccagctacttgggaggctgacgcaggaggatcacttgaacccaggaggcagaggttgcagtgagttgagatcgcgccactgcactctagcctgacagagtgagactgtctcaaaacaaaagaaagttggtagggttaaatttgcatcccaaaatttactagcatctataaagacatacattacttttttttttttttttttttgaggagtttcactcgttgtccaggctggagtgcaatggtgtgatctcagctcactgcaacctctgcctcccaggttcaaggattctcctgtctcagcctcctgagtagctgggattacagacatgcgccaccacacttggctaattttttaatttttagtagagacagtgtttcaccatgttgttcaggctggtctcaaactcctgacctcaggtgatccacctgcctcggcctcccaaaacgttggaattacaggcattaagccaccatgcccggcccatgcattacttaaaaaaattttttttgagacacggtctctgtcacccaggctggagtacagtgatgtgatctcagctcactgcaacctctgcctgtcaggttcaagtgattctcctgcctcagcctcccaaatagctgagattacaagcatgtgccaccacacccagctaattttttgtatttttggtagagatgggggtctgactgtgttgcccaggctagtctcaaactcctgagctcaactgattcacccgcctcagcctcccaaggtggtgggattacaggcgtgagccaccacacctggcaaggatgtgcattacttttataatactggctcgttataagaattcaaaacagaattggctatccactttacatattttacaacatggccacctaaaagtgtccttttagatatgcagaaaaagtagaaaggcaggattcagtcaaaagatgaatctgagttattagtattttggaaggaaattcctttctcaggcctttaccatcatataatacaaccaatgtgagaaatgaaaggaatagggcatgtggatttagcaagctactatacaaataagggttaatatttctaggttctatttccatgtcttaggcagcattatggccttggtgttttcagagggactaaatgtaatcagcataaaactattttgcaggttctgaagtagtcacaccaatgtaaaaaatcaacatttactttttttttgagacagtctcactctgttgcccgggctggagtgcagtggcacgatatcgcctcactgcaatctctgcttcacaggctcaagtaattctcgtgcctcagcctcccaagtagctgggattacaggcacctgccaacacacctagctaatttttttatttttagtagcaatggagtttcaccaggttggccaggctgttctcaaactcccgacctcaggtgatctgcccacctcggcctctcagagtgc

SEQ ID NO: 1881597 - DNA, 4001 bp, Homo sapiens
ttttatttccataaacgtgacaggaagaaaatatgaaaataacttttcttatgattaattttttatttctaattatattttgatgtatattaatttaaataaaggttaagtagtcttttataattttctgtagttctctttaggtttgaaatgtagcacaatttaaataaagatttaaactatattagtaatatgcattagtaagtgagctataagaacagccatagaaaaacatgttgctatggtttgcaggtatccccaaaattcattaattttccacaaccttgtcaatatacgataaagtttaatacgcatatttttagcactttagcaatttcattcgtaggtataaaactccaggaatctcacctatatgtgaaaatgaggcatgtaaatgaccattcaatgcaacagttcttatcatagctatgtaagaaaacctcccacatgtcaaccaaaagtagagtggttaacccgcagtataatcatacaatgaaattttgcaagctttcaaagtgaaccagagttacacatgctaatgtaaataaatgttaaatgaaaccggcctggcacggtggctcacacctgtaatccgagcactttgggaggcagaggcaggaggatgacctgaggtcaggagttcgagaccagactggccaactgaaaatacaaaaattagccagatgtggtggcgggcacctgtattcccagctactcgggaggctgaggcaggagaattacttgaacccaggaggcggaggttgcagtgagctgagatagcaacgtcgtactctagcctgggacaagagcaaaactccatctccaaataaataaataaataaacataatccataatctcaaacaagaatatgaatttaaagctgcatatatgcaatataaataactataaatatttaaaatgaaaatgaaaacaatataatttatgtatttatatatttgtaataaaagtataaaaacgtgtttaagaaacaaaaaaattcagataatgatttccctggtgtaaaatgatgtgaaatattattgagaaagatccaggtagctccctccagctgtctcttaaagatttatttctttaagaaaaattgaggaaaaaaattataaaacccagtaaaaatctaaaagaatacaattcagaaagctggcctcagatgtaacttaataaacatgcttttcttttattccattatttctaactttcacagtgaagtgttaagcaaatattgaggtgatagctggaatgagaaagtggtatactttctccacaacactcattgtttaaagtaatatacttattaaacagatgctgaagtacatatctgcaatagtcactaattaaaatgcatgaaaaaaatcaagaaattatgacactttaatactgttcattttctcaatttctatcactcaaacatgcctccggaaaaaaaaaatgtttttctttgaaaaaaccatttgccttatacttccagaaatactacaacttgcatttacgacactcttcaaaaataaaatcttttactttcagactaaatcaatttaaaaattgtttaagattttatattaaacttcgtcgagctaatgttattgctattggatgtggttgactgtatctattgactttgacattgtcattccgagttataaatattaatggtagcaaaacttctatggatcaataaatctctacagtgattttaaaaatgccaattttgtctgaagattaaaagtatattttgtatattaactaaaaacttcttcatcaatgattacattctctcttcccagactttcctctctggtatacagccttggtcacagaccagaaaatctgtagttcaccaaaagtttcaagaattaagagccagtggaattcacagtacttacggaattggatgccaggggatgtggtgataatgactatagctctcacttcccaaagcaaagtggacaaaacagaaatgggcagtttttcccatgatttctctgtagagagaaagagaaagtacagatacattttgtttttcaaacttccagcctaatatatttgttggttggccctatcaaaatctcaacacatccaaaactgaactagctcatgttctactctatgcccatctaactccacaaacttcctcctctcacagcaatctctgactctgataattgcaccatgacctgtccacacagggaacccccgtcttttctctatctccaccacgatcatttgagtttaggtcactatcgcctcttgcttcgaccttttcccatcatctgcttgttttgcctccctccggttttcaactatccaatatagtctacaacaatgatggtgagtggctcctctaacatgaaaagtgaatcacgtcagggctttcaagttgtgtttggtataatgttcaaacttttcattatattttcaggacccttcttcactatctcctgcccatgtatccacattcacctcttgtcacttcacccctccactttaatctccagcaatactcacttaccttttaatttcttgaatccaactaattcttcttggcctccaagacttatatgctaatacctcttcttgaaatatttcccatttctatttttagtctagataattctcaggtatctttctggcataacttaatggctacttctttcaggatgccttatttgcccttctaggttaagatatgtcctattgtattcacctgtattatctatcctgtcacagcatttatgcattttagtttatttgcttcctgactgaccgtaatctccataaaagcaggggctattgtcatcttgctcaccgttaaacagctagtacctgaaacctgtgtggcatatagttgatgcctagaaactttttttgtgaaggaggcggtaagcaaataaatacattaccaaaaggaacatagcaaaggttcttaggtatggtatggtcagaaagaacactctcataagtcaggcgaagtcatacataggcagcaggtatacacagaagccttgggtctacagtgagttagttctccaaggttcagtacaactgcccagggcagatggagtctcatcaccatgtgctccatgtaactctgctgctgagggactccaaaagcactttgctctgggttttataccctagtccccagctgagtcactgtgctgaagcactgtagaacatcatatgctgggagaaatgaggacacaaactgggctgtatcacatatttcctctttatctcagaatgttcctcttggaatgtctgataattgtaaccaaggaggagaagaactgggtcagcaaaggccatctggacacctgtccttctgcaaatcattaaggcccatgcttctagaaaggggacagtgaaacaacatttatttgaaatatcatgaatgatagaaataactggttattcttatttttgttatactttattcaaatatttttcaaatgtttcttgatagataaataaggtatcatcccccaagtcttttcataaacttagaatttggaatcatgtctctatgtttttttggtttaatagttctctcttatttgtatttttgacagcttcttttgcacaattatatttcacttcactgtacgttctgaagtagaaaagtacatttagatacataatacagtatgacaagaataatccttaaacacgtattagccatgaattactataagtgatatggactaaatagcttaacctatcattatagaacacaattattggagatcgacaatgggtttcaatttgcatatatttctggtcaattgtttaaagctgccttatattcttttgggaagagagaaggtgaaacaatatgagataattagcaaggaaaataatcatgttaattattaatgtcaaccagcgaatgagaaaaaggtgatatggaaggtccatcacatagataccctcatgatattctgcaattatttagtagaaaaataaaaatgaaagtgaatggccc

SEQ ID NO: 1881598 - DNA, 4001 bp, Homo sapiens
aggcgggagaatggcttgaacccaggaggcggaggctgcagtgagctgagatcgcgccactgctctccacgctccagcctgggcgatacagcggggctcagtcgaaaacaaaaacaaaaacaaaaaagagagagataaaaaaaaagagagaagtatgtgagaatttggagagggaaaagggaaaaagaacaaaagaaacacacacacacagagaatgaagccagaaaagagccacataaataaaattcctcctataaatgctataggaatccagagaaaaagttcccgtggtttggaaaatgtcaataaaactttcctggtggaaatgaggtcggctatgaggtattaagttcaaaaggaactggatatttggtgtctctagtaagacagagctgcttcagagtctccccagggaaagacggtgctttgggcaggtagttagtgtgggtgaaggtgatgactgaagaatcctaagggcccaggcttgtgggaagcctctctctttccgcacttcaccaattatctcattttcataaggtctgcgctttccttaattgcttcacttccatcaacaggaacaggggaaagataaatacatttcaccttttaatgaagagaatttcaggtagtctgtgggagatgtttataaaaaaaaaaaaaaaagctggtagggggcagtgtctcacgcctgtaatcccagcactttgggaggccgaggcaggtggatcacttgaggtcaggagtttgagaccagcctgggcaacaaggcgaaactccgtctataccaaaaatacaaaaaaaattaccttggctgatggtgcgcgcctgtaatcccagctacctgggaggctgacgtgggaggatagcttggacccagaggcggaggcgcaatgagctgagattgcctcactacactccagcctgggtgacaaagtgagaccctgtctaaaaaaaaaaaaaaaaagtagttggtctgtgaactcacttgcaaataactggattttacggacgcttagatatttggaggtccacaagggttctttgggatcccctattttccttcgctgcctcctttgtcagagtccaactcaaaggggaaatgcccctctgggatctaaccgccacaggtgcaagaaggagcaaatttacatagaagcagcctggggaaaatagtgccctagatgagtcttcagtttgggaaacgctgagctaacactttaagtacttggaagagtaatactaataatcagtcgtggcgaggttccgcccatttgacattcaaccccccatgagtgcgcacagacaaacccactggccaggaggagccaacacaaggtcctgggcatctccgtcccgggaaggtgggtaatgcccctgtcgctctgggctccagggcgcgcccccgcagcttccccagcggggtctgacgcctccgggccgaggtgcgccaggtggcgagggtgccaggcgcggccaagtcgcggcggtctgagtcagtcacccaactatgctgcggaaccagggaggccggctgggccgcccccgccgttgagctccggcttcccccgcgcggggcgcctgctccccgcccccgcgggcggagaggaagcggcggccgaggcgaggcgcgggagcacctgagcaaggcgcgggcgccgggctcggcgtttccggagctgagcgcgggtccgcggcccgcgctccccgcctccaggtgcggcggccgcgacacgccggccccactaacagcgccgcccgcgcggccgccgccaggcagcagaggcgactgcggacagccggcggggaccgggaaagaggaggcctggcgcctccggcagaggggcgaggaccgagcgcccaaggctgggagagacgccggcgctgagcttcccagcgccgcctcacctcgcttttcgaactccgcgacccgagcgcaaggcgagtacccggggcctcgggaaggctgggccgggatggcccacgcgggggtgggaggaccctgtctggaggggctggggcttttcgacacttcaccgggtaaatttcctcagcgcaaagtgctcggctctggtgtccgccccttggatttcgctcccgcgtgtgggcgtctgaaaggaaaccagaagccggtaagtgatccaagaactccacttctgggatttgacccgggagggtgaggatccggatagacagctggacactccctccattcctctcccctacctttaaataagaagaagctgtagtgagtttcaggcaccaagttatttactcggtagagatcatgaatttgcccgggtgtctgtgctgccccgcaccctgcttgttaaccacgttaagacgactggcctgttaattaactttaattacgatcatttggcttccacctgcctgaacccgataccttacacgggaacctgtatgatgtgagtttaccagattgatctttcttgtttacttttggagacagttctcttgggagaagtggtgtccatcctatttaataaagtaagttttactttatctaattctggcttgttttcttaaacacctcctaccttgaggtgatctggagttattttgatttggggaaagggttcgtggattatatagcctttgataattagaggaaaacacaagaaaataagctaatttgtgtggaataatgacatcttagggtgttgtaagtaggtatcctgatagcaaattctttttttttttttttttttttttgcaagcttgtccttgaagtaggctgttcagtagaatacagccttcggtttaaaaaaaatcaagaagtgtattgaaaataagctatttttaaaagtacatttaataggatgtcattgttattactcataatagtattgtacttacaagctcagtattgatttatctgcacttaagcactctacacccccacaggcccatggaactttgcccgtaagtaattggaagataaaaagcaagctaactttttttaaggaaaaaaagagaaatacctttaaactcttttttttttaactcttatttatgacttccatacacttacaggagaaatattgagagaaaatactcatgacattttttgtccaacaacgtttaaagaagaaaaaaaagtgggtcatggaactaggctagggttaagtgcaaatatcttcctggcttctttctaaacatatttaacacatacacatttaaggtggttcctaacacgaagagggttttatatagatttgtcagtactcaaagatttatttgaattaaaatgtacctagagggtaagtgagagagcttgttaaaacgtatttatatgggtgtgtgcttgtgtttgtattttttccttcgtctgtaaacctgtcagattttatgtggcttgtctgtaaaaggagaagctgatggtacgtttaaaaacaaattcttgtttttctaatatcactgcaagctccttgcagtgtaaggctcatggatatgcaataatatcagatccaactattcttggatactgtggagaagtatagaactcagattataatgaattacagttttcttaagaactttaacgcattgaaactatgaagttttaaagtctacgtagaattctgggttatagacttcatgatatatgagaagttttttgttgttgttgttgtttcgttttgttactttctaacccacctccctgcaactgtgagaaagtttggtgaaagtgactataaaaatgctaagtataaataatagtcattgctttaatagttttcttttagcatacatttccacctgtcctcatttatttattgatacatttcttggatacaatctttgcacatgctacattgtaagagttttgggaattcttggtgaaatattaattaggtagagaacttcttaataatctgggaaatatgtcttagctttgaccacatatggtggatgtgagattagaggctatgagacgctgtcttaatcttttctgcaaagttctggaccttgtaatttat

SEQ ID NO: 1881599 - DNA, 4001 bp, Homo sapiens
tttgacatgctatcttgcctagtaagcaaatccatttgctttgaattctccatgatattattgtggcttgtggatgacctgcctggtaatgttattgactgaacccatttattttctcatgagctgttacaagtcataaaattattttcaatgctcaatgatgccacaaggaacctaattgaaaattagaattcagaatgcatagctagattctgagaaatcataactaaattacaaatttgtcaaaagaaattccaatcagtaattattggctatattattgatacatgagaagatatgtgagggagtggatggaatgctttgaagacgtggctcttgttattgtttcacattgtttagtaagaaaattatcatcgtgtgaaggcctatacccaggacacaccacactcagtgaaagatttctatcaatagcatagatgaaagctgctgttgaagtctgttatctgggctaacttttggctatggatgcaagaagccattttaatagtctagctccagtcactatttaaactaataaactccagtcccatagggagttggtctgatatggtaattacagtgagctaagctatgcatctgacagtgatactaaacttgagttccagctctactgtttacaaagtaggtgaccttaagcaagttaactcttaaacctcctaaataccctcatttataaaatgaggctagtaatagaatctaattcatggagttgctgtgaggattgaaaaagatagtttatgtactgggcttgcatatgggtagtatttaataaatataaccctagtattagttattaattagtattagtattagttattattcataataaaaaagagattatgtactgggcttgaatatggatagtatttaaaaaatataaactggccgggggcagtggctcatgcctgtaatcccagcactttgagaggctgaggcgggtggatcacaaggtcaagagatcaagaccagcttggccaatatggtgaaaccccgtgtctactaaaattacaaaaaaaattagctggacatggtggcgtgcgcctgtagtcccagctacgcgggaggctgaggcagaagaatcacttgaacttgggaggtggttgcagtgagccgagatcacaccactgcactccagcctggctacagagcgagactccgtctcaaaaaaaaaaaagaaaaaagaaaaaaaatatatatatatgtgtgtgagtgtgtgtgtgtgtgtgtgtataataaaaaatataaccctagtattagttataaattagtattagtttttattattaataataaagttatttatgtactgggcttgcatatgggtagtatttaataaatatgactacccacacatacgtgtatgcacacactcctttaataataaaaaactccagccttgttgatgtagtggcttgtttttttctaactccagtctcctgaatgatatacttgggcaaaggctcttatctcttattcttagtttatgccagatatagtgtgcaaagcaagtttgaggttcagcactgaagaaggtaggacatcaattcacacatcagaggcaaatgccagcagtgtatcttgaactttactagaggctgtagggactatgagagaagattgcagtaggcctctggggacacttaatttattaaagaaacttaatgcaccaaaaagggacccaagagggatgttaaaagctgctgctagagaggaagtattcccagaatctcaggagcagctggaggactccggactctagcagtggttggccggtggtgggtgggggatggagtagaaaagagaaagtaagcgccagaaaattacaattgcactcaccaattcacagactgtccttcctctcaatctccttttccccttgactttacccttgaggggccagatgcagcagctagcgaacaagcaaggaagtgagcatgtgggaagaaaaagtttagccttctccatttcactcaccacaccgaaacaagcgagacaggctttccaatttaaagtaggcttgtaagagaggggtggtgactgagtacagtaggctttataatgaatgaactatactagagatagtcttgcatactagattagaccagacacttttataatataaattttcttgtcattgacacagatgagaagacctaggagacccaccctatatttcatttgggggcaggagaagtgtaagttcagaagcacagtttggaagggacaataaaagaaaaacttcagttctttatatttcattgttccctgttcaattctgctgtctcaataaaacatttacccatctaataattattcaaatgttttgctttttatttagaagttcactctgtagattataaagataatctaataaattaagttgctttcttttattaaaaaaattgctttgtaaaaactgtcttcacccagagaataaaaggagtatttcctatgctgtttcgttttgtttttttttttttttttggagatgaatgaaaaacaaaaatctcctttttttagtgtcctagaaactgtttttaaaaagccaagcattcatggctgaatgaaggcatgagcagtagttcctttataagtgaaagaaagaacagttcaatcaagcatgactaccacagtttccttaaaatgtttgcaaaatctactgggcagacaccatgttttctgattgctaaactagactgaagtaatgtgggtatgagagtttccacaggaaagaacacaaaacatgacacaggatgccacagaagccatgtggagtgaaggaaatgcaaacctgtgagttaggcctttgaagctctgcgcacctgctgttcagcataaccgagatggtatgtcatatttcacacatagaaaaatgatcaaatggcagatagataccttttctaaaaaaaatgtgttttagagaaattgagaacgctaccttttcagatagaaaaacaggatatatggatttttgttttctaaagtaagaacagcagatttcactggcatacaagttactagcaactgatgtacacactgtacattaagtcaatgattaatgtctttttaaatcgtgtcaatttctggaactagctacagggaaagtaattaggttagcatctttactgtccaatctaccaaaaaattttcatgaagtgctgacatattcttattctctgttccccttcctccaatctatttttagttacttggtttggggataattattgaatttgtttatataaaacaaaaggggcatctcacattaaaacaaattaaatcttccctaattgcttagaattcgactgtagaaaatggaaggatgaattcactggatgtcctttttatttctctaaacccagaagtattgaattataaatacaaaataattttatgaagacctcaaaaagattaattattcctatgtattatctgttatgttatggtctataaatgctcatatgccatgacaattctatagattagacgactgtggacttctttgcacacatggtatgccactatggtagagtgggtgaaaagatggccctgaaatcatatatgagctatctagtaatgcatttgaaatttaatctccctgcatctccatgtgtttagctgaaatatgggcataataacagtatctttcattaaaggttattttgaagattttataaggtaaggaaataaagtgaattacattgtcccctcttaaatccactcaatgactttctattgtccttttgataaaatctccacccctgaacatggcctctaaggccctacatgatgtagctacctgtacatccaacttcatcttgtctactctattcactatctagctgaaagctttttttctttttcagttcctccgaagttcctgctttttgctgcctccaaggtttcacaaattctcttttttgcctagaacacatctccgccctcctcctcacagcacacatagctccctcccacccagc

SEQ ID NO: 1881600 - DNA, 4001 bp, Homo sapiens
gacccgtttccttccatcttttcatgctaccattctgagcacatgcacctcatcctcaggtatgcaagatggctgcataccttagcactgggtatacattttaggccagagaaaggagacaaaataaaaaaaattgatgtctatattagtataactggtgcgtatgacaaaaatctaaaattatagtgatgtaaagcttatctagttcttatattaatgaaatctggagagctgacattctaccacatgacaccaggaacctatgcttcttttatgtttttgttctgtcattcaaaacctgtagttctttcaatataattcatcttggttgctcaagatccaaccatcatttctttatctgagcaagcaaaaaagtggaagaagaggaggggataaatggtccttttatagtttcatcttggaagttgtccaccacacatctgattatgccaccacacatttgattattgcccagaacttagtcatgtagttacacttagccacttagggggctgcaagggtaaatgtagtctatattttttctcacttgggtggccataggtctggctaaaatcaagggtttcaaaatgaatacagaaaagaaaaatgaatatgaggagacaactagcaggttttgctataattaggaaaggaaatgcccaaaaatactcagcagacttctatctcaccagccagatctatatcctctcatatgcttgagcagcagtgttctggtcaatcaatcagtcactgaaggttctggtagtaaggaagaaaaagagaatggatattgggtaggtgtctagcaaagtctgccacacttgtatacaagttcctcaatttgtggagagatgttcccttcatgatatttatttttctttttaattttttgggcatttttaattgatatactatagttgtacgtatttttggggtacatgtgatatgctgatgctcgtatacaacgtgaaatgaccaaatcagggtattgaaatatccatcacctcaaacactatcttttctttattttattttatttttattattatactttaagttctagggtacatgtgcacaacgtgcaggtttgttacatatgtatacatgtgccacgttggtgtgctgcacccattaacttgtcatttacattaggtatatctcctaatgctatccttctccactccccccaccccacgacaggccctggtgaaacacttatcttttctttgtgtttggaacattacaatccttctcttctagctattttgaaatatagaatacattattgttaactataatttttctgctgtatgattaaatactggaacttattttttctatctaatggtattttcatagccactaacgaacttattgctgattctcagttatacaacccctcctctttcagttggcatgctaatttctgaatgtcagattcctttggtgtgtctacgaatgtttcatctgcttaccacagactgcctacagtgatttcagggcagaaggactgtctgtaaggcaacatggcctggtcttctggttgtggagaattcaccctccaatctgggttctgcccaagagcccatgcgtactgcccaacctgggggctaatgactccactagtctaccacctgctcatcagggagaaggagtgacctcttagatggtcatttattggtgcttggacaaatcttcccaagagttcatctctagggtcccttagagtcctctttatttcctaccacagaacttggggcatccctgcaacagttaccaccttttgcagaagttctctaatatacagatttggggcattgtttttgattttaaattcactctcatttgtgttctatacacagatatttctcttaatttccagtcccctgagggtatctctattgtagataaaacaacaacaaaagattttctgtcatctctcggattaggggcagacctgcctgtgtactcagcccagtcaccctcttggttcaatccttcattataattctctactgtacatcagacaataagaggttaaacataacgctgatgtcataatgggtgtattcgtttcctttggctactgtaacaaatggccacaaacatggtggcttgaaatagtagaaatttattttctcacagttttgatggccagagtctgaaatccaatctgcaaagtctaggggagaacccctcctttcctctcccagcttctggtggctccaggagttccttggttgtggctgcatcacaacaatctctgtcttcacatggctttccactctttgtcttctctcctccttttataaggcttcttgtcactggatttagagtttacttggataatgctatctgcaaagacccttttccaaataatgtcacattcacagggtctgggtattaggatgtgaatatataatttttggggctgtaattcaacctactacaaggggctacccccaggcaaataagttgaacatttggcaaataaggttaaaaatactcttgtgttataattgacagcgtgaagtatctcctggagtaggtaaacattaacattatatatcacagaatgaataccagctcccacgcattctttaaaactctctccaaattctctcactttgttaccttatctgtagaggtagcttataaaaaagcaaaacaaaaaaatattcactttccagaaatctttgactgtcactatttgtagtatcctcatgttctgagaagactgaagactagatcatagcaataaaataagttgttcttttccttacgtggactctaaatcctataccagcattcacccagtgattatacatgatttcctcttgtgaggctagagagaaagccatagaaagaattgaacaatagtgaacccacgttggccctttgcactacaggtgactccatcacaagtaacacttttcaaattcatgcccagctgctatcatccctcagtagctgattccctcagcagcagtctctctggggctctggtttaacctagcttgggggtcatttctgtcttttacaagaggcagtcgcatcttgctatgaaaatttcttacaaaatagtctagattctctgctctcctcaaatactatctatgggatgcttttattcccccacctggggacaacttgcaggtagatggaaataggtgtgactggacttttctgaggcagatttgtcagtcatctagtgttcataggtagtgctgataagaaaattttctcaaggatgtgcaaggttccttggggaacagggaaactgggtttgggatggtcagaacactgggcagcgtctgacatttctggcccaacactaggactagtgccttctgatttccaccactccaaaggtggtgaaggtgctgcggaactgaagatgggttgtttctgattaaagaacccactttagcaagagtttgtggtgctccactttctcctctctgggacaccactgggcagaagtgaggtgcgccgcagggactatgaaggctgatgttagctaaggcttaataagacttaacaccctggagaaacagggaaactgggtcttcaatccatttcattgctcacggttctctgagcctcgaagtaggagagacagccagagagtgaactccatttattaacaagatgactcaagactgatggagaatatgcagaaaactgaaactgaactgcttccttacaccttatacaaaaattaactcaattaacacaccagggcctgttgggggttagggggtgaggggagggaacctagatgatgggttaatatgtgcagcatatcactgtggtatgtgtatatctatgtaaccaaaaccataaaaaccctagaagaaaacctaggcaataccattcaggacataggcatgggcaaagattttacggtgaaaacttcaaaagaagttgcaaccaaaacaaaaattgacaaatggaatctaattaagctaaagagctcctgcatagcaaagaaactatca

SEQ ID NO: 1881601 - DNA, 4001 bp, Homo sapiens
ttcatgattcagtcttaataggttgttttaccttcttaaatatttctgcatcaccatttctcctttctttgcctctctttcacactcctttccttcctcccttgaccagacaactacactagctgtcttgctaatttcctcatttttactcttatgctcctctcatgcgttagtcaaataagagccagaaccatttccaaaaaaaggctaatcatgtcagatctctctctgaaacacttcagtggcttacctttagtcttaagatacaaacaaaaacttctaaacaagacctatgaggctctacatggacttgtctttccttaccttccagactcatcacacactatttgcccctcttacactcctctctacatccacctccttttttaggcccttgcatttgccaggctccttcgcgccacagagcatttgcaatactgttccctctgcctataacacacctaacccccacttcccttgtgctctgctcttcttccttcagatatcagctcaattatactcatcaggggaaactttcctgtttttccttatcagtcaaacttccctgttgtgtgttaccatagcacgtatcatgatggtaattttgcatttgtttttgggcttatttaatattgttgttgttgttgttgtttttaacctaaacttcaaactctatgagcacaggggcctgtcatttatgttcatcattttatccctaacagacatcagattgcctcagacatagaataggaactcaataaatagttaattaaagaaacagataaataaataagtgaggaagtgacacagaaagcttaagtatctcacctagggtcatacagccagtaattaatagagctggacctgaaaccggcatttcagctgctgagaccacacttttaacgaccacatgtttatttgtttatttacttaatcttctttgttcttatttttgttttccaaatgagatttaaaggagtttataaaaatttagcaagaaaactaattagaaataggtgagtaacagaaaaggagaccaaaaataggtccataaaatacaatcaaggtgacagcatttggaagagatccttgaaattgtatacctaggcttacaaatgctaatctcacatttaacattttatatacatagttactaaaccatgctaaacaggcctgttcaaactagaaaaaaaaaacctaaggatactgatacagaattaatgtaaccatttcctgtgaatgaatgttagccttcctatgaaaaacaatgccctttaaagtttagcaaaaattttaattcagttgagagacccattatatagtctgtagtctggctgtggtctgtgtaccaatttccttttttctctgtgaacgtcagattacaataccttcccactgaattaaagtagagttaacaatttaaaatatgtttttatttcagggagattctggtggacctctggtttatgataatcatgacatctggtacattgtaggtatagtaagttggggacaatcatgtgcacttcccaaaaaacctggagtctacaccagagtaactaagtatcgagattggattgcctcaaagactggtatgtagtgtggattgcccatgagttatacacatggcacacagagctgatactcctgcgtattttgtattgtttaaattcatttactttggattagtgcttttgctagatgtcaagaagcccttcagacccagacaaatctaatatcctgaggtggcctttacatacgtaggaccaaaccctctctaccatgagggaagaagacacagcaaatgacagacagcacctattccttactcacaagggaaactgcttgtgatacttcctaataagataaataagtggtttccctcaattgaagacaggaacatcattttccacaggatatgaagagctgccagtaatgccaaaatcttacctcatataatacctggagcatgtgagattcttctagtgaaaaagaacagtcttccctgaagactcagggcttcaacattctagaactgataagtggaccttcagtgtgcaagaatggagaagcatgggatttgcattatgacttgaactgggcttatatctaataatacagagcactatctctaacctcaacagttgacattttaaaagtttttaaatgtatctgaacttgctgttaacacagtgttataactcaagcactagcttcaggaagcatgttgtgttgttaagaagcttttctgatttattctttaacagcatcttgccatctatatgttagtagcagttggcccagaaaggacaaaaaaaaaaattaagactctttggaacgtttttccatgagcacaggaggataaaaagaagcagatgaaggctaggagaattggtttcaaataattagtaacaggacaagcacgctaatttttgatggaatgagttatccaattatttacttagaaatatttatatcagtatatggcaactggtacttttgtaagtcttcagctctctgacaagtcagatgtccatcagagtatcaggtcaggtgtctatcagaatatcagagctgatttgtgtaaagctttgtgtaaagcacgtaggacagtgccttgcatatactatgaactaaataaatctttgttatatggaaatgaatgccttggcaagctttaagataaatgagctcaattttttttcaaataagtggtacatacggcccaaatcctaatgatggtaatagtgatagaaaacatggactttgaaccaggctcctcaagttgaaacatcgtctctgcctcataggagctgtgtgtccttgctgaagttacttaacatctctcttcattaactctttcacctctacaatgggaataaaagtggtactacctcataatagttgttttgagaattaaatgaattaacacaagtaaaacacttgcaatagtgtctgcacacggtagtgtctcatggattagctactatttatcattaataatgtgctttagactcaataaaacttactatactttcaaaaaattgatctttgcttctttaaagccatgtaattgatttcaaagtactttgaattacgttgtaagacaaattcggtgaactactataattttttcaaaatcacttttatgccttattaatatattttgcactatgtctgcttatagacaagtagtcataggatgtgacaatcatctgtcaccatagttctgactacagagatgcatccgtatttctatagacctcaaatgtgagattagatttgctgctctgatttattagagaaaaatctagactattcatttccctagtgttggaaaattttgttagtttacatgtacatgtgtttatatgtgtttatatgtaattgagagaaatacaactaaaaatatctcccagttattattcacatctcagtaagatataaacacaaaaagcttatcatacacatttcctctttaaaaatgaaatgtcatcgaatttctgagtcaatgactaggagtaactaccaccagagaaaacagagtaaaaacttaaattcttacatgtccttcacttaaactcctacagtttgcatatagcacagaaacatttaaagtttttgagaatgtttagcatattaaagatgggcttgattgatgatgaacatattttatattaaaactaaacacttcctttagtagatagaggaaagcagatctgactaccaaaaaattactttcctctatgtaatttctataaccgtgaatatgtgttttgtgtaattttatttatatttaataagactgtgatacctttttgtgaataagtatctgtgaaactgtgtatactgatttaaatatttctgtgcttaattcaattgaattcaatgatatttaagcacaaatgagagaaataaatacacaaggttataagaaaatccaataatggaaaagtggattttttaaacagaatttatatgtcctatttctatttaggtgt

SEQ ID NO: 1881602 - DNA, 4001 bp, Homo sapiens
tgactctactccctgaaggtggccatcgttcaaagtatggagtttcacatctcaacaattacgatgtgatctctttgattcattaccaatggaaattgtctgagtcaagcatggtcaaagccaagactattcaagcaacacgctgacttattttaaattactgttccagcaaaatgtatttttaattgccataaaaaggtgttacatttggagaaagtgctctcaaattgatgatgtgatgtagaagagagtagtgaaaagttagtgaactgacatggcttataaagttaacttgtatctagaatagcacaatattgtcttctcttcctcatctctgagatcttgttttttccttgtttcttacatgacagaattattgaattatttccaaacatttaaatctaggagacttttttttcatgtcagatagaacaagtctagttaattacataatttggagggagaaactaagatatatttggtaagttagatatataaattattgtgattatttaatttttcatgtttttctttaaaaatatgtgtatactaatgttaccaatgagaaatcagctttataaagtggaaattacaacaaatacaaaattattacattttaatgttggaataagcatcttctctaatatattcagtaaaaatattttaagacacagtgatttgatggctaggatacaatatagtttcttacttatattgtttttaattgactttctaaaatacttaatttctttttcctgggccaattaatttttttatgtcgctagaataccctctatactttgtagtcatatagcaaaatatgctaaagtgtcagataaatatttctaatgttattattgggtaaatattactatatttattagaaatgacagaattctaaaaattcttggcatgttctttaaagacattctatttcccttacagcactccctcctgacaactttgaaaggccttctaagtcaattaccagaaagggaattataagaagttgttttctgaaaataggtgtgttccttagataggcaagtccacgatgaacacaaagtttctaagctcttttctcctaaacgcctgaaaagtattaaaaggcatggaccaagaaaagggaatactgtatattctgttcaataatggcatgagcactcctgtctaaattcagcacagaaatcacaggttaggcaaatcataattaagtgcaaaagcctgttcctagctttggacaatttttatgaattttggaaacatgagggtaaaaatctttattttagttaaacagtttggaggacatcctcttatccttaaagttccattttcatgaactagtttcaccattaaggtattgtttttgtgagcacacttcctataagagaaagaagttttaaaatataatttctgtcttcaaataaaccacaagaagtctaaagccctcagaagaaaatctaaggctttgtttttttcctaggatgaaaagggagaatgccagtgttccagacgagttgcaaatggtgctgtataactcaattctccaatgtatttaaaagtatacagagagctctctgttgcatttttaaaaatgagctcttgcacaataaaattgcatgccatgcaaatgaattaaacaaacgattggagacaaaataatcaaatcaggagaaggacacatcagtttcatttctccacaattaaccaaagtattctaatacaatgtttttttctttcatttttaacactctaaaaaattctgtagaacccaaattcttaaacctggcatagttaagttcttatcagaagaaggtacacgtgctatataggaaaataaatacaaaaaaaaaaaattccctctatcatccaagcatctttgggtgacttgctttttgaaatgataacagaaggaacagattacctgacacacagaggtaatacctgtcctggacggagaactctatttcaataaactcgtacagattctgcgagagtggcttaaacagtttcttctccaagtcctcctttaccaatgatgacatttcctccagttccacttggcctgatgtcttggctcaagctcactctttcctctccttttgctccctagatttctcgtttgggtttgcagctccttggtgagtcctgcccacctctcagccctccctctcttaacttctcattcctagccagagcccagattcccgagagcactcagcgcggtcagacccctcactgcggtatctgcccagtggcagcagcggcggcggcagccaaaatacagcagcctcactagccccaccgtcagtcttccgcgaccagcctcaagcaggctgctctctggagctcctctgtggcttgctggtagggaaacatatttacgaccaccgactgatactcatagatctacttgtggagtcccctggctattccagtcttggtagcctcttcccctttcacaacactatgcaaagaccacgatttcagcttgatgccattatataaatcagctgtctggctctattgattgggatcatcttccattaagaacttttctatcatcggcaagagaaaagacatttgtgcttgctcctaacacttccaacaagtctctttccctcccttccttcgcctcctgatctttgcttccatgacagtctgcaccaattcctgggtctaaattatttttaaaatggaaatttttaatgggctcaatttaatagtatttatgcctccactcacaaaaatgtattagccacctactaggggaaagcatagaaattaggagggtgaatttcttagcctcaaggaacttctaatctaatggagattagtacaccaaacagttatcataaatgtgtaagagtgataaaggcacaaaggagaaggaaacacggaatagaaaaggcatttatacctgaaaggtattggagaacgtgctatgagagaagatctggagcttgaagaatgagagaaaagtagagaggtggaagagaagcacatgccagtccagggagccaaaaaagcatgagggctgtgctatggtatgaatgggccccctccaaaactcaggtgttgtcaatgtgatagtattgagaggtggggcccttaaaaagtgagtaggccatgagggctactccatcctgaataggactaaggcccttataaaagagccttcacgcaggtttggctgacttgcgcttctgccttctggtatgtgaagacacaacattcttcccatccggaggaggcagccctcaccagatagctgaacctgccagtgccttgatcttgaacttgccagcctggagaactgtaagaaatacatttctgtttcttataaatgacccagtctgtggtattttgtaatagtggcacagatggactaagaccggatatttggaaggacaggaaatagcccagcttttctgagttgtagggtatgtgaaggtaaaagattagcctggaaagatagattggggccagatcatgaagggccttaaataccagctaagcctttggactttattctacagaagtagagggccaattaaggttattgacattcattctttcattcatttattccttcaacagacatttattaagaattgaccatgtaccaggctcttttctaagaactggtgatacggcaatgaaaaaataggccaattccttgctctatggagctcaatggggtagatagaaaatgaagaaataaagcagtcatacatccagggtgcactcagctgcaagtaacagaatatatgacataaagatataaataatctcatgtaatagaaggtctgcaggtaggcagtcccaagagttagctcaggactcatagataaagatcccaaatgctttccattcttctgatctaccttcctcagatgttggcttttttgtcctgaggctgtgtggttcagatccaaagacagaaagtaggagaggtggctcttttatatttcttttcatgaggaagaaaaatctttttc

SEQ ID NO: 1881603 - DNA, 4001 bp, Homo sapiens
cagcaactctggcaggctgaggcaggagaatcgcttgaactcaggaggcggaggttgcagtgagccgagattacgccactacactccagcctggagacaaagactccatctcaggaaaaaaaaaattttaaattaaaaagttctagtatctaaaatgagcaaaatcgccaggcgcggtgggtcacacttgtaatcccagcactttgggatgcagaagtgggtggaccatccgaagtcagaggttgagaccagcctgcagtgagccgagattgcaccactgcactcctgggagacagagtgagactccatttcaaaaaaagaattagccaagcgtggtagcatgcacctgtagtcctagctaccggggacgctgacggggaaggattccttgagccagaaggtcaaggctgcagtgagccttgtttgcaccacctcactccaacctgggcaagaccccatctcaaaaaagaaaaaaaaaaaaacacaaaaacaacaaaacagaacagaacagcatcacttccttatcattagtttgaagtaaattgcctgtaaaagtttccattttcaaaaaaagtattaaaatatagtgcaaagccaggcacgatggctcattcctgtaatctcagcactttgggaggctgaaatggattgccccaggaggtcgaggctgcagccgagcgatcctcccgcctaagcccggcaagtagcggagactacaagtgcgtgccaccatgcccagctaattttttgtatttttgtagagacagggttccaccatgttgcccaaactagtctggaattcctgagctcaagcgacccacccgcttccgcctccgcctccgcctccccaaaatgctgggattatgggcgtgagccaccaggcctggcccaattactttcttcagtctgagcatgagcgctggaagaaaagcgctcacttgcatataattttttagagacagagtctccctctgttacacgggctggagtgcaatggcgcaatctcagctcactgtaacctcaacctccagtgcttgatcgcttatataatctcagctcactgtaatctcaacctcccgggctcgatcgcatatatatacacacatatatttgtttgtttagacggagtcttggtctgttgcccaggctggagtgcagtggcgcgatctccgctcactgcaacctccgcatcccgggttcaaacaattctctgcctcagcctcccgagtagctgggattacaggcacccgccaccacgcccgactaatttttgtgtttttagtagagacggggtttcagtgaaaccatgctggccaggctggtcttgaactcctgtcctcgtgatccacccgcctcgacctcccaaagtgctgggattacaggcgtgggccacctcgcccagccgaccgcttatatttttaaaaagatgttttcttcgtttcctagccccttctaccccgctacaaagtttcaaagacttaatgctattacaaagggccgtcagaggtcaagctcaggggtgcagctccctcatgccgggcagcctcagagggggccaaccctacccaggatgagcggcgccaggtagccggggacgctcccgggggtccccgggccctgcctgggggaggtgttgtggggcgcacgtacccaggctcaggtgaggcgagtgggcggccggggctgcagctggcgctggccattgaggagcttcggcgcgacagtgcgatcggttgcaccttctgcgacaggtgccggccggttggcgcgcagcgcctgctagcgcagagtctggcccttgctgcgcccggccccgaagaccgggaagtcgtaaagctcctcctcgcagcttatgtgcggcggcggccgggccgaagcctagcgacacagagctgccagctcagcagcgggttacatcccgcccggccaccggtaggcagcgtccgctcaagcgcgctcctggaagacccagcagccccgccgcgagttccgattggctccgcgtgagtggcggtcccctgcgacctcacaagagcgcgccttccgtgacgccgcaagagcgcgccttccgtggcgtcacaagagcgcgccttccgtgacgtcacaatggcgcgccttcgccgacaccatagaggtgggcctctggcgacgtcagaggcgtgggtgttcggctacgtcactggggccctacggtgcctggagctgggcagtcttctcgtcagagtggggactggtaagagcgacctccccgccaggtcctgtgtgttgccagccgaagaagggtagctgaaaaattcagacccagcacagtgtttatgttggtcaaaaatagaaaactatgtctggcgccgccgaggcgggaggacccttcaggccaagagcagcctagcaacatggcgcaaccccatctctgtagtcctacctcagctccccccagctgaggggggctcagccccccagccctcaagtatgaacccaacggttcaaggctccagtgagctatgatcccatcacagcattccagcctgcgagattgaggtaaaccctgtgtaaaaaaattaaaaaactatccaagtgtgcaacagggagggactgctaaataaaacatgaggctggctgggccctactgtaatcccagcactttgggaggccgaggcgggaggatggatggcttgggctcaggagttcgagaccagcctgggcaacatgacgaaaccccgtctctacaaaagatacaaaaattagccgggcgcggtgtgcacctggcctaatttttgtattttttttttctagagatggggtggggggggggcctcgctatgttgcccgggtcagtttcgaactcctgagttgaagcgatcttctcaccttggccatcagagttgtcgggattacaggcgtgagggacagcgccccacctgggttaggctacttaataacataagaaagtgctccgccaggctcagtggctgacacctgtaatcccaacacttcgggaggccgaggcgggtggatcacctgaggtcaggagttggagaccagcctggccatggtgaaacccagtctctacaaaaaatacaaaaattagccaggcgtggtggcgcatgcctgtagtcccagctacttgggaggctgataaaagagaattacttgaacccggggggcggaggttgcattgggcggagatcgcaccactgcaccccagcctgggcgacatagcgagactccaaagttttgacaccagcctgggcaatgtagtgaaaccctgtctctacaaaacaaacaaacaaaaacgcaggagtaactgtgtccacctgtggccctagctagttaggaggctgaggcaggaggatcacttgaggccaggagctcaaggctgcagtgagctatgataatcccactgcttcccatcctgagcaatagagtgaaagcatgtctctagatagctagctagctagctagataattgatacgtagttttgtatcaaattttttccctagatttgagcatgtttttctaaagtagcattcaacacatcagcattttacagtcttattagttgttaatatgattatgtttttctgaaatacagtatcctttacaaaagcagttttgtctttcaaggcacatagataaggccctcaagtgaatttgtctgatgttggcgaccttggtaccattttgtccacttgattggaaaagtcagtcaataatttcaggtcactgttggccttagaagaagagcccaaaggcaacaagcaaaggcgctggtgtccagtcaccttctagaagcattttcactttcccttaaggtttcccttgatgaacatagaagtactgtatgtagaattgacccagtgctgccctggcaactttttatattaggccaaatttacatttcttacctttatgagaggcaccctggtaggctagtggagttacacacaaagtctgatctcagctgcactgtccagagatgcaacacggtccaatcaaataa

SEQ ID NO: 1881604 - DNA, 4001 bp, Homo sapiens
ctggtgtcctaggaatgaactgataaaatgtaggtttagattcaggtgtggttgttcacacctgtaatcctagcaactcaggatgctgaggcagaaggattgcctggggacaggagtttgggaccaacctgggcaacatagcaagatcccatctgtaaaaaaaaaataaaagtcgggtatggcagtggacacctgtagtcctagctacttgggaggctgaggcaggaggattgcttgagtcaggaattggaggctgtcaagagccatgattgcattaccagcaataccataactcaaaaaaaaaagtttataaacctacaacaaatacatctaggatatgactcatctacatatctttgtcttataagcccttgcctaattattcaagccccttcataaaaacatcttttggttgcaatagagtttaaaaagagaaaacaggagaacataattcacctaccaattggtgagtgcattctgaaggtaaccatgtgacttaaaggtcctgtgcttctcattgaaatctctcaactttctaactgtggtttgtacttctccatgagttgctttctgaagaaactgagcaaccataatgttggagctgaaacataatatttatgttaaagatagcctcaagcccttttcttccattgttttttgttatatcattgctccattccctccaaaaacaattaatgttatttcaaatttcagacaaaacaatagtgataataaaactcacatgtctcttacattctgcccgggtaattctggctattaatatactgtatggctgaataaatgagattttatttgctgctgtgctgcctgaatgcttgtgtcccctaaaattcatacattgaaaatctaaccccaaggtgatagtgttagtaggtggtgcctttggggaggtgattaggtgatgaggttggagtcttcatgactgcaactattgcccttataaaagaagcccaagggagctggtttacttttttcaccatgttaagacacctcagtaggcaccttctatggaccagaatgtagagccatcccagattccgaatataaggatgcttaccagataccaaatctgccagtgccttgatcttggaggtcccagcctccagagctgtgaaaaataaatttttgttgtttaaaagctatccagtttatggtattttgttatagaattcagatggagtgagatatttgcataaaagaaaattttccaaattgaaatccctctttacaattctacaacctatatttgttctctcataaatttctagatgtatttttatttactgtaagttaagcaaattctcggaatatgtcttcacttgtatttaaactgtattctgtgaatgacttatattcaaatatgttgtgtaggtgaaatctatcattgttctacaaataagctgcatgtacttctgttaacacttctgaattaaacttaatatttcagttatttaactctttatattagaagttactagcacaccgaaaattaaggtttagcattggatataaaagtataaacattaataccttgccaggcttaattcggcaaagtcggtgtttcacacatcttggatcacctccatcttcttcatcatctccactcaccaaaatcacatgcatatgttctctattgataacagtgtcatttttcctataataatagctcccaaagagcttagcagttgttaaataaacaaaccattatcatttactatattaaaataagaaaaggtttcagaaacagctattctgagttcaacttctagctctggtacttactatggtcttgggaaaataacttaagttctctgagtttctgtttctctggcaataaaatttaaataagttctactatattgggtggtagttaagattacatgaaagcatatatgggctgggcatgatgactcatgcctgtaatcccggcactttagggtgccaatgcaggaggccaggatgccaagacttgaggccaggagtttcagaccagcctgggcaatatagttagacctcatctctacaaaaaaatgaaaaactactcaggtacagggttaggccgctgtagtcctacctactcaggaggttaaggcaggaggatcacttgagcccaggacgtcaaggtggtatgaatgatcataccactgcattctagcctggataacagagcaagaccctgtttctaaaaataaaatttaaaaataagaaaacaaaataagaaagcatatgtgtgaagtactgagcacagggcctggcacataacaggtactgaataatttagctcataatattatttctgctattattcaaagtattgctttgtctgaaactgcttatccaattctaaacgtaagtttaaaatagaacattctcttacctagagtggaagtgaggctaaagtggaatattcctgtgtgtgttgcttcaatatatcagctctctctgtatattcattccacaaattaatgtcttgcaattttcaatgattctatttacagtaatgacctctgaaaaagataagccttctcatgtacactgtagtagtcattgtggcttacttatcttatccttatacctggaatatgtaaattgtaaataggattttccacccgcatctagtaaacttctctaacgagattgacatttaatgtagctgaagaaaacaagaaaagatgtgggtttagcagtcttcattacttcgtgagaacctttatggaaagtgttctatcatttgagagaaatgaagaactttatattctttccaagtaattactattaaaaagaaacctttttctggtgaatattttttccaagcaactatggccctgataaaactgaggaaatctatgacaatgaagaaatattgctgatggattgaattcattaatgaatactgcatttttaaacaagtcatgtcaatctgcttgtttctttaagatttcaacatgcaaactttataattaagtaatccataaacactcttggcaaatgttggtctgcaatacctcatttcttagaaatgattgttgacatgtccaaagttctaaagtggaagggaagaagataaacatatactaccacagattgactaaatggtcagggctcaggttctaatgctgggtacattttcaagtccctggggagaaggggagttaggagctgtacaagcattgggagtgaacctaaaagaatgggacctaatttatcaaacacttactatggtcactttatatgactctcagatagttagcaatattagtatgtcttgaatgagaaattaagactcagagtcaagtaatttgttcatagactcacaggtaaaaattcatgtctgtctgactttacagcccacacatccaagagctagtgttaaggctgagacaccaatatccctcagctattgtctgctttgcctatcaaccaattcttgggtctaaggcagcaaacaggtaattagttactaaataacaattgtaagatgtctatacatgtaaagtctaaaattttgaaaatgggagatcatgggttattactttattctcttctcaatttcctcatttttaaatggaaggtttggatcaaataagctctaaggctgacagtatcttacttaattctgctactcacatattctcaataccatttttctaagcaaaaatatatcacaagtgagagagacatatttgcctgaaaaacaagcccaaaacatctgtcattatttagttttgggacacataggcttgtcataaagaatatgaaggatgctagagagcccaccaaggtcagcaaggggaagactatctttggcaggtctccatcatccattttgaggtcctctaaacagtcttaacattcattgtctcttttgtcatgtatccttagtgctgttcccttgaaatcttactctaaacttcttagaactatcaaaaatgtacctattaaactaagtccaatcttttgtcaaatcctttggaagaatg

SEQ ID NO: 1881605 - DNA, 4001 bp, Homo sapiens
aacccaactgtgttatcctacagtctgaaggtcagaagtccaagttaggtctcactggactaaaatcagggtgtagacagggctgtgttccctcccgccttggccagcttctagagatgctctcactccttggttcaaggcccctctcgtcttccaaagagagccatgtccggtcttaactcgcattaactccaactatcttgactcttttgtccacttatcaggaccctgtgactacactgggcccacctggatagtctagactcatcttcccatctcagatctttaacttaatctcatctgcgaaatcccttttgtcatgtaagctaatgctcacaggtccggggatcaggatgtggacattttaggggtgtcattatcctgcctgccacgctgtggttattcacctttctatgtgttcatgctttggcacccccagcagatgggaagctcctctggggagtggggtactgcttctttgtcattctgttccccatagcaattgcccaattcagatactcagaaggtatttttcaattagttttccttcctgactcctggtttgaataacacagaagtgtatttctaggtagtagctgtgttgagccagccatggtatcttaccttcttgctagtcagtgggatacaaagatgattcaatattgccccaattttcaataaatttgccaggtcgggcacggtggccctcgcctgtaatcccagcattttaagaggccagagcaagaggattacttgagcccagaagcccaagaccaccctgggcagcatagtgagacctcgtctctagaaaaaaatttaaaaacttagctgggcatggcggtgcctgcctgaagtcccggctacttgggaggctaaggtgggaggattgcttgagcccagaagttagaggctgcagtgagccatgatcacaccactgcactccagcctgggtgacacagtgagaccatgtctcaaaataaataaataaataaataaatttgccttgcaaaatgttcaagatggctggacagcacccacagggtaagctctttgacacaggaacgacacatacaactaaagataaaaataatgtgatacttgattgagcataattttatggagcagaggtagctagaatgagtggagaaagcaaccagggagaagagagccgagtgggttattctctccaaattttgaataaagtcatgggaaaatcaaagtagtaggaaggggtcaaaatgaagcgtgcaaagatgtaagagtattatcacgagaacccaagacagcaaaatacgtgtatgtctaaatacaccagaacagcaaaggagagcttaccttatttaaagtgacataaataaaattgtaaaacgtagggatgctactggaggctgagggtggaggagacactgatataagcagctttcttggtcctttgcttttgtcgatcaattttccaggattagctaaaatgcagccagatttatcccagtaagaaaaaacgtaccccctttctggatgcccagagcactttgtttcctcagtacaaagcagtgaccacatgtggcttcaaattttgccatggaaatccccttacaccccctgaaagcagattcaggtgtgctagatggtattttccaaagatgaaaccgtcacagtatctcctactcatgtgcttccagaacttcgccactacctagtcaagacgtagagcctaattccgtttccttgagtcaaggcaggtttgggactcactcacaacccatagaaggcagtacaatggatgctgcctagcttctaggtcatcaaaggcggctgagcttctgtcttgctggggcatttgctctcggagccctggccttccacgtgaagtccgagtacccaaggcagccatgctgtgagggaggccacagtgcctggggaggaccaggatggacgctgcagtcagcggacctcatcctccagtgctccaggccagggttagacatataaggaaaggagccgttagaccataatacaccccagctgctgcgttacccacagtggtcacagccccagctgtcatgcagcagagacaagccactcctgctgtctaaattccaaacccgccaggtgtggtggctcatgcctgtaatcccagcactttgggaggctgaggcaggcggatcacgaggtcaagagtgcaagaccagcctgaccaatatggtgaaaccccgtctctactaaaaatagaaaaaaattagccgggcatggtggcacttgcctgtaatctcagctactcaagaggctgaggcaggaaaatcgcttgaacccaggaggcagaggttgcagtgagcggagatcgtgccattgcactccagcctgggtgacagagtgagactccatcttaaataattaattaattaattaattaaataaaataaaataaattccaaacccacagactctgagagcataaataagatgatctttttaaaccactaaattaaggggtgacttcttatgcagcaacagtaccgggggaaccaggtatgagcagtgcacatattttcactgaatttatattgtttgggaagttttcctggttaagagttccgattatagacattatgttaacagagaaaccaacacctaggacgattagagggtaatcagtggcttctccagggcttcagctacagtgatgggtgagaggaacatgacaaggatcaattctgagagtgctggccgggtgcagtggctcacacctgtaagccctcattttgtgaggtcgaagtgggtagatcgcttgagtccaggagttcaagaccagcctgggcaacacggcaaaaccccatctctacaaaaaatacaaaaattaactgagagtggttgtgctcacctatagccccagctactcaggaggctgagaaaggaggatcacttgagcctgaggaggccaaggctgcagtgagccgtgatggtgccactacactccagccggggtgacacagtgagaccctgtatttaaaaaaaaaaaaaaaaaagtattctacttgaagcaagaaaaaaatattttctggaagggaatcactttcctaaaaaagaaaagtagcagaatttttgtgcctagggacaactgagaataggcaccccctcacccatgctgtgtcctccaggatgagctgcccacaggtgaggtgggggaccaccacccagcttaggcaggagtggcccctgcaggggcaacacagcgaagaaggcttatcaagcaggatgggggtttccaagcagtgctgcaaaaaggcctttctgttgttttttatgtaagtctgtttcatgccacattttgggtgaaacacacacacacacacacacacatactgcacagctgacagtggacaggacttcctggtgactctgggtaaagtcattgttgctggaagagaagggaaatgcatgtttccggtgagttttgccttatgtggctaaaatgtgaggaacttggcaaatttcccagtgcaagaagtctatgggacagtctgaaaaaggaagggaggataatctccaccagttactgaagtgaaagtgaactgttcttttctggggacccttccttacagagaaagggttgaaatgaaaaacacagcacagccaattttgtaatattatctggccagtttagtagcctataggtattgtttaaggcatttagaaattcaagtggttgttaggactatttttttctttgcttaagacatctaaccaattttgcataaactaggatggggaatataaaggccttggtgtttcttttccagttaaataaatctatcaataaataattatggagcaggtaactcccaaaatgtttacttggataatgaaattccaagaaagagcctttaaaatttgtagtaggctgggcacgatggctcacgcctgtaatcctagcacttggggaagccgaggtgggtggatcatttgagtccaggagtttgagaccagcctggacaacgtggtga

SEQ ID NO: 1881606 - DNA, 4001 bp, Homo sapiens
accaaaaacacaacacaaatgtagtatacaaatgaaaataattactgtgttaaacacagtttcatagaaaataaaagaccaatcaaatacaataagctgcctttttagatgggtatgttattcttctttcacagctaaagaaacgggctcagagaatgttatttgattggaccgtgttgcatctctggacagtgcagctgagatcagactttgtgtgtaactccactagcctaccagggtgcctctcataaaggtaagaaatgtaaatttggcctaatatacaaagttgccaaggcagcactgggtcaattctacatacagtacttctatgttcatcaagggaaaccttaagggaaagtgaaaatgcttctagaaggcgactggacaccagcgcctttgcttgttgcctttgggctcttcttctaaggccaacagtgacctgagattattgactggcttttccaatcaagtggacaaaatggtaccaaggtcgccaacatcagacaaattcacttgagggccttatctatgtgctttgaaagacaaaactgcttttgtaaaggacactgtatttcagaaaaacataatcatattaacaaataataacactgtaaaatgctgatgtgttgaatgctactttagaaaaacatgctcaaatccagggaaaaaatttgatacaaaactacgtatcaattatctagctagctagctagctagctatctagagacatgctttcactctattgctcaggatgggaagcagtgggattatcatagctcactgcagccttgagctcctggcctcaagtgatcctcctgcctcagcctcctaactagctagggccacaggtggacacagttatgcctgggtttttgtttgtttgttttgtagacacagggtgtcactacattgcccaggctggtgtcaaactttggagtctcgctgtgtcgcccaggctggggtgcagtggtgcgatctcggcccaatgcaacctctgcctcccgggttcaagtaattctcctttatcagcctcccaagtagctgggactacaggcatgcgccaccacggccggctaatttttgtattttttgtagagactgggtttcaccatggccaggctggtctccaactcctgacctcaggtgatccacctgcctcggcctcgcaaagtgttgggattacaggtgtcagccactgagcctggcggagcactttcttatgttattaagtagcctaacccaggtggggcgctgtccctcacgcctgtaattccgacaactctgatggccaaggtgagaagatcacttcaactcaggagttcgaaactggcctgggcaacatagcgaggcccccccccccaccccatctctagaaaaaaatacaaaaattaggccaggtgcacaccgctcccagctaatttttgtatcttttgtagagacggggtttcgtcatgttgcccaggctggtctcgaactcctgagcccaagccatccatcctcccgcctcggcctcccaaagtgctgggattacagtagggcctagccagcctcatgttttatttagcagtccctccctgttgcacacttaagatagtttttaaatttttttagacagggtttacctcaatctcgcaggctggaatgctgtggtgggatcatagctcactggagccttgaacctttgggttcaagtagctggggggctgaggtaggactacagagatggggttgcgccatgttgctaggctgctcttggcctgaagggtcctcccgcctcgaacgcgccagacatagttttctatttttgaccaacataaacactgtgctgggtctgaatttttcacctacccttcttcagccggcaacacacaggacctggcggggaggtcgctcttaccagtccccactctgacgagaagactgcccagctccaggaaccgtagcgccccagtgacgtagccgaacacccgcgcctctgacgccgccaaaggcccacctctatggtgtcggcgaaggcgcgcccttgtgacgtcacggagggcgcacccttgtgacgtcacggaagcctcacgtcacggaaggcaccactgcactccagcctggcaacagagggagactttgtctcaaaaaaaaaaaaaaaaaaaaaaaaaaaagagagagacaaatcttaccagcagcctgtgaaccaggaagtgaaagtccagcccaagctcaggaaagtggagtcagcattgctccacctagcaaggccccttcctcttctccagagactccagaatatggacatttgcttcacctcctcaaaacctttcttcttacttggttgggagtcatttgaccatagcaactgtatcagtcaaggtcaaccagaagcagaagcattaggagattttatagaagatagaaatagagatatagatacaggtgttagagatatagaaatgatagacgagagaaacagagatgagagatagaaaaagaaatatagagatgagatgaagatagagatagagatggtagggacagagataatagagatagaaatagatatatacagggttttgttagaggtatgtaatttgtcagcatcgaaatggagtcacttatgttaagataaccttgacaaatagagccagggaaagacatgaagaggattctcatgcttacatgcctgctaacagaaacgaccaccaaaagcaataaaaactacaacttagcacaaaggctgtcacaaccttacataaaaaatactcctgcaaggacatctgcccagcgactgcctatacactctcggactggcatcacccttgctattgttctctgtagcccaggataattatttcaaaaacaattatgtaatcctccttattttttcctttaaaaatctttgtcttcctttaaccgccctgaataccaacatagtttactgctgcatgcatatttccactgcagtgctttattcccaaataagtatcttttagagagcttctctctgttatttaggttgacagaggtatttaaccttaagcaattgtgggagctggttaagtcatctctgaaaagctgtttttgtgtctgagggaagttgacgtctatagggtgggcagttgagaagtgtgttaggctgttcttgcattgctgtaaagaaatacctgagactgggtaatttataaagaaaagacgtttaaatggttcacgcttctgtaggctgtacaggaaacatagctgcagtatcggcttctggggaggcctcgggaagcttacagtcatggcagacgaagcaggagcttgcatgttgcatggtgaaagtaggagcaagaggatggggggaggtgccacacacttttaactagattttgcaagaactcactactgtgagaacagcaccaaggggatggtgctaaaccattcatgagaattctacccccatgattcagtcacctcccaccgggccctacctctaacactggggattacaatgcaacatcagatttgggtgggacaagtatacaaactattaatatatcagaaaggaaagatggatattaaaagagagcaggccaggcacagtggctcacgcctaatcccagcactttgggaggctgaggcaggtgtatcatgaggtcaggtgttcaagaccagcctggccaagatggtgaaacccgtctctactaaaaatgtaaaaattagccgggcatggtggcagatgcctgtaatcccagctactcaggaggctgaggcaggagaatcacttgaacctgggaggcggaggttgcagtgagcagagatagcaccactgcactcccgcctgggtgacggagcaagactctgtctccaaaaaaaaaaaaaagaggaagagcaacgtgaaaccacaataaggagctgagctggagcccacaaaaatggaccgaagtctttttcagttcttgctgcatctgagcttgatggtgaccttgaacgtcctgcagtaaccaacaccatccaagagctcaacacatac

SEQ ID NO: 1881607 - DNA, 4001 bp, Homo sapiens
gagttaaggacattctgggcctggacaggctgcaaaaggcaaaagctgtgcctggaaaagtcgccatgcggcatgagcttggcctaaagaggccactgcaaggcaggagctgggcctgtagaggctgccgaaaggcaggagcttcgcctgaggatgccacagtgagacaccatctgggtctggagggtccactgtgaggcagaggctggcctgtagagtccgacagtagacagaagttaggcaaaaggctgatttgaggaagttttgggcttcaagaaagagtcagccaggaggcaggcactaggcctggaaatggcccgacagtcatgagtggggcctaaatgggccactgtgagggaggagctgtgcctgttgaggctgctggcaggcaggaagaaatttggcctggggcagctgccatgaggcaagagctgggcttggaaaagcccctgggaggcaagagcagggcctgcagaggctgttctcaagtcaaagctgggcctgttcatgccaccaggaagcagaaggtgggcctggagagtatgacctgaggaagttttgggcctacattggccgccatgaactggacaggaactgggccaaaaaaggctgttgtgaggcagcagttgtgcctgtagactcagccaataggaagagctgggcccggagaagcccccatgaggcagaggttgggcctgtagatgctgacaggaggcaggagctgggccgggagaggtcaacttgaggagattttgggccttcataggccaccaggaggcagcagttgggactagagaggctgacttgagtaagttttgggcccggagatgacgttctgggacaggagctgtgcctggagaggtcaccgtgaggcatgagctggatgtagagaggccagtgtgaggcaagacctgggcctgtctaggctgctgggagacacgcaggaatctggccagggaaggttgccatgagacgaaagttgggcctggaaaggcccttgtgaagcatgagcttggcctaaagaggccactgggtggcaggagctgggtgtgtagaagctgctgaaaggttgggagcttggcttggggggtccacagtgaggcagatgctgggcctcaagaatctgctatgaggcagatgttgggactgtagaggccgacgggaggcagaggctgggcctggaggggccaccaagatgcaggagctgggcctggagaggctgcaaagaagcatgagctgggcctggtgaggtcgacttcagaaagttcagggcctggagagaaggctgggaggcaggagctgggtctaaagaggccattgtaatgatggagctgtgcctgtggaggctgttgtgaggcagtaggctcatctgcggagactgccgtgaggtagggtatgggcctaaataggccattgtgagtcatgagcttggtctgtagaggctgactggagaaagttctgggcctggagaggctgccgggtggtaggagctgggccaaaagatttaagcacatttacatttattaggcacttcatttccattattacactgtaatatctaataaaataattatagaactcaccataatgtaaaatcagtgggcgtgttaagcttgttttcctgcaactggatggtcccacctgagcgtgatgggagaaagtgacagatcaataggtattagattctcataaggacagcgaaacctagatccctcacatgcacggttcacaacagggtgcgttctcctatgagaatctaatgctgctgctgatctgagaaggtggagctcaggcaggaatgtgagcaaaggggagtggctgtaaatacagacgaagcttccctcactccctcactcgacaccactcacctcctgctgtgtggctccttacagctccatggctcaggggttggggacccctgctcaagtgcatcctaagcgacccttcccacaccagtcttcatagtggtcaagtgcagcaaccacttagctcccaaggcatgtgcctcagctggcatttcatcacaatcaacagtaagtgctagcctgagtcattgtgaggtcacttcctggaaatcaccagcatcccatttcctactggcaaagagctcagcactgccccctgggaaaccaaacctatgcccaaatcccatctgtgtgggtttatctcctgggacccttcctaacatattagtcagagtccaatcaggaagcataaaccactcaaaagtttaaagtggtaaaatttaatacggagaattattcattataacaggtgaacagcataatgagagactggctagcacaaagtaaagagaactctagagaatacaggactagcccaggccaggcatggtggctcatgcctgaaattccagcaatttgagaagctaatgcaggaggattgcttaagcccaggagctagagaccggtctggacaacacagtgagaccgtctctatccaaaaaaagaaaaaagttagctgagagtggtggtgcacacttgtagtcccagctactcggaacgctgaagtttgagcctgggaggtcaaggctgcagtgaggcatgattatgccactacagtccagcctggtgacagagcaagaccctgtctcaaagaacaaaacaacaaccaccatttacagacagaaaagagatagagctaataagctaaggaaagatgttgaaatgtgacaagtaaagtaatatgaggtcttttatctatttaaaataatcaaacaaaaaatgacttactaaattataataccctgtgctggcaaaggtgcagtgaaatgggcactttcttatactatgaggggtgtttaaattgtgtataagccttcccgggtaaagcttgtcaatttctgaaaataatggagacagggtctcaccatattgccatactgcctcctccaactcttggcctcaagcactcctcctctcttagcctcccaaagtgctaagattataggctgggaggcacccaaaaccctgtcaatttacatcaagggtaatgagaatgtccattcaccatgtctcacagtaatcttacttctggggagacaattcaatctaaacaaaaggtcatctgtacaaacacagtaaaaatctgggagtaactgaagacagagttggtaagtgaaataagaaacagttataagaaattaaactatgatatcaataggcacctggtataaaaggtcagttaatgttagctgctacttttttgttgttttgagacagggtctcactctgtcacccaggctggagtgcagaggcctgatcatgactcactgcagtctcagcctccctgggctcaagtgatcctcccacctcagcctcccaagtagctgggactacaggaacatgccaccacactaagctaattcatgtatttttctgtagggatggtgactccccctttgtttccaaggcctatcgcaaactcttggcctcaagccatcctcctgcctcagcctcccaaagtgttgcaattaccagtgtgagccaccacacctggccagctgctacttttagcaatattattattattccactcaattaaaaattattattttcaaggctatgcaacagtatgtatcctacagcgtaattgtaaaaacatatacagtcgtcgtccctcagtatacagaattagttccagccccccatctctgcatataccaaaacccatgcttactcacgttttgctgtcacccctctggaatccacttatatgaaaattccaaatattagttgggcatggtggcaagcacctgtagtctcagccacgtgggaggttgagatgggagaatcacttcagcctggaaggttgaggctgcagtcagctgtgatagcactactacactccagccttggacaacagagggagaccctgtctcagaaaaaaaaacaaaacaggttagaaattgtactgaggtctgttgggcaaaattccatataagcaaagtataaattaataaagcaaatcgtgataaatta

SEQ ID NO: 1881608 - DNA, 4001 bp, Homo sapiens
aaatgaaggagaggaaaggttgtatggaggcctccttggctctagggaaagttcagcaaggcagaagagaagtgctgagacaacattctaggcagaggagccccatgtctctcaggaagggggctgcctagtgcccctgccatgccccatcacgggtggggagcagcccatggaaagggggggtctcagcacaggccaggatggattcagagcatggagtggcagctggtgccctgggccagatgcgctcccagctggaggcactttctcacaactgctgtgtaggcctgggtccacgttgtttcatgaggaaaagccatgcgggtgctgcctggcacatatgtagagcaagtgccatatgacacggtggaaggtgccctggaattggcatcaatgtcccaggtcaagtccctgatccgtcacttattattagttcatgatcttaggtgagtcactaaacctctcagagccttggtttcttgatcttaaaacaatacctgtcttacagtatggttgtagagtgaaactagctcttgtgagaaagagtgctttgtataatgttgacacaaatgcacacgtggtaacaaaagcaacaaagcacaactattaaagaccaatgacaggagctctggaattttgctataagcagtctgtggcaatgatagagatttgtctgtctctgtggttatacttgcacgaaactgcacaccatgccagtatacaaattccacagtgtctcagtcatttagcagatgtcagttgacttgactgttctgggcaggtatttatacaaataaaaaaataaaaagcatttcagaaaaccctattttttttttaaacaaaagatggcttttccacagctgctaaataattcaaagtcagcagtaattcatagtgagtcagcggtagcttcttactgcttcccactgctttttttccttttctgcttgtaagatgaagacactggcgatgaaagggctgagatgttttagttcccggaagtcccttggtctttttttttttttttcttttgagatggggtctctctctgtctcccagactggagtgcagtggtgcaatctcggctcaccacaacctccacccccggtgttcaagcaattctcctgcctcagcctcccaagtagctgggattacgggcacgtgtcaccacgcccggctaattttgtatttttagtagagacggggtttctccatgttggtcaggctggtctcgaactcctgacctcaagtgatccacccgcctcggcctcccaaagtgctgggattacaggcgtgagccaccgtgcctggccgcttgggttttgtgctagcgaaatattgagatctgtaggctgtggagcaacctgttagcgatgatgggtgagttcacaggcagaggcagtagctccaaggcctcaaccagagacccagatcccagggcagtgtcactcattttgtcaacgattctaggggatggggagacaggagctggaaaaataaaccagaaagacttcatgggtttatttctaaatagatgaaggttacagagcaaggtaaattttatgcaggaaaaacgggtggcagtagatgatctagtgttagaatctcagcatggccctggggctgggagcaaatgaaattagacgtgggattagtgggaaccaggtagccaagggtggaggcctaaccagaattgagtgattcacaccattaacaatgaccagctgtgaagaagcagatcaccccacctgaggacagccccgaaggaagaggtgcttttaccaccacccaaggatgaaagcagtgatttctccttcaaatccagccccaaagctgtggctctcctcaccagttttcctttccttctggccatgcaacctcttctgctccatggccagttcagaggacacatgactccagcaggaggggacaaaccagtcaccattcaggagcctgaataaccagggcttctgacaccgtgggcctcagactacccacatcagcaccacgtgggcagcttgttaaggaggcgactgcatgagcccacccagatctgcctgttcagaatgtctggaaggggactccagaacctgtgtgcccctcccgcatcttcctcaaggcattgttttgcacacaaacatgtaagaatcaccgggcgtggtggctcgcacctgtaatcccagcactttgggagtccgaggagagaggatcacgaggtcaggagtttgagaccagcctggccaacatgatgaaaccctgtctctactaaaaatataaaaatcagctgggcatggtggcccatgcccataatcctagctactcgggaggctgaggcagaaaaatggcttgaacctgggaggcagaggttgcagtgagctgagatcccgctactgcattccagcctgggcaacaagagcaaaactccgtctcaaaaaaaaaaaaaaaattgtgagacccaattaaatgatctctaagctgccagatcaaaaacactgtgacttcagaatcccagtttaagaaaaatgatcttatttctcagtaatttataattttaaaggtttaatcttctttctcccctaagtattatctctccgtctttaagtcccaacaaattatttataaaataatgtatgggctgggcgcggtagctcacacctgtaatcccagcactttgggaggccgagatgggtggatcacctgaggtcaggagttcgagaccagcctggccaacatgaagaaactccgtctctactaaaaatacaaaaattagctgggtgtggtggcatgtgcctgtagtcccagctactcgggaggctgaggcaggagaatcacttgaacccaggaggcggaggttgcagtgagcagagattgcgtcattgcactccagcctgggggacaagagtgagactttgactcaaaaatagtaatagtaataatgatgatgatgtgtgaagtttactatgtgcaaaaacctatgttttgcatggaggaaaaatatatgaggcaccctgcccttaaggtgcttctaggctagaagaggagctgaaaaggtgtggaaccaactttgccacaaggcagagagtgctcccagggctgataatccaggaaggggtcagttgataaatatcctaaatctcaatcctggcaataagtactgtataaaagatagaatcaaaggtctccaggatttcagaagagggagataggaaagccggcgggggcagtgagagaagctttagagaggaagcagcatttgagagaggactttaaggataagtcgtatttcagtaggcagaaaacattctggaagagatggcatgagaaagccatagtggtggggaattgcaaagtgtactgcagaacagggggaagctcattttggcgtgagtggagagggatttcactggaaagctgggatggtgtatcagttatcagttgctgcataatacaccagtccaaaatctaaaggcttaaaacaacaatagtcatttcttttgctcatggatctacagcttgtctgtgttccaccctgtcagcttaatgggacctggagagaccactttcaaagtggctccctcacatggctgggaagttggagggagctgtctgttccttttgtgggcttctctatggcttgaatttcctcacagcagtttgatttcaagagagccaagtgaaagctgtattgccacttatgacgtagctcttggagtcatagtatcacttctgctgcggtcacaagacgacatccaaattcaaagagagggagcaaagtgtcctctcagtggaggagtgtcagagtcaccataagaagagaatgtgggaagggaggtattattgtagccaattttggaaaatacatgtaaaactcttaacgcatgaaatacacaaaaactctaatcaggcattaaataataatataaatttaaaaaaaacacaaatttcattatatatcacaataacctttcaaataggcaaagcaaatattatttgtattttgc

SEQ ID NO: 1881609 - DNA, 4001 bp, Homo sapiens
ttctggttctgcacggtagttaaaaatgcaagtggatttcctaacggccgagtacaggtacaggtggaggtcggcggaatcctctgctctgaagctgaaagtggagggtggcgcgaggcggctggcgcgacgaggctgagagcgcaccagtctccgccacgcttccaaggacaggttggcgacggccggggcaggcctggtcgcgggctcctagccctccacgggcagactgctggtcccaggagagggcggggagatgctcgggcgcgcaccagggagccgcactcactcggcagccccaagcacgcacgccccacctctgccgccgccccgtcccggacccgaaaggagcctgaaggatcccgccgaccacccagccagagagcggttcggctcaggtcgcccattcggagctacaaaactctggaacctccagcagtttcggaagctccgggggagggctttcctgcagacagggggcgggagctagggagccgggagccagcgctgcggtgggaacttcagtgagtagaaagtggccagtgtcttgggaggagcagcaaactttttttttccctcccacagcaaacaaaatcgaggcagggacagtgtccggccgctaatctgaggggagaatggagaggaaagaagagtagtaaaagtggggagtggagccttcggaggactcccgggtccgcccctggccaggtgatgcggggcggaggcctaggtgcttgaacctggggggcagacaattgttctgctgcagtgcccaccaggggctggtaaggaagtctgagtgtttactgcctcccttccctgtccaaaggtcatttgcgcttttcggtctcggacgaaagaacactgtggaaaggaaggcgcgggtcattttcagaggctctgcaaaggacgggccgcctaccgggggtggaaatccttaattacacccttctgcctcggaatccgtcttcccggcagtgtcttgcactgccacctcctcgggtgactcagctgacctgaaatgcccaccctacggaagatcaagaaaagtagttttctaagaaggttagaggtttgattacacagagaagtgtttccacttaagtccaaagcaattacccgccccctcccccagggccgcctccccgccacccgcagcagaaaaggacagacccccacgcacgtacccccattttgttggtgcgtgtgaatttcaaatggcgcagtaagttcattagtgttttcaatcggcggcgggcagacccctcatcagagccgaaagccggcaagagccattcatcagcgtgaagtgttattcacggatgacccctaaatcacggcgagagtagtaaaggcactgattggtcacagcatgggagcctcggtgctttcccgaacccgacgcggccgggaggagggaaggagggaggggcggcgaacgtggttcagtccggcaaatcccatttgacagaaaaaggcagtaaacggggaatctctttttttgaataaagaagaagaagaaataaagtacctgtcatcttgacaagtggcggagcggaggagtcaaggattataaatgatcacagccaggtccagctcgccccgtgattgggctctcccgcgatctgcaccgggggaagcgcatggtaggctcctctcctctcctcctctccctcgcacactcccgcacacacacacacacacacacacacggacacgtgtacgcgcccgggctcgggcacactcggcccggcgcgtcccccgccgcacaattacggtcctggatgccgctccctggccgggcgtcccgcgggcctcctcacctggcccttctcgccttcctcctccctcgcctccccggtcctcccgctcgcgggctgaaccccgaaaactccggcccggcctggtccgccgccttggaggaggctggaggggccggcgggcggggagagggggagcgcgggggagagaaagaaagtgaactcattggcgcgcgggcgccctcccctcccgcgtccccgggccgcgcggccgggggcgggcagggaaggaagttgtaacactcgcgccccctccccgcccccgccccgccggcgcccgctccccgctccctcggcggggcccccctcccccgcgcccggctcctttgaatttggcccggcgcggtgtgcgcgcggctcgggcggacgcggcggctgctgccggggagcgagccggcggcgcgggcgagccgagcgcggtaagtgcggcgccgccgccggcgcgccctccttcctttatggggtcctagtgccgggccgcggcgccgggagctggcgggcgcgagctgggacggcgcgtggccccgggaggcggcggacgcggggacatcttctcagcgcgcggattctctccacggtccggcctccccgtccccgccccgccctcgcgccagccacctccggccgccggctcaggtgggaacttcgccggcgcctctcgcccggggagccaggcgccgcgcccccgtactggggagccccggggtccctgaggaaggcagtccggaggctgggcgcccagtgggggcggggaggggagcccgccaggtcctcttcggcccccgatgtgtggcgaggccccgcgtcttctgcgggggcgtcttaacaggatcctggggggcttccagcgagcggaaagccccgggatgtcaccgctttccggggcaggcaggggacagaaggcttctgcagcgatcagggagccaagttgaaaaggagtgaaggagggagagtgcggggcgaggggtagcgtggggagtggtggatcacggctgaaacttgatcgggaaactctggatggggttggaaacacacacaaaatatcctgagctgggcgtttcaaaaattacgaatttatgagcctgcaactgagattctaagtccctctcgtgttttacaaccgattacaaagagcttcacgtattttaggttgaggcgggttgtgtctgattgatctttgctgagcatcttactatgcagcttggattccattcttactgcctcacctttaaggtagctggagtggtaacttgttaatttttattgtagagagagggtaacaagtacttgtaccgtgtaatacatcacacacgtgtgtttccccaagtcactgtaatttggaggtagagaaaagtttccaggtacgtgtgaggaggtgcaatggaaatgaaaggctgagagctgtcctagactttttacagggccccagacggctgggatgcccgagaacaggactgtctcttcatcatgctctatttcttatcttctgacaatgtattttgtcaaacattggtagactctggcagaatccactgggtggtcttttcactagaaatagacatatgttgaggcattacctttcccttctcttgtcaaaagaaaaaaggtggatatggcatctctggaaagcttggaagagtatcccaaaagatggtattgtaactgaacagaacttggtgatttgatcccttagtgaatttctttaaaataatgacgcatatccctttttccccactgcctacttggagaagtatttgtagtctttatgtattaatatattgagaacagactgactttagaattaagagcaactgtgtaataataattatctattttaatatttcaattaaaacaagattttataaattcaacaatcttgctttgtgcattccttaatacacttttaattatctaaaacttcgagcatgtatatcttaatatataaaattcttgtatgagccctgaaagtttggatttgtaattctaaatgcagagtaaatatttaattcttgatctaagagtgagaggttagttcagtaataagacttgctaatcccactttaaaatgtcatggcattcacaaattattcctaaattcttcaaagataggagtttataatgagtttagttattctattgtgtatttcaggattgtctgtatctcttcctgttgcatttccc

SEQ ID NO: 1881610 - DNA, 4001 bp, Homo sapiens
agaagcaattctcctccatttgacagtgaccactatcaaggagaaactcattttgaaaaatgtttatttaccttaccttttcttggccaagtcaattgctttggtcatctgcacaaagattctaaacactggctttcagcatttctttttccaagcaaatgaaatttatcataacaagacagagctctgattttagtctctgtggagtctgggctctgatgacctaggctagtcatcatctaagcctggaatgactgtttgggacccccatggccagcttgaagctttccttcctcagccactctgggcccctgaagaggtcacatgcatctgtggcagagactgtattataacaaagttgtttaccccaaagtcagcaaacacatgtacctagaactcatcccaattgtaggttgctcaccagacaggttacacgatgtgcaccagttaacatgccataggaaaattacattccaagaaaaagcaaaatgctataaaaacaaaaaaaacaaaacacccaaaacagctctccctcctttgatctgatggtctgcagaggtcctcaaatccacacactgccactcttcaagaccaaccgtccactgggccttcttaatctcatccaaagtcgcattcacaactttgacaggagcttgggttcttcatgtggcagctgcaaccatgtagtgtcttctcacttgcagaactctaacctcaagtctctcatgagtccccaaattccaggaagcataaaaaaacagcaaagcacacgagtatacttccaaactttgaaaatacaataagatcacaggaacaaatatgaccacgcagcagcgtacgtactgtataggccatattcctttacgtgggacattaatgaaaagctgtcttttccaaactgaatgcgcctattaataaaaaaatacacctgaccatctaatgctgaagtcatccgccaggatggtactggaaattgagtggctaatgtggagaaaacgcaggcagaaaaacaggggagacaaaacgaaaggctctcttggtttgagcctgtccaagcagccacgactccttatcaggtgaacacagttcgtcagttggccacctaaagtacaagtgggagaaattcatcatcacaacataaattttgagcttgatattctcatatccgggagtcaaacaaacccaaccacctgtgcacaatgcttccacctgcaggaaggtcatcgcaaacgctccaatctcgtaacaacattcacacgtttccagcatgtacctccgcttcacacctctctccccccacgtagtgacccaccaggtctacgtcctgaaaatacttccagtggtcatgactctttacaacaacatatcaaattattttctctaattacctatgaaaaaagaatgaaaccaactccgcggagagcgtggcacggctctgcgctcccctccctgcctacccagcgccttccacgcgggacactccccgccgcgctccgctccagacccgcgcggcctcgccggctcagcagcactcgcagccggcgatccgctggtgcagctccacgatccgcctgcccatccgcgccgcctccgcagccttcctctctgcttcggcgcacagccgagccacccgctcctcagcctccgcacgcgggcggggtgctggggcccgggcgccccgctcctctgcctccacctcactcttgatggcgtcgagcaggctctggatctccagcagcttcctgcgggcccgccagtgcgcccgggcgcgctcgcgctccagggaggccaggttctcgcggccggcgcggggcgcggggctcagcgggctgcccggctcctcgcggggctcccgcgcctcgtccgcgtccacgggccgcatcacgccgccgcctcttccagcccgcggggcacgccggggctgctcaccagcagcgagcgcggaagcctcgctgtcaccaacgaccagactagcaacaggttgccccaactttccgcagcgaggacggtatccaaaatgggctactagccgtcggccaggacgctgccactgcggcccttttacgacacctgcggtcctttaccgccacgcagcaagcgagaaccgcattcggggctcccgcctcagcggtcctgcgcgcgcacgcgcacttgcacgcacgcgtacccccccgcacgcatgcgcaccccatgtccccgcccgctgtagcgccacagctctttgggcgttgattctagggtcagggccctcactcacactgctggaaggttaaagtcgacttcacgctagtttaaggaaatatctgacgctgataaccatgtcccaagcactgctctaagttcccaatgtgtccggaattggtgggttcttggtctcactgacttcaagaatgaagccacggaccctcgcggtgagtgttacagctcttaaagtggcgcgtctggagtttgttccttctgatgttcggatgtgttcggagttttttccttctggtgggttcgtggtctcgccggctcaggagtgaaactgcagacctgttacggctcataaaggcagtgtggacccaaagagtgagcagcagcaggatttattgcaaagagagaaagaacaaagcttccacaatagaaggggacctgagccggttgccactgctggctccggcagcctgcttttattgtcttatctggccccacccacatcctgctgattggtagagccgagtggtctgttttgacagggtgctgattggtgcgtttacaatccctgagctagacacaaaggttctccaaggccccagcagagtcgattggtatattcacaaaccctgagctagacacacggtgctgattggtgtatttacaatccctgagctagacataaaggttctccacatccccaccagactcaggagcccagctggcttcaccaagtggatcccacaccagggctgcaggtggagctgcctgcgagaacggcaccgtgcgcccacactcctcagcccttgggtggtgatgggactgggcgccgtggagcagggggtggtgctcgtcgaggaggctcgggcagcacaggagcccatggagggggtgggaggctcaggcatggcgggctgcaggtcccgagccctgcccctcggaaaggcagctaaggcccggtgagaaatcgagcacagcgccggtgggctggcactgctgagggacccagtacaccctccgcagccgctggcccgggtgctaagcccctcattgccgggggctggcagggccagccggctgctccgagtgcggggcccaccaagcccacgcccaccctgaactccagctggcccgcaagcgccgtgtgcagccccggtgcccgctcgcgcctctccctccacacctccctgcaagctgagagagccggctctggccttggccagcccagaaaggggcctccacagtgcagcagtgggctgaagggctcctcaagtgctgccaaagtgggagcccaggcagaggaggcaccgagagtgagcgagggctgtgaggactgccagcacactgtcacctctcaccaacattctaaatcataaacacccaggccgggcgtgtggctcacgcctataatcccagcactttgggaggctgaggtgagaggatcgcttgagctcaggagttccataccagcctgggcaacaagggaaaaaaccctaccaaaaaaaacacaagaaattagctgggcgtggtggcgcgtgccgatagtcccagctacttgagaggctgagccgggaagattgcttgagcccagcaggtcgagaccgaggtgagctctgaacgcctgattgcgccactgcaccccagcccagtgacagggcgagaccctgtctcaaaataaataaataaaaataataaacaaccgaattcagtggtcccgttagaatattccaggctccgagaagccaggtgctcacagcgtcgggatttgcccccagccagggcctccgctccctcttgcctcgggc

SEQ ID NO: 1881611 - DNA, 4001 bp, Homo sapiens
ctgcatgatactttggggggaagtggcccatttggtatgatccagttctaaaatatgattatccatgaccccctcaaagcttaagatcccctgaaatttcagctttctgcttttttgcaggcaaagatctaatttctcctctcttttaagtgaattatcctgccctttaacaaatagtggcgatacgttattttggtctttacaatccaggaacactattggttttgacaggctttgctcaaataaagactagtttcacttcatttccaaggcattcaactctacccaagtgacatttgtgaaagccatatatttcatttgtgcattccaatgatttaatttagtaagctcaataagcttatctctagtcaaagataacatggcatttatgactgtagagtgcgtgattgaatgggattcttcctgcttcagtttcaacttagactccattttgttgttatcagacaccaaagatcccgtgagaaaaattgacatatggagattttaaaagacactggttgaaactcttaattccggaactctttcacgtacttaggaaatacgcaagagagtcatggtctcaagagaaggttttaagaaaggggttattaaaactattgctttggagagtgcacttcacatgcaggctgttccatcctcttttgggggagaggcattaggcaggggtttactttccagtcccaatattgaagagggtgggcttctaggcatccaattgaagatctttgaaatagtcaaaaaaccttgaggataagtgcctgatcccaacaaaggaagctaaagcagttagtgttctgaggtcttttcttcccaggaggtccaggagaagagagagggtctgactaacagtgctggtggctgagccgggagatgctgctatgttgagattggttcactttctcctagcttgtcaggacaccggatgtgtgtcctgattgtttctggtgaattggatgtgggctatgtggtacaggatcctcttgggcctgtccatttgggatctcaggagggataagggctgcaagtgtattgcgggatgcccttggacaagggaagggtcagaagaatccacatatagacactgatacgcccaagacaagggaatttcagacaagaggaggagcagggaactattcccaggctcctataatcaaaatcatgagacagagagagtagattttaatcatctgccaagtttatgaagaataccagcttcactgatctactctgtccagatagcacaaagccacccaaagtaaatgtggcacagagccaaacagcagcttgcaagtgcaggaagaaagggaactgcagagagtagatagtagaggcaccagataccaccttagcccattttcctcaagcatctaattggggaaaaaagagatttaaggctacatcaagattggaatattttgagtatctatcttgtaatggacattctaattactggactgaaaggcatttgcaaactaaagtgatcatattgtgatatattccctaagaatgtgcaaaaaaaaaaaaaaaaaaaaaaaaccttgggacctacctgagcttctattcagggatggggaagatggcctgtatgtcttttcctaacctaccatcccctaagtgggagagaaaaaaaaaaaggttgtactttattcatatctgaagaccagtctgattatcatatgagttacactgcttaacagaatccaagcagtaaatactatgattgataattgtggtgattaatactgaatgtcaacttgattggattagaggatgcaaagtattatgcctgggtgtgtctggagggtgttgccaatggagattaacatttgagtcagttgactgggaaaggtaaacccatacttaatcttggtgagcacaatctaatcagctgccagcatggccagaataaaaagcaggcagaataacatgaagactagactggcttagcctctccgcctacctctttctccagtgctggatgttccatgccctcaaacattggactccaagctcttcagctttgggacttcaactggcttccttgctcctcggcttacagatggcctattgtgggaccctgtgatcgtgtgagttaatatgccttaataaactcacctttatacatacatcaatcctattagttctgtccctctagagaactgtgactaatacagattttggtaccaggagtggttctagaggaaaagaatattaaaaatggagttcttttgttggttttcaggtttctggagttggcttcttaaagtgattagccataaaaatgctaaggactctaattctaatagtatggagaacagacagtccttggtgtgaacaatttagagagttattatgcaaaataaatgcatttgatactcttgattcaccgctcatgaaaggcaaggagtttagtgactcaatacctaatacctttgaccatatgtggagaaccaaggaacataatgaagttggttggttgctcctaagttcactggacagagtgatgaaaaaaaacgaactcagggattctaactaactcctggcttcagaagcagatactgagcctcaaatctgctaagattgccctgagtgagtcttatctcctgcagagaaagagctgaaattgtggaaaatcagacacaggctattaccatgtgagtggttgacctgcaacaaaaggtgcacgcacagcctcgccaggtgtctactattaaagtgagagcattgattggaaaacaatgggaccttgcaacttggaatggggatatgtgagaggactttgatgaagctggggacattgagcttgtaaactctgatgaaccttttctgccagaaggaacagcttccccatccccagtagtggtaacatcccctccccaacccatgctgctattagcctttccatctttgtctgaggagatgaaccctgctctgcctgaggcaagagtgatggcctcccctgaggcagttgctaggcaagataatgttgattctcctcaggagcccccctccccccaacacccctgcttgcttctagacttataactaaagttttggcaggcccctagaggtgaagttcagagtgtgacccacaaggaggtgcactacactcgaaaagaactccttgagttttccaatctatataaatagaaatctggagaacagatatgggaatgaatattaaggatatgagaaatggtagaaggaacatacagttggatcgggctgaatttattgatttgggcccattaagtagggactctgcaattaatgttgcagctcagggagttaataaaggttctaatggttaatttgcttcattagctgaaatatggattaaaagatggctcactgtgagagaactggaaatgcctgatttcctcccttggtttaatgtagagaaagggattcaaaggcttagggagattgggatgctggagtggattagtcactttaggcctactcatcccagctgggaaagtccagaagatgtaccttttaccaatgctttggaaaacagatttgtgaaggcagcacctgcgtctttgaagagttctgtatctgttgcttttctccggataccatatctaacagtgggaaccatagtcactcaacaacaaaatttaaatgcaatggggataattggaacccaaggtggcaggagccaagtggtggcactcatccatcaaaggcacagtgggcatagctaccatcatggacaacagaggcaaagcagcaatcgggatagattgatttgtgtagagctctggcattggctagttaatcacagtgatcctagaagtgaaattgataggaaacttactgcattcctacttaatttaaataagcagaaaacttccaggccgaatggacaaaagactaatttgaattataaaaacagagcatcatggcccctcaattaattttcagactagagccagtttacagaaccctttgcatgaaggggaggccaggtcccc

SEQ ID NO: 1881612 - DNA, 4001 bp, Homo sapiens
cctcctgcctcctgaccaccctgggccctggcacgctcggcagaaagagccacagcacaaagaccacccgggatgcactaccgccactgagaacctcaaaaagacccggacgggtctgacgcctgcacacttggctccaggatagaacaccctcacagcaccgccaccctccaagcttccgttatctggaaggaaaatcaggacgaatgggctctgcaggcctgcctgccatagtaccaggctctctggaatgggggaagacacacaaaatcccccaaaacaccctcacccccgaagaacttcacgttctgttcagcaaaaaagacttgcccacacaactagaacttcaggacttaaagggaccagaaagatcatctagtccaaggctcagtccaaagtggaggtgagcagctcgccctaccatggtgcccagtgaacctcagggaggtttaggagacatgacccaacccaagactgaaactggtcaggcgagcacccagcaccgggggacagtgcaggggcagcccgagggtagctggaccagtgcaggggcagcctgagggcaggtgtattgctgcaggaggcctgggctgacaaagacagaggaccagctggaggtggctggaggtaaggtggagcgcaccagggcggccctgcagagcaggtggaagacttgggccagcacccaaaagggagccgctggggttcctgggtccgagtgcacttcctcagcgccacctccaatcggtcagggagtctatttcgggctccccattcctcatggggaggggggactccacccactcaacagatgcccagtgcagtgggcacggggaggcagcactgcatcccggctgctcctggtcacacctgttccctgctgctgggaggccatcaacacatccaaacccagccgtgtccccagcccctccagaatcccttcctccaagaagccgccctgccgctccagcccagagcgttctcccacctcccacctccgcaggctgaacattacgcctggggcttgactgctggtcccaggagcagttcaggaagggcctgtggagctgatgcccaggcgtcaatccccatccccacgcagtcttataaccgtctgtcgtctgtctgtcccccacctgtttctcctctcccttttcgttccaaaagttccttcttattctgcaaatcacttactttccctctcaaagactcaggaatgcttaaaactggactattgagacagagatctaatctgactcctgcatttgagatgagataatgaggcccagatggtcggcatagttcgaaaacacccatttcaggtgttttcaggaacacctaacaaatgaagcaaccgtatcttaatgaagagagcagctggcccagggtcacgcaccaattaggaagctgttgtcccggggggccccaccggccgagccaccttgggggtgccctttcccctcggggcctccgtaccctcatctctcaaatgaaggagaggtcaggtgagcgccctgttaagactgactttcagcattcccaaggtcgcgttttatgtgctctaaaccgatcccatctcctcacctcctcatttctcgctcaaatgaacaagcacgggcttgctactgggattccttctgtccctggacacgtctttctacccaacattttgtttttcttgtttccccacatagggagataaggttgagggaacaggcaaaggctcgggaggcaggagacctgtgatctagcctggttctgtccctacgctcgggtcagcaggccgcccaggctggggagggcgacactgaccctcggggtgccggccgccacctgcttcacacggcgtcgtcgccggcacgggtacctttcctgctgcagaaggggtcggggcgccccacctgacacttgggggaggctgtgccaaggacagggcgcgtagggcacaggtgccccggctgcgcccccctccgcctccgacccctgggccccgctccaacgaccccaaccacggcccccgcccccaggccccgctccaccgaccgcgggccgcgctcactcgctgggccttctcccacagctggttcaacttctccatgcggaactcctctccggactcgcgtttcggggacggcttgggctggttcttctcccgcgagtacttgccgccgtggctcgcagcgggccagggcccgaggaagagcagcagcagtagcagcgccgggagcccgcgcagaaacgacctgaccctccgcggcgccatcttcctctgcgactggcgctgcgcggagaaaacctagcctgccgatgccccgcccactaccccgcccccacccaccgcgcggtctcctgggaattgtagttcctccgtgagcggccggcagcggcgaggccgccggcggactccagcgcctaggaagccctgcgcaggcgcaagcgtttcccaggcaaccacgccgcggcccgaggctgcagactctggcaggggatacaactggagaatgagggtggccgggtgggagcagggatcaggcctcacccagagcccggagcctggagcccgcacgactcgaggcctctttccctctctgccccacagaaagagcggaaagcccaagaaccgggccgcgtttggctgagcctgataatgctccggcttcacgcgcactgacgccgactcttgcatgtccagtgccgttgcggggttggcactgcggcccgggcctggcgctgaggagcctggcccagcccgcttctgccctccgcggagcgcctggccgtgggtaagcccaggccaggttgtcccggggacgcagggccgcgcagacgtccccctacgtcccggggcccctgccccaacccgcgtcccaagcgcctgctctcgcgcctgctgcaaggcaggacttcgcgcgcttttccccaacccatgacactctaggaaattcacagagccaaagttagcatagaccgctcgttgggggcttggccagtgagttgggaagtgccctggaggtagcgcgggaaacaaggggaaggagggagacagacagcagctgggcccctttgggctcagagaagggacaaggggagctcatctggcaagaatgatctgaaaaggcctccaagggtgggcgggattttgcggggggagggaggaatttccaactggagggacaatgacaaagggggtgaatagagcctgggcatcttgagaggaattaatgttaattcatttcctttttttgcgtggggggatagggtctctgtcatcgaggctggagtgcagtggcatgatcatggctcactgcagcctcgacctcctgggctaaagcgatcctcctgcctcagcctcccaagtagctggaactataggtgcgtgtcaccacgcccagctaatttttgaaattttttggtagaaattaggtctccctatgttgtccaggctgttctccaactcctgggctcaagcaaccctcccgtcttggtcccccaaagtgctgggattacaggcgtgggccactgggcctaccctaatttacatttaaattgtatcttgtgttgttccagagaagatttcaggtccctggaatcaaggtgatctgcttctgtcctgtgctgcttttctagtattttcagagccatcgtttcatttctttttttccagctgttgagttgtttcaggcaagagggtaaattcagtctgttactgcatcttagctggaagcacaagttcccaatatgggatgtatgggggagaggaggtaaaggaatcccccaggagggtggtggagggagaatgacctcatgcgaagtgactccagagacagatcaaatgctgtcattgccatcattgcatgtttttaagcctcaggacagaatggccaggtgagcctggcctagattctcacctgtgcctgccttccccttgtgttccctcgttcctgctcttctctccatctcctggtgcctagaatcagaggtcacctgttttaccccacata

SEQ ID NO: 1881613 - DNA, 4001 bp, Homo sapiens; identical to SEQ ID NO: 317083

SEQ ID NO: 1881614 - DNA, 4001 bp, Homo sapiens
gttttgacctcacactcttcctggaagaggacaataagaggtgtatgatgctacctacattaggctatcccttattcctgggagtttgaaacagcacaattagaaggagggttaggggaagaatgaaagaaacccagtacttctctctagtcttgtgatttgctggttgaggagagcaaggcctcttgaaaaggctgagtcaatacagtattaggaaaatattccccttcctcattctgggtttggactcagcattgacatcggtcccttggaggggtgtgcatgtgtgtgggttaagtggttatccagctggaagaatcaggagatcaaatggcatggctgcaactcacagcggcagaagacccagcgtgaagggtcgcatccttcctagacctccctctgagaccacaccaaagcccttccctcctggagagtttgcagcttgccagcttgggacactaatgaccatcacagctgagcctcccaccccaccagggtttcattttagtcagtaactcagatgtagggccatggattattggcaggagaaaggatgcatctggaactttgcctcctgtgtgtaggggtggcatttcttgaaaggtgggtggatatttgcagaggaaggttagaaaaggaatgtcttggtgagagaagtatgaaacagagccctggagactccaagtatggggatggctgagctctagaggggacccctttgtaaagaatttgacttcacagttactttacttttggattctggaaaagtcgtgacttgtatttagcttggagtttgttcttcttgttcataatttcctcaggaaggaaggaaagccagatatccactttcccactatacaatggaggatgctggagttgggtgacccagggaaacaaataagcaaggaaacaaacatcagcagtcaacatatgggaaaacaaacacgcaaagaagccaacatattctccaagaatgtggcccaccaggtgaatcctttgtccccaggcttgacagggaggctgcgccactcacctccaaatgctgcttagaagaggagggctctcaagctcaggggaggctctggcagcatcattgtgatctcagtaggaataactgtgactttgctattgcatgatgagaaatccaaatgaagctcatgaagtcgactgtaattttctaggctggtgactttcatggctctccttttttgagtagttgtttactagaattaagagagaagaaacagaattctgtattttatctttttatttatttatttatttatttttttgagacagggtctcgctctgttgcccatgctggagtgcagtggtgcaaccatggctcactgcagcctcaaactcctggactcaggcaatcctcccacctgaacaacctgagtagctggaactacaggtgcacactgtcatgcccggctaattttccaattttttgtagagatgggtgtcttgctatgttccccaggctggtctccatctcctgcctcaagtgatcctcccaccttggcctcccaaagtactcctgggattagaggcatgggctacaacatccagccttgtctttttatcttttggatagtcatgacaccaaaaatcctggtgtgggcaccgtggctcctttgagggcagaggctgaggagaagccccaagatatggccaaggccaggagggatgaggctgaggtggatggtagaggtgtacaaaggcctttgtagtggtgtctgggggacttacagagacaagaatggggagaatgagatgctggcttgacagtaggtggagcaagctggctttcatttggtaagatttgaaggaccctggaaggctaagcaggcttgctttatatgggtatctcgcttctcttcttgggacctccccactgctaagtgaggctttgctagagcatggagccagctacccaaagcctgggtcccaccgtgagaggcctcacagtggggagcccaaaggcccaggccatgtgcaagtagattgtcacaatgggaaagtgtgtttgacactaaagtctactttagatgatgtcacaattttgacttgattcaaccccagaaatgaagttcctaacaaattggaccttttttattccccatgataagaggccaaatgctgtcaccttcagtatgatgctggctctgtcttccccaaataataaatattatttctatccttcattccaggaatgattggctggtttgttttgttctcgatcatggataaatatgctcctcaatagcttttctttatttatgtattatgtggaacatatgtcataactgcagttatccagctgaggaagtaggtttctttatttggacctaatttcttaagaaattatgtttcttttatgatattcaggcatttataagctctgcagcttttctttagaagtctttttggtctaatctagtaaagtttctggcacacaagagatgccaatacattttgttgaattatctgctggaagttgcaggaagaacctcatgctggagaatcctggaggaaggcattttaaaatacaggcaaccatcagtccagttggttggtctgaaatatcattcagactttggccttaagtctatttggtattgattctgcttttctctctggtgacatgtttcagatctgttaccaacatgtttctccctgacttcagtcagccagcaaaaagacaaaattgattaatccatgatgaatgtatggccaaatgtatggatgaccttgaagcagcggctgttttttcagcatcatggtttatgggctgtctcatcataggtgggcatttcttctgctaattccaaagagtcttccttgctgctaaatccaatgaaccctccttgctgctagttccaatgagccttcctcgctgctagttccaatgagacttccttgctgctttaataggaattttaaaagcatgttgaaatgaaccatccctaacatttgaagaatgttgtcattgtgtttgtgaatgaactgggacagtttcctaaaatgaatagaaattacaacttgctgctcagaagtatggagcgtagggtaagaagggcagctaagaattgcaaataagcatattgatgtgggttagcagtgacggggagagagagaaagtggagtataaaaggaccctgcagatctctgtcaatgtgattgatttcagtgatgtatactgctgtgtgtgtatgtgcttttggcctgtagtactaattactgaaaatggactaagattaaaaagggaattgccagatgcctttaggaaacttgggctgttacatgaatattatatttaattatattaaaagtcaactatagcttattgcccataagagacaaggtaggtaatgagtttactctgagcacaactgttggttatcacttagccattaaccagcctgtgattcgcctagcgccagctccctgttctgagggcaccagaaaagcgggagaaccaaagacagctctaaaaaggtcagtattacaaaagagtaccaaaattgtcatcacaggacaatcatgttcctccaccctgccttacactcattttacagcttggacttgtttgtgcattgactgcctacttgttttggtacttggaagcttcaggttctaaatgtcttaatctggttttctgtctctacctcttgtttttgctcacatttactctctgctacttatttttcttgagagcattatttgccctctttcataatgttatgggaagacttatgggaaaatgaggaaccaaaaccatttctagaagcatccaaaagacttctcagatgtaagccacgttgtagcctccaacggccttcctgtcagcctgacttccaggacagttttcaaaggctacaggcataaatggttgattatttcctataagacgctggctcaggcataggtttgctttaaatagcagttgttgtctaacctaaggcattagacataagatatgatacacaagtcag

SEQ ID NO: 1881615 - DNA, 4001 bp, Homo sapiens
atttttctcacaaattaaaagctttttatgaaaaccaaacttgatggttcaggtagaaactttgggcaatatttaacccaactaactttgtaaaataaaaacatctgtagagtttttttttctgtttcaagtcctgtgatacacatagcttaaatcccatgtcttcacagacaaggagtaaattctctctctcccctaatttcttgaaaaacagagtagaagctctctcagcgaaactttacttaagaaaatgtttccattttctctataaatgctgactgatgcccaccatacattaaaagcttgtagcttactagccattctataatatgtgtacattcttctcccactagtaaagttatatgctcagcaagagtcaagtatgtttatcccaaaccttttgatcctattgtagttgctattgcaattacataatttaaataaatcttagattatctaataaaaatgagttccaaaaattattgctttatgaaaattacgatgcatgctttgtaagaacttaataaaaaggaatttctacaatattgctattgaattatgggtatgtctgaaacaaatcaaaaagattggggaggaagcttcgaaaatatttagaagttctacaatcagattgttttgcaagtgtctttaattactgactgcctttaacagataacaaaccagtgagacaatgcctacaaataggtattgtttatttttaaaaacacaaagctaaaccccaaattctggaaacttcttaaataaaatatacttaaataaaaggtcttgactggacatcagatcattggtaaacgaatgtccaacttacgtgtttcaagttgaaataaaatgtttaaactacgcatatatcagttttttctccactttaaccatcttttttattaactgatcaaataatggttttgctactgctatgaaataaagcttctttatgtggtagagggcatcaaatttgggtttttgaatcctaatttgggttctatgttgggtgcattacttcacctttatgggcttcaatctcatttcacatgaatgaagacaatatctacctaacagaaccaagtgaaatagcacatgtaaaacactggtaacagatcaataaatgatactactatgattattgttctgaaacaaaacatgaatataaaagcataagataataaagtagatttacaagaccaaaacaagatggatggactggaaatagatagactcatccccagagatagtgtgtgtgcaaagagattgctgatcactttgaatggtcagcatcattaataagctcacactctttatgactatttggtaatgataaaatccaacactggctgggcgcggtggctcatgcctataatcccagcactttgggaggccaaagtgggtagatcacctgaggtcaggagttcaagacctgcatggccaacatggcaaaaccccatctctactaaaaatacaaaaattagccaggcatggtggcatgtgcctgtaatcccagctatttgggaggctgaggcaggagaatcgtttaaacctgggagactgaggttgcagtgagccgttatcacgctactgcactccaacctgggcaacagagcaaaacttcgtctcaagaaaaaaaaaatctaacacgcaacttggaacactgtggaatgagtcttaaaatcagtgagcatgtgtgcttgagaaagtatttaatatccctgatagaagtagagctatttatagtcatttttgttaatgggcttcattatcaaagatttacaccaggccttaatcagaataaagggacgcctcacaaaagctttgtttcgaatggaaaaacacaacaaagaacaatcaccatttgacaccaagtatgcataattccaaatggaagtctctgtaataggttcttttaaaaatagatttattaccaaagcaaagtaataaataggcaggagatggacctttatttcactcctataattgatccagttttagttaagggcagaaactggcccagttacaggaataaaataaaagagtacagagtcaaccaatctgtcagcttggcacacctatgaaatattgtgaagaaaatttgtcagaataagcatctttctcactcattagattggagatgaaatgtcacctttcccaaacaaaacaaaacaaaaacaaactaacaacacatacaaccacacggtaggaactacagttacaattgaagacaaaatccaggaagaggaacttctataacttgggcatcattctgcttatatattttccatgcggtgtcagcattaaggattacgactgatcccaaaaagagctgactttaaatgtgggagtgtatttttggataaatcagagtggagggtttcaattatcctccacacctctctgggccttctggagaggcagcttggaggcccttctccaattaaagcagagagtgtatctcacttccacactgtaaaactctatcttaagaaaaggatctgctgcttaaaacaatctgaaaaccactgaaataacccatctgaatttttttgtcatgtgtgttcacagaaactaatggagtttggtagccctctgctggatgaaagatattaaatccagttgctctgaagtactatttgaggatttaaaagtcttcataaggtttagagggctactttaacatttgctgtgtatatttttgtgtttagtggatatttttctgctttgcagaagagaagaagacaatgtcctttccgtcaagccataccatataatagtaagctagaataactgaatacaaattataaatttaaatactatataattttttgagtaaaaataggaattgacagaaagctagtaaaatttaagcattagcaaaatatttataagttagcagttgccacatccctctcccaaatctctaatggggttaaggatttctcttaacttcattgtaggttaaatcaaaatatgtataacgaatttctttaaagtttgtttatgcagtctcacactgtacactagtacacattaagttaaatctagtcttacacacatttgagtaatacaatatgatcaggttttttgtttaaggtaagaaaatttcaaacatgatggcagaattaccatagactattcagcttttaagttggatgtacaaacacagtttgtgaagcatgtcagatcatggaataatactctacagaaattgtttcacaaatgaaccttcatgcctatagctgacccaagtggaaaatgatttaatgtgtgtttgacagcaatagtaaaattaatgagtcttgaaatagtttcttataatcttggatcaatttttggttaattttattccatatagctaatcttttcaaaatcccatctttctatcgtagcaattaaaactgtctcttactttccaccttctcttttctcttgttacctgtctggcctctgtcactgctgcttcctaaatcaactgataaggtcttgcctggtccacagtctcttcaactttcctatcctcaccacttgatactgacttccaaattttgctaaggaattaaggaattcttttacaattctccagaacacagaaccaatttacttttgcatctcggttcagataaaaaagtttaaactttgatgtctaattataattccaacctaggttaattatatgcctaagacttcagaagggctacctactcataaaatttgcctatgaccaactgctcataattttactaaatagccaaaattcctctcctcctgaatttctattcagctttgcctgtctgctagggcacccctgtcatgaacattagcctctcaatctgattggattctcacctatttcctggagtcattttctagggttaccacaaccatcaagtatgctgaattgagttacatcctgtttctgctgctcactgtccataactagatacttccaggagggctcccaagatactatactattacctaaattatgttcttca

SEQ ID NO: 1881616 - DNA, 4001 bp, Homo sapiens
tgatctcaaaacaattcacatttgcatctaaaatgttacaatgaaaccacataactccctcctcaaaatgtttcatgtgacgtctccttgaagtggctttcactttagctatgtgtggcttcctttatttgcttcagcaacaaaaatatgaaaatgaatacaggcatacctcacttattgtgttttgcctcactgcactttgcaggtattacattttttacaaattgaagatttatagcaattctgtcacaagcaagtctagcggtgccatttttccatcagcatgtgctcactttgtgtctcttgtgacattttggtaattctcacaatatttcaaactttttcattattattgtatgttatggtaatctgtgatccatggttttgtatgttactattgtaattgttttaaagcacctcatgtcacaccgatataagacaacaaatttaacaaataaatgtgtgtactctgactgctgtgctgaccagtcatttacccatctctctctgtctctccttgggcctccctactccctgagacaaaataatattgaaaatgaggcttattaataaccctaaaatggtctctaactgttcaagtgaaaagttgcacatgtttcactttaaatcaaaaggtagaaatgattaagtttatcatgcaaggcatatcaaaagtggagacaggcccaaagctaggcctcttgcgccaaacatccaagttgtgaatgcaaaggaaaagttcttcaaagaaattaaaggtgctacctagtgaacacacaaatgataagaaagctaaagagcctaatgccaatataagaaaagtttttgtggtctggatagatcaaaccaatcacaaaattctcttaagccaacacctaatcagcagccaagaccctaactctcttcaattccatgaaggctgagagaggtgaggaagctgcagagaaaaagttggaaattagcagaagttggttcatgacatttaaggcaaaaagccatctccacaacataaaaatgcaaagtgaagcagcaaattttaatgtagaagctacagcaagttatccaggagaccttgcttaagatcattaatgaaggcggctacactcaataacaaattttcaatagggatgaaacagccttctattggaagaagatgctgcctaggactttcacagctagagaggggaagtgaactcttggcttcaaatttcaaaggacaggctgactctctttttaggggttaatgcagctggtaacttaagttgaggcccatgctcatttaccattctgaaaatcctaaagcccttaagaattatgctaaatctactctgcctgtgctccgtaagtggaacaacaaagcctggataacagcacatctgtttacagcattgttattgtttgctgaatattttaagctcttggctgagattgagatttactgctcagggaaaaaaaaaaaatcctttcaaaatattactgctctttgcaatgcacctagtcatccaagagctctgatcttgtacacagcacccattctgcagtccatggatcaaggagtaatttaaactttcaaattgtactatttaagaaatatatctcataagactgtcactgccatacatagtgattcctctaacagatgtggacaaagtacattgaaaaccttctggaaaggattcaccattctagatgccattaagcacattcatgattaatgaaagaggtcaaaatatccacattaacaagagtttgaaataaactgactttaaggaatttaagccttcagaggagggagtaactgcatatgtggtagaaatatcaagagaactagaattaaaagtgaatcctgaagataggactgacttggtgcaatcccatgataaaattttaatggataaggagttgcttctcaaggatgagcaaagaagatagtttctttagaatctaaaaaatctactttctttgctcatccttgagaagcaactcaaaggatttccaatactacatacatttagctgataaagcaacagccaccccaagacactgacagttcagatgatcattagcacaacggttatgtattttttaagtgaagtatgtacattgcttttttaaacataatgctattgcacacttaacagactacagtatagtgtaaacataactttaacatgcattgtgaaaccaaaaaatttgtgtgactagctttcctgtgatattcgctctattgtggcagtctggaatatctccaaaccgacaatatctccaaaatatgcctgtataaagccacaatatctctaaaatatgcctgtataaaaaggcaacgtctacaaaaaaaggctaacagtgtacaataactagcactacacttttttttcatagccttaacctaggggaaaaacttaaggtccaattaaaatgacttttttatggatctcatagttggtacttctttttatgttttggatcgtttgtgttataacaccataataaggtcaataatgccaagaaaagcataatttatggtccagtcccattgttgtgggcctcaactacatatttctacaaagaagacaaaaatatctgccccacgaaaagtattagatttttctcccacagaaaatgccacagatgttcagccaaaatgatttccaggagcaatgatattttatataaaaagaaatccctaataacaagtattttctatcaattcactgacaccatctaatatatttggcctcatcttgccctgaagttagtgttatggtggtaaaagcccaggatctgagtcacgacttggagtccaaatacctgatctaccacttactcactaggaaactttgcataaggtacttaaaatgaggtaatatacatgcaaggcatggatattaatgtcattaaaatttttagaatagaagggaggacaggaagtactttgcttcattattcttgtataataaacagaaatatcttccccagtcaatttttttgttgtaaaaaaacaaatgaagaataatgtgccaggcattgcactaagcactggagagatcaactggataagaccctgcccctcagagatttctcagttaatgaagaaaaaatgttgccaacatttgtgatccatcgtgcgtacaacagacaagtagcagcacagacagctggtaagggtttcagagaagtttcacacaggagagacagattaaaagtgttccatgcagaggtaaagcaaatgaaaagcatggaaggtgtgcttcaggtttttaagtccttcagctcaatcaacttttattatatgccaaacacagataaacaatcagaatacacatataaataaaaaatgttctcagctcccaaaaatttatattcaaataaattggagacttaaaataagttcagtacaatgtaacatatgctatattataaatattttcagaattcatgtgatagggtcaaattccgtaatatacagagttcctgcaaaccagtaaaaaaagggatcaaccaccaagtaggtatcggcataatcaagtgttcgttttagaaaaataatcctagtgccaatgtgacaaaacatatgtgtatgcaagagaaaaaggttgaaagcagagacactgatgttgggaggctcctgcagcactaggttagaagtatttaaaagacttgaactgagaggtatgtttaattgactgggatgggtggtggtgacatcaccaagcataggaaacacaggagaacagacatccaactgtattttcaccatacccatccacagcaactgttgtatatagggtttgagagacagctcaagagaaaagtctaggtttcaaatacagatgtgccagtgatcagcctacaggcattaatcaatcctgtaagtgtaaggacatgagactgcctagagaaaggtataaaggaatgagggaacatcaacatttaggattcagtcaagatgagatagcaaaaagtcaaaaaagaagaaattcatgaaagccaatgaggac
